United States Patent Application Publication US 2025/0018062 A1 - sequence listing, part 9

SEQ ID NO: 14956 - DNA, 3036 bp, synthetic construct
  misc_feature 1..3036: note = source = /note="Description of Artificial Sequence: Synthetic coding sequence"
  source 1..3036: mol_type = other DNA
atgccggcttctgccccgccacgccggcctagacctccccccccttcactatccctgctgctggtattgttgggactgggtggcagacgactcagagcagaaccaggcgatggagcgcaaacctgggcccgtttctctagaccacctgcccccgaagccgccggcctgtttcagggaacattccccgacggcttcttgtgggccgtagggtcagctgcctatcaaactgaagggggctggcaacaacacgggaagggcgcctctatctgggataccttcactcaccatccactcgcgcctcccggtgactctcgaaatgcgtccctgccactgggtgccccctcccccttgcagcctgctactggcgatgtggccagcgatagctacaacaatgtcttccgcgacaccgaagctctgcgagagctcggggtgacccactatcgtttttcgatcagctgggcacgcgtgctgccaaatggttcagcgggcgtgcctaatcgggagggattgcggtactacagacggcttttagaaagactgcgagagctgggcgttcagcccgtggtgaccctttaccactgggatttgccacagaggctgcaagacgcttatggaggctgggctaaccgcgcgctcgctgaccattttcgcgattatgccgaattgtgcttcaggcactttggaggacaggtcaagtattggattactatcgataacccgtatgtggtggcatggcatggctatgccacagggcggcttgcccctggcatcaggggctccccgcggctaggctacttagtcgcccataacctgctcctagcacacgccaaggtttggcatttgtataatacctccttcaggcctacacagggcgggcaggtctcaatcgctctctctagccattggatcaatcctaggagaatgacagaccactcaattaaagagtgtcagaagtctttggatttcgttctaggatggtttgcgaaacctgtgttcatcgatggcgactatcccgaatccatgaagaacaatctctcatctatactcccagattttaccgaatccgaaaaaaagttcatcaaggggaccgccgacttttttgccctgtgtttcggcccaaccctgtcattccagcttctggaccctcatatgaagtttagacaactcgaaagtcctaaccttaggcagctactttcatggatcgacttggagttcaatcacccgcaaattttcattgtggagaatggctggttcgtatccgggaccaccaaaagagacgacgccaaatatatgtactatttaaagaagttcattatggagacactgaaggccatcaagctggatggcgttgacgttatcggttacactgcctggtcactcatggatggtttcgagtggcataggggatacagtatcaggcgcggtctgttctacgtggactttttaagtcaggataagatgctcttgccgaagtcgagcgccctattttaccagaaactgattgagaaaaacgggtttccaccacttcccgagaatcagcccctggagggtacattcccttgcgatttcgcctggggcgtcgtggacaattacattcaggttgacactacgctttcacagtttactgaccttaacgtgtatttgtgggacgtccatcattctaaacggctgatcaaggttgacggagtcgttacgaagaagaggaagagctattgtgtggatttcgcagcaatccagccccagatagctctattgcaggagatgcacgtgacccactttcgattctcattggactgggcgctgatattgccgcttgggaaccagtcccaggtgaatcatacaatccttcagtattatcggtgcatggcctcagaactcgtgcgcgtgaacatcactcctgtggtggcgctatggcagccaatggccccaaaccaaggactccctcgtctcctggccagacagggagcctgggagaacccttataccgctctagccttcgcagaatacgctaggctatgctttcaggagctcggccatcatgtcaagctgtggatcactatgaacgaaccttacacccggaatatgacctacagtgcaggccacaatctgctgaaggcgcacgcgctcgcgtggcatgtgtacaatgaaaaattcagacatgcccagaacggcaaaatttcaatcgccctccaggcagactggatagagcctgcttgtcccttctctcagaaagataaagaagttgctgaaagggttttggagttcgacatagggtggctcgccgaacccatttttggaagcggcgactacccctgggttatgagggactggctgaaccagaggaataacttcctcctcccctattttacggaggacgaaaaaaaattgattcaaggtacattcgatttcttggccctttcccactatacaacaattctggtggactccgaaaaagaggatccaattaagtacaacgattatctggaggtacaggagatgactgacatcacgtggctcaacagcccttcccaagtggcggtggtgccatggggtctgagaaaggtgctcaactggctgaagttcaagtacggagacctgccaatgtacattattagcaatggaatcgacgacggtctgcatgccgaagatgaccagctgagagtgtattacatgcagaattacatcaacgaggcgttaaaggcacacattctcgacgggataaatctgtgtgggtattttgcatactcttttaacgaccggacggcccctaggtttggcctgtaccgatacgccgctgatcagtttgagcccaaagcctcgatgaagcattaccgcaagattatcgatagtaacggcttcccaggacccgaaacccttgaacgtttctgtcctgaggaatttacagtgtgtaccgagtgttcattcttccacacgcgaaaatcgctactcgcattcattgctttcctattttttgcttccatcatctctctgtctttgatattttattattccaagaagggccggcgttcgtacaag

SEQ ID NO: 14957 - DNA, 3036 bp, synthetic construct; identical to SEQ ID NO: 14956
  misc_feature 1..3036: note = source = /note="Description of Artificial Sequence: Synthetic coding sequence"
  source 1..3036: mol_type = other DNA

SEQ ID NO: 14958 - DNA, 3036 bp, synthetic construct
  misc_feature 1..3036: note = source = /note="Description of Artificial Sequence: Synthetic coding sequence"
  source 1..3036: mol_type = other DNA
atgcctgcctcggcaccacctcggcgcccacggcctcccccgccatcgctctcgctgcttcttgtgctcctggggcttggtggaagaagattgcgtgccgaaccgggagatggagcacagacctgggcccgcttcagcagacctcctgccccagaagcagcaggactgtttcagggcacttttcccgatggatttctgtgggccgtgggatcggcagcatatcagactgaagggggttggcaacaacatggcaagggcgcatccatttgggatacgttcacccaccacccccttgctccccctggcgattcgaggaacgcctcgctgcctctgggagcaccttcccccctgcaacctgccactggggacgttgcatcagatagctacaataacgtgttcagagatactgaagctctgcgcgagctgggtgtgactcactaccgattctcgatcagctgggcccgtgtccttcccaatggctcggcaggtgtgcctaatagggagggtcttaggtactaccgccgactgctggaaagattgcgggaattgggggtgcagccagtggtgaccctctaccactgggatcttcctcagaggcttcaagatgcatacggaggttgggctaaccgggcccttgcagatcactttagagactacgccgaactttgttttcgtcactttggaggacaagtcaaatactggattactattgataacccctacgtggtcgcatggcacggctacgccactggtcgccttgcacccggaatccgaggatcacctcggctcggctacctcgtcgcacataatcttctcttggcccatgcaaaggtctggcacctttacaacacctccttccgaccaactcaaggcggacaggtgtcaatcgccctgtcatcgcactggattaaccccaggagaatgaccgatcattccatcaaggaatgtcaaaaaagccttgacttcgtgctcggttggttcgcgaagcctgtctttattgatggagattacccagaatcgatgaagaataacttgtcgtcgatcttgccagattttactgaatcggaaaagaagtttatcaaaggaaccgccgatttctttgccctgtgcttcgggccaaccctttcgtttcaactcttggaccctcacatgaaattccggcagctggagtcccctaaccttagacaactgctgtcctggatcgacctcgaattcaaccatccccagatctttattgtggaaaacggctggtttgtgtcggggaccactaagagagatgacgccaagtatatgtactacctgaaaaagttcattatggaaaccctgaaggcaattaagctggacggagtggatgtcattggttacactgcatggagcctgatggatggctttgaatggcacagaggctattccataagaaggggtctgttttacgtcgattttctctcacaagataagatgctccttccaaagagcagcgctctcttctaccaaaaacttattgaaaagaacggatttccaccactccctgaaaaccagcctctggaaggaacttttccatgcgactttgcgtggggagtggtcgataactacatccaagtggacaccaccctctcgcaattcactgatctcaacgtgtacctttgggatgtgcatcattccaagaggctgattaaggtggatggcgtggtgactaaaaagcgcaaatcgtactgtgtggattttgccgcaattcagcctcaaattgcacttctgcaggaaatgcacgtgactcattttcggttcagcctggactgggcacttatactgcctcttggaaatcagtctcaagtgaaccacaccatcctccagtactaccggtgtatggcaagcgaacttgtgagagtgaacattaccccggtcgtggccctgtggcagccaatggcaccaaatcagggactccctagactccttgcaaggcagggtgcatgggagaacccatacacggcacttgcatttgcagagtatgcaaggctgtgcttccaagagctggggcatcacgtgaagctgtggattactatgaatgaaccttacactcgcaacatgacctactcagcaggacacaatcttctgaaggcacacgccctcgcgtggcatgtctataacgaaaagttccgtcatgctcaaaatggaaagattagcattgcacttcaggccgattggattgaaccagcatgtcccttctcacaaaaagataaggaagtggcggagcgcgtcctggaattcgacattggttggttggcagagccgatttttgggtcgggagattacccttgggtcatgagagactggctgaaccaaagaaacaacttcctcctgccatactttactgaggacgaaaagaagctcattcaaggaacgtttgactttcttgcactgtcgcattacactactattctcgtcgactcggaaaaggaggatccaatcaaatacaacgattatcttgaagtgcaagaaatgactgatatcacgtggctgaattcgccgtcccaagttgcggtggtgccttggggtcttagaaaagtgctgaactggctgaagttcaaatacggtgacctgccaatgtacattatctccaacggaattgatgacggcttgcatgcggaagatgatcaactccgagtctactacatgcaaaactacataaatgaggcccttaaggcccacattcttgatgggattaatctttgtggatacttcgcctactcgtttaatgataggactgcacctcgctttggactgtacagatatgctgcagaccaatttgaaccaaaagcatctatgaagcactaccgtaagattattgacagcaacgggtttcctggacccgagactttggaaagattttgtcctgaagaatttaccgtgtgtactgaatgttcttttttccatacccgaaagtcgctccttgcattcattgccttcctgttctttgcatctattatctcactgtccctcatattctactacagcaaaaagggccggcgctcgtacaaa

SEQ ID NO: 14959 - DNA, 3036 bp, synthetic construct; identical to SEQ ID NO: 14958
  misc_feature 1..3036: note = source = /note="Description of Artificial Sequence: Synthetic coding sequence"
  source 1..3036: mol_type = other DNA

SEQ ID NO: 14960 - DNA, 3036 bp, synthetic construct
  misc_feature 1..3036: note = source = /note="Description of Artificial Sequence: Synthetic coding sequence"
  source 1..3036: mol_type = other DNA
atgccagccagcgctccaccgagacggccaagaccaccgccgccatctcttagtcttctcctcgttctgctgggcctgggcggtcgtcgtctgcgcgcggaaccgggtgatggggcgcaaacatgggcacgtttctctagaccgccagctcccgaagcggctggactttttcaaggaacgttcccggacggatttctttgggctgtcggctcagccgcctatcaaacggaaggcgggtggcagcagcatggtaaaggcgcgtcgatctgggatacatttacgcatcatcctcttgcgccgccaggggatagcaggaacgcaagtctacctttgggcgcgccaagcccgctacaaccggccactggcgatgtagctagcgattcttacaataacgtgttcagggatactgaagccctgcgcgagttaggagtgacgcattatcgtttttccatttcatgggccagagtactgccgaatggcagcgctggagtcccgaacagagaaggcctgcgttactatagacggctgcttgaacgccttagagaactgggcgtccagccggttgtcacgttgtatcattgggaccttcctcaacgtcttcaggacgcgtacggaggttgggcgaatcgagcactcgctgatcattttcgagattatgcggaactttgttttcgccatttcgggggccaggtcaaatattggattacgatcgacaatccatatgtagtcgcttggcatggctacgctacaggacgtttagcgccgggcatccggggatcgccacgactgggctatcttgtagcgcataatctgctgctcgcccatgcaaaagtctggcacctctacaacacatctttcagacctacccagggtggacaagttagtattgcgctttcctcacattggataaatccccggcgcatgacagatcactcaattaaagagtgccagaaatccctcgattttgtcctgggatggttcgctaaaccagttttcattgacggggattatccggagagcatgaagaacaatttaagctctattttgcctgacttcacggaatctgagaagaaattcatcaaaggaacggcagatttttttgcgttatgtttcggtcctacattgtcttttcagctgctggacccacacatgaaatttagacaattggaaagccccaaccttcgtcaactactttcgtggattgacctggaatttaaccatcctcagatctttatcgtggaaaatggctggtttgtgtcaggcacgacgaaacgcgatgatgccaaatatatgtattatctcaaaaagtttattatggaaacgttgaaagcgatcaaactggacggagtggacgtgattggttatacagcgtggtccttaatggacggctttgaatggcatcggggttactccattcgaaggggcttattttatgtggatttcctgtctcaggataaaatgctccttccaaaatctagcgctttattttaccagaaattgattgaaaagaacgggttcccgccccttccggagaaccaaccgttagaggggacatttccttgtgacttcgcgtggggggtcgtcgataactacatccaagtggacacgacgctgagtcaatttactgatcttaacgtgtatctgtgggacgtacatcatagtaagagattgattaaagttgacggagtagtgacaaagaaaaggaaaagttattgcgttgattttgctgcaattcaaccacaaatcgctctgctccaagaaatgcatgtgacacattttcgtttctctttagattgggcccttattctgccccttggtaatcagtctcaggtaaatcacactattttacaatactatcgctgcatggctagcgaactggtgcgggtcaatattacaccggtagtcgccctttggcaaccgatggcacctaatcaggggttaccgcggctgctggcacgccaaggtgcttgggaaaatccttatacggcacttgcttttgctgagtacgcccgtttatgctttcaggagctgggacaccacgtaaaactttggattacgatgaatgaaccttatacaaggaatatgacatatagcgctggccataatctgttaaaagcacacgctttggcctggcatgtttataatgaaaagtttaggcatgcacaaaatggtaagatttcaatcgcgttacaagctgattggattgaaccagcttgcccgtttagccagaaggataaagaagtcgcggaaagggtcctggagtttgacataggctggctggcggaacccatctttggatctggggactatccgtgggtcatgcgggattggcttaaccagagaaacaactttctgctgccgtatttcaccgaagatgaaaaaaaattaatacagggcactttcgattttctcgcgctgtcccactatacaacaattttggttgactcagagaaggaagacccgattaaatataatgattatcttgaagtacaggaaatgactgatatcacatggttgaactccccaagccaggtggccgtggtgccttggggccttcggaaagtgcttaattggctgaaatttaagtatggcgatctgccgatgtatattatcagcaatggaattgatgacggactgcatgctgaggatgaccaactaagagtttactacatgcagaactatataaacgaagctctaaaagcccatatccttgacggaatcaatctctgcggctactttgcatactcattcaatgataggactgctcccaggtttggactgtaccggtatgcggccgatcaatttgaaccaaaagcctctatgaaacactatagaaaaatcatcgatagcaatggcttccctggaccggaaacacttgaacgcttttgcccagaagaattcacagtatgcacggagtgcagtttttttcacactagaaaatcccttcttgcgttcattgcgtttctgtttttcgcgtctattatttcactgtctttgatcttctattactctaaaaaaggcagacggagctataaa

SEQ ID NO: 14961 - DNA, 3036 bp, synthetic construct; identical to SEQ ID NO: 14960
  misc_feature 1..3036: note = source = /note="Description of Artificial Sequence: Synthetic coding sequence"
  source 1..3036: mol_type = other DNA

SEQ ID NO: 14962 - DNA, 3036 bp, synthetic construct
  misc_feature 1..3036: note = source = /note="Description of Artificial Sequence: Synthetic coding sequence"
  source 1..3036: mol_type = other DNA
atgccagcctcggcacctcctcggcgccctcgtcctccacccccttcgttgtcactgcttcttgtcctgctgggactgggagggagacggctccgggccgaacctggggacggcgcacaaacctgggccagattttccagaccacccgcacccgaggccgctggattgtttcaaggcacttttcccgatggatttctgtgggcagtgggttcggcagcttaccaaaccgaaggggggtggcagcaacacgggaaaggagccagcatctgggatacgtttactcaccacccgcttgccccgccgggggattcaagaaacgcctcgcttcccctgggtgccccctcacctcttcagccagccaccggagatgtggcctccgattcgtacaacaacgtctttagggataccgaggcgcttcgagaactgggcgtgacccactacagattttcaatttcgtgggcccgagtgctccctaatgggtcggccggggtgcccaaccgcgagggactcagatactaccgaaggcttcttgaacgcctccgcgagctgggagtccagcctgtggtgaccctgtaccactgggaccttcctcaaaggctgcaggatgcatacggcgggtgggccaacagagcacttgcagaccatttccgagattacgcagaactgtgttttcggcattttggtggccaagttaagtattggatcaccatcgataacccatacgtggtggcctggcatggttacgcaaccggcagacttgcaccaggtatacgaggatcgccgcgacttgggtacctggtggcccacaatctcctcctggcccatgctaaggtttggcatctgtacaacacgagctttagaccgacccagggaggtcaggtgagcattgcgctgtcctcgcattggattaatccccgcagaatgaccgatcactccattaaggaatgccagaaatcgctggatttcgtgcttggatggttcgcgaagcctgtctttattgacggagactacccagagtcaatgaaaaacaacctttcgtccattcttccagacttcactgagtcggaaaagaagtttatcaagggtaccgcagatttctttgccctgtgttttgggccgactctcagcttccaacttctcgatccacacatgaagtttaggcaactcgaatcgcctaacctgagacagcttctgtcctggattgacctcgagtttaatcatcctcagatctttatagtggaaaatggatggtttgtctccggtactactaagagagatgatgccaaatacatgtactacttgaagaagttcatcatggaaactctgaaggctataaagctcgatggcgttgatgtgatagggtatacggcatggagtttgatggatggctttgagtggcatcggggttactccattcgaagaggtttgttttacgtggactttctctcgcaggacaagatgcttctgccaaaaagctccgcccttttctaccaaaaacttatcgaaaagaacggatttcctccgcttcctgagaatcaaccacttgagggtacttttccatgtgattttgcttggggagtggtcgacaattacatccaggtggatactactctttcacaatttaccgatctgaatgtgtacctctgggatgttcaccactcgaaaagactcatcaaggtagacggcgtggtgactaagaagcggaaatcctactgcgtcgactttgccgcaattcaaccccagattgcacttctccaggagatgcatgtgactcatttcagattctccctggattgggcacttatacttccacttggaaatcagtcgcaagtgaaccacaccatacttcagtactatcggtgtatggcatcggaactcgtccgcgtgaacattactccggtggtggccctctggcaacccatggcacctaaccaaggcctgcctagactgctggcaagacagggtgcgtgggaaaacccgtacacggctctggcatttgccgaatacgcacgactgtgtttccaagaacttggtcatcacgtgaagctgtggatcacgatgaatgaaccgtatactaggaacatgacctactcagcaggacataacctgctcaaagcgcatgcccttgcctggcatgtctacaacgagaagtttcggcatgcacaaaacgggaagatttccattgctctgcaagcagattggattgaacccgcatgtccattctcccagaaggataaagaagtcgcagaaagagtgcttgagttcgacatcggatggttggccgaaccaatattcggaagcggagattacccttgggtgatgagggactggcttaatcaaagaaacaactttctgctgccatactttactgaagatgagaagaagctgatccagggaacctttgactttctcgcgctgtcacattacaccaccatactcgtggattcggagaaggaggacccaatcaaatacaacgactacctggaggtgcaagagatgacggacatcacctggctgaactcacccagccaagtggctgtggtgccttggggactcagaaaggtcctcaactggctgaagtttaagtacggagatctgccaatgtacattatctcaaatggtatcgatgacggcctgcacgccgaagatgaccagttgcgcgtgtactacatgcagaattacattaacgaggcccttaaggctcatatcctggatggaatcaatctgtgcggatatttcgcgtactcatttaacgatagaacggcacctcgcttcgggctttacagatatgcagcagatcaattcgaaccaaaagcatcgatgaaacattacagaaaaatcatcgactccaacgggtttccaggacctgaaacccttgagagattctgtccagaagaatttaccgtctgcactgagtgttcattctttcatactagaaagtccctgctggcgtttatcgcatttctgttttttgcaagcattatctccctttcactgattttctactactcgaaaaagggccgcagaagctacaag

SEQ ID NO: 14963 - DNA, 3036 bp, synthetic construct; identical to SEQ ID NO: 14962
  misc_feature 1..3036: note = source = /note="Description of Artificial Sequence: Synthetic coding sequence"
  source 1..3036: mol_type = other DNA

SEQ ID NO: 14964 - DNA, 3036 bp, synthetic construct
  misc_feature 1..3036: note = source = /note="Description of Artificial Sequence: Synthetic coding sequence"
  source 1..3036: mol_type = other DNA
atgccagcatctgccccgcccaggcgcccgcggcccccaccaccgtcgctgtcactgctcctcgtgttgttgggactcggtggacggagactgcgggccgagccaggggatggagcccaaacttgggctcggttcagccggcctcctgcgccggaagcggcaggcttgtttcaggggaccttccctgacggatttctgtgggcggtgggcagcgctgcataccaaaccgaaggcggatggcagcaacacggcaagggagcttcgatctgggataccttcactcaccatccactggctccgccaggggactccagaaacgcgtctctcccgctcggagcaccttcccctctccagccggcaaccggagacgtcgcttcggattcgtataacaacgttttccgcgacactgaggcgctccgcgaacttggagtgacccactacagattctcgatctcgtgggccagagtgctcccgaatggatccgctggagtgccgaaccgcgaagggcttcgctactacaggaggctgctggagcggctcagggaactgggagtgcaacctgttgtgaccttgtatcactgggatctcccacagcgcctccaggacgcgtacggaggttgggcgaatcgtgccctcgctgaccattttagagactacgctgaactttgcttccgccacttcggaggccaagtgaagtactggatcactattgacaacccttacgtcgtggcctggcatggctacgccactggacgcctcgctcctggcatccgcggatccccacgcctgggctacctcgtggctcacaacctgctcctggctcacgcgaaggtgtggcacctgtacaacacctcgttcagaccgactcagggaggacaagtgtccatcgcgttgagcagccactggatcaatccgagacggatgaccgatcacagcattaaagagtgccagaagagcctggacttcgtgcttggttggtttgccaagccggtctttatcgatggagactacccggagtcgatgaaaaacaacttgtcgtcgatcctgccggatttcaccgagagcgagaaaaagttcattaagggaacggcggactttttcgcactgtgcttcggcccaactctgagcttccagctgctcgatccacacatgaagttcaggcagctcgaatccccgaacctgcgccagctgctctcctggatcgacctggaattcaatcacccgcagatcttcatcgtggaaaatgggtggttcgtctcaggaacgactaaacgcgatgatgcgaagtacatgtattacctcaagaagtttatcatggagactctgaaggcgattaagctggacggggtcgacgtgatcggctacactgcttggtctttgatggatgggttcgagtggcaccgtggatactcgatccggcggggactcttttacgtggacttcttgtcgcaagataagatgctcctgccgaaaagctccgccctgttttaccagaagctcatcgaaaagaacggattcccaccgctgccagaaaatcagccgctggaggggacctttccgtgcgactttgcatggggcgtcgtggacaactacatccaggtggacaccactctctcgcagtttactgacctcaacgtgtacttgtgggacgtgcaccatagcaagcggctgatcaaggtcgacggagtcgtgaccaaaaagagaaagagctactgtgtggattttgcagcaatccagccccagatcgctcttctgcaggagatgcacgtgactcacttcaggttttccctggactgggcactgatcctgcctctgggtaaccagtcccaagtgaaccacactatcctccagtattaccgctgcatggcctctgaactggtgagagtgaacatcacgccggtcgtcgcgctgtggcagccgatggcaccaaaccagggactgcctagattgcttgctaggcagggtgcctgggaaaacccttataccgctttggccttcgcagagtatgcaagactctgcttccaggagctcggacatcacgtcaaactttggatcacgatgaacgagccttacactaggaacatgacctactcagccggacataacctgctgaaggcacatgcactcgcctggcatgtgtataacgaaaagttccgccatgctcagaacggcaagattagcatcgcactgcaggccgactggattgaacctgcctgtcccttctcccagaaggataaagaagtagcggagagagtcttggaatttgatatcggctggttggcggaacctatattcgggtccggagactacccctgggtgatgagagactggttgaaccagcgcaacaatttcctgctgccatacttcaccgaggacgaaaagaaactgatccaggggactttcgacttccttgcactttcacactacactaccatcctggtggattcagaaaaggaggacccaattaagtacaacgattacctggaggtgcaagagatgacggacatcacctggctgaactcaccgtcgcaggttgccgtggtgccgtggggactcaggaaggtgctgaactggctgaagttcaagtacggagatctgccgatgtacatcatcagcaatggaatcgatgatggcctgcatgccgaggatgatcagcttcgggtgtactacatgcaaaactacatcaacgaagcattgaaggcccatatcttggacggaattaacctctgtggatatttcgcctactccttcaatgatcggactgcacccagattcggactttaccgatacgccgctgatcagttcgaaccaaaggcaagcatgaaacattacagaaaaatcattgattcaaacggattcccgggacctgaaaccctggagagattctgtcccgaagagttcactgtgtgcaccgaatgctcatttttccacaccaggaagtcgcttttggccttcatcgcctttcttttctttgcgtccatcatttccctgtctctgatattctactactccaagaagggacgccgctcctacaag

SEQ ID NO: 14965 - DNA, 3036 bp, synthetic construct; identical to SEQ ID NO: 14964
  misc_feature 1..3036: note = source = /note="Description of Artificial Sequence: Synthetic coding sequence"
  source 1..3036: mol_type = other DNA

SEQ ID NO: 14966 - DNA, 3036 bp, synthetic construct
  misc_feature 1..3036: note = source = /note="Description of Artificial Sequence: Synthetic coding sequence"
  source 1..3036: mol_type = other DNA
atgccagctagtgcaccaccaagaagaccaagaccacctccaccttctttgtctttgcttttagtattacttggattaggaggaaggcgattgagagctgaaccaggagatggagcccaaacttgggctagattttcaagaccaccagctccagaagcagcaggtctttttcaaggtacttttccagatgggtttttatgggctgttggttcagcagcatatcaaactgaaggaggatggcaacaacacggaaagggagcatcaatatgggatacatttacacatcatcctttagcacctcctggtgattctagaaatgcatcacttccattaggtgcaccttcaccacttcaaccagctactggagatgtcgcatctgattcatataataatgtttttagagatactgaagctcttcgagaattgggagttactcattatagattctcaatttcatgggcaagagttttacctaatggatcagcaggtgttccaaatagagaaggattaagatattatcgaagattattagaaagattaagagaattaggagttcaaccagttgtcacactttatcattgggaccttcctcaacgattacaagatgcatatggaggatgggcaaatagggcattagctgatcattttagggattatgcagagctttgtttcagacatttcggtggtcaagttaagtattggattacaattgataatccttatgtagttgcatggcatggatatgctacaggaagacttgcaccaggaattcgtggatcaccaagattaggatatttagttgcacataatcttttacttgctcatgcaaaggtatggcatctttataatacaagttttagaccaactcaaggaggacaagtatcaatcgcattatcatcgcattggattaatcctagaagaatgactgaccattctattaaggaatgtcaaaaatcattagattttgttttaggatggtttgccaagcctgtttttattgatggagattatcctgagtcaatgaaaaataatttaagtagcatcttaccagactttactgaatctgaaaaaaaatttataaaaggtacagcagattttttcgctctttgttttggtccaacgttaagttttcaattattagatccacacatgaaatttagacaattagaaagtccaaacttacgtcaattactttcttggattgatcttgaattcaatcatccacaaatcttcatagttgaaaatggatggtttgtatctggaacaactaaaagagatgatgcaaaatatatgtattatttaaaaaagttcattatggagactcttaaggcaattaagcttgatggagttgatgttattggatatacagcatggagtcttatggatggatttgagtggcatagaggatattctataagaagaggtttattttatgttgattttttatcacaagataaaatgcttcttccaaaatcatcagcattattttatcaaaaattaatagaaaagaatggatttccaccacttccagaaaaccaaccattagagggaactttcccatgtgattttgcatggggtgttgttgataactatattcaagtagatactacattatcacaatttacagatcttaatgtttatctttgggatgtccatcattctaaaagacttattaaagttgatggagttgtaactaaaaaaagaaaatcttattgtgtggactttgctgcaatacaaccacaaatagctttacttcaagaaatgcatgttacacattttcgtttttccttagattgggcattaattcttcctttaggaaaccaatcacaagttaatcatactattttgcaatattatcgttgtatggcatcagaattagttagagtaaatattacaccagttgttgctttatggcaaccaatggctccaaatcaaggtttaccaagattattagcacgacaaggtgcatgggaaaacccatatacagctttagcttttgctgaatatgcaagattgtgttttcaagaattaggtcatcatgtaaagctttggattactatgaatgaaccatatactaggaatatgacctatagtgcaggtcataatcttttgaaagcacatgcattggcttggcatgtttataatgagaaattcagacacgcacaaaatggaaaaattagcattgcccttcaagctgattggatagaaccagcatgtccattttcacaaaaagataaggaagttgcagaaagagtattagaatttgatattggatggcttgcagaaccaattttcggatcaggtgattatccatgggtaatgagagattggttaaatcaaagaaataattttttacttccatatttcacagaagatgaaaaaaaattaattcaaggtacatttgattttttagcattaagtcattatactacaattttggtagattctgaaaaagaagatccaataaaatataatgattatcttgaagttcaagaaatgacagatattacttggctcaattctccatcacaagttgctgttgttccttggggtttgagaaaagttttaaattggttaaaatttaaatatggagatttaccaatgtacattatttctaatggaattgatgatggattacatgcagaagatgaccaattgagagtttattatatgcaaaattatattaatgaagcattaaaggctcatattttagatggaattaatctttgtggatattttgcatattcttttaatgatagaacagcaccaagatttggactttatagatatgcagctgaccaatttgaaccaaaggctagtatgaaacactatagaaagattattgattcaaatggatttccaggtcctgaaacacttgaacgattttgtccagaagaatttacagtttgtacagaatgttctttctttcatactagaaaatcattgttagcttttattgcatttttattcttcgcatcaattatttcattatcattaattttttattactcaaagaaaggaagaagatcatacaaa

SEQ ID NO: 14967 - DNA, 3036 bp, synthetic construct; identical to SEQ ID NO: 14966
  misc_feature 1..3036: note = source = /note="Description of Artificial Sequence: Synthetic coding sequence"
  source 1..3036: mol_type = other DNA

SEQ ID NO: 14968 - DNA, 3036 bp, synthetic construct
  misc_feature 1..3036: note = source = /note="Description of Artificial Sequence: Synthetic coding sequence"
  source 1..3036: mol_type = other DNA
atgccagcaagcgcaccccccaggcgtcctcgcccacccccaccctctctttcgcttctcctggtgctgctgggtctgggcggccggcgtctcagagcagaacctggagatggagcacagacctgggcgaggttttcaagacctcctgcgcctgaagcagctggtctttttcagggtacttttccggacggatttctgtgggcggtcgggtccgcggcataccaaactgaaggaggatggcaacaacacgggaaaggcgcctcgatctgggacacctttactcatcatcccctggcaccaccaggagattcccggaatgcctcgctccctctcggagcccctagcccactccagcctgcgactggggatgtggcaagcgattcatacaacaacgtgttccgtgacactgaagcactccgcgaattgggagtgacccattaccgtttcagcattagctgggcccgtgtgcttcccaacggatcggcaggagtgcctaaccgggaaggtctgaggtactacagacggcttctggaacgcctccgggaactcggcgtgcaacctgtggttacgctttaccattgggatctgccacaacgactccaagatgcttatggaggatgggccaatcgcgcacttgcagatcacttccgagattacgcagagctgtgttttcgtcatttcgggggacaggtgaagtactggattaccatcgacaatccatacgtggtggcgtggcacggttacgcaaccggccgccttgcacccggaattcgcggctccccccgcctgggctacctggtggcacacaatttgttgcttgcgcatgcaaaggtgtggcacctttacaataccagctttcgccctacccagggaggacaagtctcaatcgccctgtcgtcacattggattaatccgcgacggatgaccgatcattccattaaggagtgtcaaaagtccctggacttcgtcctcggttggtttgcgaagcctgtctttattgatggtgattacccagagtcgatgaaaaacaacctctctagcattctgcctgacttcaccgaatctgaaaagaagttcataaagggcaccgctgacttttttgcgctctgctttggtccgaccctctcctttcagctcctcgatcctcatatgaagtttagacagctcgagagccctaacctgagacagctgctttcatggattgatctggagtttaaccacccacagattttcattgtggaaaacggatggtttgtctcaggtactaccaagagagatgatgcaaaatacatgtactatctcaagaagttcattatggagactctgaaggcaatcaagctcgacggcgtggacgtgatcggttacactgcctggtcgctcatggacggcttcgaatggcacagagggtacagcattagacgaggactgttttacgttgacttcctctcccaagacaagatgcttctgcctaagtcgtcagcactcttttaccagaagctcatagaaaagaacggctttccacctcttcctgaaaaccaacccttggaagggaccttcccctgtgactttgcctggggcgtggtcgataactacattcaggtcgatactacgctctcacaatttactgatttgaatgtctacctgtgggatgtgcaccactcgaagaggctgatcaaggtggatggggtcgtcactaagaagagaaagtcgtactgtgtggattttgcagcaatccagccacagattgcgctcctgcaagagatgcatgtgacgcattttagatttagccttgattgggcactcatcctccccctcggtaatcaaagccaagtgaaccacacgatcctccagtactacagatgtatggcatcggagcttgtgcgtgtcaacattactccagtggtcgcactttggcaaccaatggcaccaaaccagggccttcctagactgctggcccggcaaggagcctgggaaaacccttacaccgcccttgctttcgcagaatacgcaagactgtgttttcaagaattgggtcatcacgtcaaactgtggatcactatgaatgagccttacactcgcaacatgacctactctgcaggtcataatcttcttaaagcgcacgcacttgcatggcacgtgtacaacgagaaattcagacatgcacagaatggaaagatctcaattgccctgcaggcagactggatcgaacctgcatgcccgttttcgcagaaggacaaggaagtcgcagaacgagtgctggaatttgatataggttggttggccgagccaatctttggatcaggagattacccttgggtgatgagagactggctgaatcaaaggaacaactttcttctcccatacttcaccgaggatgagaagaagctgatccaaggaacctttgactttctcgcacttagccactacactactatcctggtggactctgaaaaggaggatccaattaagtacaatgactacttggaagtgcaagaaatgactgacattacttggctgaactcgccctcccaagtcgccgtggtgccgtggggactgcggaaggtgttgaattggttgaaattcaagtacggcgatctgcctatgtacatcatttccaatggaatagatgacggacttcatgcagaggatgaccaactgcgcgtgtattacatgcagaattacattaacgaagcactcaaagcacatatcttggacgggataaacctctgtggttacttcgcttactccttcaacgatagaactgcccctcgctttggactttatcgatacgcagcagaccaattcgaacctaaggcatcgatgaaacattacagaaaaatcattgacagcaatggattccccggacctgaaaccttggaacgattctgccctgaagaattcaccgtgtgtactgaatgtagcttctttcatactcgcaagtcgctcctggcctttattgcctttctgttttttgcttcaattatctcgctcagcctgattttctactactccaaaaaaggtcgacgctcctacaag

SEQ ID NO: 14969 - DNA, 3036 bp, synthetic construct; identical to SEQ ID NO: 14968
  misc_feature 1..3036: note = source = /note="Description of Artificial Sequence: Synthetic coding sequence"
  source 1..3036: mol_type = other DNA

SEQ ID NO: 14970 - DNA, 3036 bp, synthetic construct
  misc_feature 1..3036: note = source = /note="Description of Artificial Sequence: Synthetic coding sequence"
  source 1..3036: mol_type = other DNA
atgccggcatcagcaccacctagaaggccaagacctccccctcctagcctgtccttgctcttggtcctgttggggctgggaggacggcgcctgcgcgcagaacccggtgatggagcacagacttgggcaagattctcaagaccaccagcgccggaagctgccggactttttcagggtacctttcccgacggctttctctgggcagtgggatccgcagcgtatcagactgaaggtggttggcagcagcacggcaagggagcatctatatgggacacttttacgcaccatcctcttgcccctccaggagatagccggaacgcatccctcccacttggggcaccttcccctctgcaaccagcaaccggcgatgtggcatcggactcatacaataacgtctttcgtgacacggaggccctgcgagaacttggagtgacccattacagattttcaatctcctgggcgcgggtgctcccaaatggctcagcaggcgtgccgaacagagaaggccttcgctactaccgacgactgcttgaacgactgcgggaattgggggttcaacccgtggtgaccctttaccactgggacctgcctcagcgactccaggacgcgtacggaggttgggccaaccgagcgctggccgatcatttccgcgactacgcagaactgtgcttcagacatttcggtggacaagttaagtactggataactatcgacaatccatatgtggtcgcatggcatgggtacgcgactggtcggcttgcgcctggaatacgaggttcgccccgtctcgggtacctggtggcacacaaccttctcctggcacacgcaaaggtctggcatctttacaacacttcgtttcgacctacccaaggtggacaagtctcgattgcgctgagctcgcattggattaatcccagaagaatgacggaccatagcattaaggaatgtcaaaagtccctcgactttgtgctgggatggtttgctaaaccggttttcattgacggtgattacccagaatcgatgaagaacaatcttagcagcatcctgcctgactttaccgagtcagaaaagaagttcataaaagggaccgcagatttctttgcactgtgtttcggtcccacgctttcctttcaactgttggatccacacatgaagtttagacaacttgaaagcccgaatcttcggcagctgttgtcctggatcgatctcgaattcaatcacccgcagatattcatcgtggaaaatggatggttcgtctcaggtacgactaaacgggacgatgcaaaatacatgtactatctcaagaaattcatcatggaaacgctgaaggcaataaagctggatggcgtggacgtgatcggctacaccgcctggtcactgatggatggctttgaatggcacagaggatactcgatacgcagaggactcttttacgtggattttctttcgcaggataagatgctcctccctaagagttcggccctcttttaccagaaacttatcgagaagaatgggtttccgccactgcctgagaaccagcctctcgaggggacctttccttgtgattttgcctggggcgtggttgacaactacatacaggtcgacactaccctgagccaatttaccgaccttaacgtgtacctttgggatgtgcatcattcgaaaagactgattaaagttgatggagtcgtgaccaaaaagagaaagtcctactgtgttgatttcgccgctattcaaccacaaattgcacttctgcaagagatgcacgtgacccatttccgtttctctcttgactgggccctcattctccccctgggcaaccagagccaagtgaatcacactatcctgcagtactacagatgcatggcaagcgagctggttagggtcaacattacccctgtcgtcgccctttggcagcctatggcacccaaccaagggttgcctcgcctgcttgcacggcagggagcctgggagaacccttacaccgcgcttgcattcgccgagtacgcgagactttgcttccaggagttggggcatcatgtgaagctgtggattactatgaatgaaccttacactagaaacatgacctatagcgcaggtcataacctgttgaaggcgcacgcattggcatggcacgtgtataatgagaagttccgccatgctcagaacggaaagatatcaatagcactgcaagctgattggatcgagccagcatgtcccttttcgcagaaagataaggaagtcgcagagagagttctcgagtttgatattgggtggctggcggaaccaattttcgggtccggggattacccttgggtgatgagagattggctgaaccaaagaaacaacttcctgctgccgtactttaccgaagatgaaaagaagctgattcaaggaacctttgattttctcgccttgtctcattacactacgatcctcgtggactccgaaaaggaagatcccatcaagtataatgattacctggaggtgcaagaaatgactgacataacttggctcaactcgccctcccaagtcgcagtggtgccttggggacttcgcaaggtcctcaactggctgaagttcaagtacggtgatctcccgatgtacattatctcgaatggaattgatgatgggctgcacgcagaggatgatcaattgcgagtatactacatgcagaactacattaatgaggcactgaaggcacatatactggacggtattaacctgtgtggatactttgcatactcgtttaatgacagaactgcgccgagattcggtctgtataggtacgcagcagatcaattcgaacctaaggcctccatgaaacattataggaagattattgattctaacggatttccaggacccgagactcttgaaaggttttgcccggaagagttcaccgtgtgtactgaatgctcattctttcacaccaggaagtcacttctggcattcattgcctttcttttctttgcatcaattatctcgctttccctgatcttttactactcaaaaaagggtcggagaagctacaag

SEQ ID NO: 14971 - DNA, 3036 bp, synthetic construct; identical to SEQ ID NO: 14970
  misc_feature 1..3036: note = source = /note="Description of Artificial Sequence: Synthetic coding sequence"
  source 1..3036: mol_type = other DNA

SEQ ID NO: 14972 - DNA, 3036 bp, synthetic construct
  misc_feature 1..3036: note = source = /note="Description of Artificial Sequence: Synthetic coding sequence"
  source 1..3036: mol_type = other DNA
atgcccgcaagcgcgcccccgagacgcccacggccaccgccgccaagcctctccctcctgctcgtgctcttgggtctggggggacggagactgagagctgaacctggagacggagcgcagacttgggcacgcttttcgaggccaccagcgccggaggcggcaggactgtttcagggcaccttcccggacggattcctgtgggccgttggatcggccgcctaccaaactgaaggaggctggcagcagcacggaaagggggcctccatctgggacacttttactcatcatcctctcgcgccaccaggcgactcacggaacgcttccctgccgctcggtgccccgtcccctctgcaaccagcgaccggagacgtcgcctctgactcatacaataacgtgttccgggatactgaggcgttgcgagaactgggagtgacccattaccgcttctcgatctcgtgggcgagggtcctgccaaacggatccgccggcgtcccaaaccgcgagggactccgttactaccgcagactgcttgaacggctcagagaactcggagtgcagccggtcgtgacgttgtatcattgggacctcccgcagcggctccaggacgcctacggtgggtgggctaaccgggcgctggccgatcatttcagggactacgcagaactgtgtttccgccacttcggcgggcaggtgaaatactggatcaccatcgataacccctacgtggtcgcttggcacggttacgcaacgggcagactggccccgggcatcagaggatccccgcgcctgggataccttgtcgcccataacctcctgctggcccacgcgaaggtctggcacctgtacaacactagcttcagaccgacccaaggtggtcaggtgtccatcgcactgtcgtcgcattggattaacccccggaggatgactgaccatagcattaaggagtgtcagaaatcactggatttcgtgttgggctggtttgccaaaccggtgttcatcgacggagattaccccgaatcaatgaagaacaacctctcgtccatcctcccggacttcactgagtccgaaaagaagttcataaaggggaccgcggacttctttgctctctgctttgggccgaccctgtcttttcagctcctggatccgcacatgaaattccggcagctcgagtccccgaacctgaggcagttgctgagttggatcgacctggagttcaatcacccacagattttcatcgtggaaaacggatggttcgtgtcgggcaccactaaaagggacgacgccaagtacatgtattacctgaagaaattcatcatggaaactctgaaggccatcaaactggacggcgtggacgtgattggctacactgcatggtcactgatggacggattcgaatggcaccgggggtactccatccggcgagggctgttctatgtggacttcctttcccaggacaagatgctcctccctaaatcgtcggcgctgttctaccagaagctgatcgaaaagaacgggttccctccattgccggagaaccagcccctggaaggaactttcccatgcgattttgcatggggagtggtggacaactacatacaggtcgacaccaccctctcccaatttaccgatttgaacgtgtacctgtgggatgtgcatcattccaagcgcctcatcaaagtggacggagtcgtgaccaaaaagaggaaatcatactgcgttgacttcgctgccattcagccgcagatcgcactgttgcaagaaatgcacgtgactcatttccggttcagccttgattgggccctcatcctgccgttgggaaaccagtcgcaagtgaaccatactatcctgcagtactacagatgtatggcgtccgagctcgtccgtgtgaatatcaccccggtggtggcattgtggcaacctatggcaccgaaccagggactgcctaggttgctggccagacagggtgcttgggagaatccgtacaccgcattggccttcgccgaatacgcacgcctgtgctttcaggaactgggccaccatgtcaaactgtggattaccatgaacgagccgtacactcgcaatatgacttactcagcaggacacaatctgctgaaagcccatgcactggcatggcacgtctacaatgagaaattcaggcacgctcaaaacgggaagatctccatcgcgttgcaggccgactggatcgaacccgcatgtccgttctcgcagaaagacaaggaggtggcagaacgcgtgctggaattcgacattggctggctggcggaacctatcttcggatctggagattatccctgggtcatgagggattggcttaaccaacgcaataactttctgctgccttactttacggaggacgaaaagaaactcatccagggaaccttcgacttcttggccctgagccactacactaccattctggtggactcggagaaggaggaccctatcaaatacaatgactacctggaagtgcaagagatgactgacatcacttggctgaactctccttcccaggtggccgtggtgccttggggtctgcgcaaagtgttgaattggctcaaattcaaatacggagatctcccgatgtacatcatcagcaatgggatcgacgacggcctccacgcggaagatgatcaactgagagtctattacatgcagaactacatcaacgaagcgctcaaggcccacattctcgacggcatcaatctgtgcggatacttcgcttactcgttcaacgaccggacggcaccaagatttggtttgtacagatacgcggctgaccagttcgaaccaaaggcaagcatgaagcattacaggaagatcatcgactcaaacggattcccaggaccagagacgctcgagcgcttttgtcccgaagaattcaccgtgtgtaccgagtgcagcttcttccacaccagaaagtcgctgctggccttcatagccttcctgttttttgctagcattatctccctgtcgctcatcttttactactcaaaaaagggccggcggtcatacaag

SEQ ID NO: 14973 - DNA, 3036 bp, synthetic construct; identical to SEQ ID NO: 14972
  misc_feature 1..3036: note = source = /note="Description of Artificial Sequence: Synthetic coding sequence"
  source 1..3036: mol_type = other DNA

SEQ ID NO: 14974 - DNA, 3036 bp, synthetic construct
  misc_feature 1..3036: note = source = /note="Description of Artificial Sequence: Synthetic coding sequence"
  source 1..3036: mol_type = other DNA
atgcctgcatccgcacctcctaggcgcccccggccgccgccaccgtccctttccctgcttcttgtgcttcttggtctgggaggacggaggctgcgggcagaacctggagatggagcgcaaacgtgggccagatttagccgccctcctgcccctgaggcagcaggtcttttccaaggaacctttccggatggatttctttgggcggtcggaagcgcagcataccagaccgaaggaggctggcagcagcacggcaagggagcgtccatttgggacacttttactcatcacccacttgcaccccccggagattcccgaaatgcaagccttccgctgggagcaccttcgccacttcaacccgcaactggtgatgttgcatccgattcttacaacaacgtctttcgcgatactgaagctcttcgggaactgggtgttacccactacaggtttagcatctcgtgggcacgtgtgcttccaaacggttcggccggagtgccaaatcgagagggtctgcgatactaccgacgtctgctggaacggctgagagaacttggtgtccagcccgtagtgactttgtaccactgggatctcccgcaaagacttcaagacgcatacggtgggtgggcaaatcgggcactcgcggatcacttcagggattacgcagaactttgttttcgacacttcggaggtcaagtcaaatactggattaccattgataacccgtatgtggtggcttggcatggctacgcaaccggacgcctggcccccggtatccgtggatccccacgacttggttaccttgtcgcacataaccttctgcttgcgcatgcgaaagtgtggcatctgtacaacacttcctttcggcctactcagggaggacaggtttcgattgcgttgtcatcacattggattaaccctagaagaatgaccgatcacagcattaaggaatgtcaaaaaagcctcgactttgttcttggctggttcgcaaagccagtgtttatcgatggagactaccctgagagcatgaagaataacctgtcatccatcctgccggattttactgaatccgagaagaaattcattaagggaacggccgacttttttgcattgtgttttggaccaactcttagttttcaactgctcgacccccacatgaaattcagacagctggagtcccccaacctgagacagctgctttcctggatcgacctcgagtttaatcaccctcagatattcatagtcgaaaatggctggttcgtcagcggaaccactaaaagggatgatgcaaagtatatgtactatcttaagaagttcattatggaaaccctcaaggcaatcaaacttgacggagtggatgttataggctacaccgcttggagcctcatggatggattcgaatggcaccggggatactccatacgccgggggcttttctatgtagactttctgtcacaagacaaaatgctgcttccaaaatcgtcggccctgttttaccaaaagttgatagagaaaaacggattccctccactcccagaaaatcagcctctcgagggaaccttcccttgtgatttcgcatggggtgtggtggacaattacattcaggtcgacaccactctttcgcagttcactgatctcaacgtgtacctttgggatgtccatcattccaagagactcattaaggtggacggagtggtcaccaagaagagaaagtcgtactgtgtcgactttgcagcgattcaaccacaaattgcactgctccaagagatgcacgtgacgcattttcgattcagccttgattgggccctgattttgccgctcggcaaccagtcgcaggtgaatcatactatactgcaatactaccgctgtatggcaagtgaactggtgcgggtgaacatcacccctgtggtggccctgtggcagcctatggcccctaatcaaggactcccgcgtctgctggcacggcaaggtgcatgggagaacccatacaccgcccttgcatttgcagagtacgcccgcctttgctttcaagagctgggacatcacgtgaaactgtggattaccatgaatgaaccatatactcgcaacatgacttactccgcaggacataacctgcttaaggcacacgcgctggcatggcatgtgtacaatgagaagtttagacatgcgcagaacggcaagatttcgatcgcactccaagcggattggattgaacccgcatgccccttcagccaaaaggataaggaggtcgcggagagagtgcttgaatttgatattggatggctggcagagccaatattcggttctggcgactacccttgggtgatgagagactggcttaaccagcgtaacaattttctgttgccctatttcaccgaggatgaaaagaagctgattcaaggtaccttcgattttctggccctctcccattacactaccatccttgtggatagcgaaaaagaagatcctattaagtacaatgattaccttgaagtgcaagaaatgaccgatattacctggcttaactcccctagccaggtggcagtcgtcccttggggtctgcgcaaggtgctgaattggctcaagtttaagtacggggacctcccaatgtacatcatttcaaacggaatagatgacggccttcacgcagaggatgaccagttgagagtctactacatgcagaactatatcaacgaagcacttaaggcgcatatcctggatgggataaacttgtgtggttactttgcatactcatttaacgacaggactgcaccaaggttcggactttacaggtacgctgcagaccagtttgagccgaaagcctcaatgaaacattaccgaaagattatcgactccaacggcttccccggaccagaaactcttgaacgattttgtccagaagaattcacggtgtgcaccgaatgctccttctttcatactcgaaagtcacttctggcattcattgcatttctgtttttcgcatccatcatttcacttagcctgattttctactactcaaagaaaggtcgcagatcctacaag

SEQ ID NO: 14975 - DNA, 3036 bp, synthetic construct; identical to SEQ ID NO: 14974
  misc_feature 1..3036: note = source = /note="Description of Artificial Sequence: Synthetic coding sequence"
  source 1..3036: mol_type = other DNA

SEQ ID NO: 14976 - DNA, 3036 bp, synthetic construct
  misc_feature 1..3036: note = source = /note="Description of Artificial Sequence: Synthetic coding sequence"
  source 1..3036: mol_type = other DNA
atgcctgcttccgccccccctagacggcctcgcccccccccaccgagtttgtctctcctgcttgtgcttttgggactcggaggaaggcggctgagggcagagcccggggatggcgcacagacatgggccagatttagccggccccctgctcccgaagcagcggggctgtttcagggcactttccctgatggctttctctgggccgtgggatctgctgcctatcagaccgaagggggctggcagcaacacgggaagggggccagcatatgggacacattcacccaccatccgctggccccacctggtgacagccgaaacgcaagcctgcctctcggtgccccgagccccctgcaacctgccactggtgacgtggcttccgacagctataacaatgtttttagagacacagaggccctgagagagcttggcgtcactcactaccgattttccatctcatgggcacgggtcctccctaatgggtctgctggagtccccaacagagaaggacttagatattatcgcagactgctcgaacgcctgagagagttgggagttcagccagtcgtgaccctgtatcattgggatttgcctcagaggctgcaggatgcatacggagggtgggcaaaccgggcactcgctgatcacttccgcgattacgcagaactgtgttttagacactttggaggtcaagtaaaatactggataacaatcgacaacccatacgttgttgcctggcacggatacgctactggtcgccttgccccgggaattcgggggtctccccgactgggttacttggtggcacacaacctgctgttggcccatgccaaggtgtggcacctgtataatacctctttcagacccacccagggtggtcaggtctctatcgccctgtcttctcattggatcaaccctaggcgaatgacggaccattctatcaaggagtgccagaagtcacttgacttcgtcctcgggtggttcgccaagcctgtttttatcgacggcgactatcccgaaagcatgaagaataatttgagcagtatcctccccgactttactgagagcgagaaaaaatttatcaaggggacggcagatttctttgccctttgttttggcccaaccttgtccttccagctgctggatccccatatgaagtttagacagcttgagagccccaacctgaggcagctcctgtcatggattgacctggagtttaaccatccccagatctttattgtggagaatggatggttcgtctcaggcaccacaaaacgcgatgatgctaaatatatgtactatttgaagaagttcattatggagaccctgaaggccattaagctggatggcgttgatgtgattggatatacggcctggagcttgatggacggattcgaatggcatcgcggttactcaattcgccggggcctcttttatgtggacttcttgtcacaggataagatgctcctgccaaagtctagtgcactgttctatcagaaactcatcgaaaagaacgggttcccccccctccccgagaaccagcctctggagggaaccttcccttgcgatttcgcttggggcgtggtggacaactacatccaggtggatactacactctctcagtttacagaccttaatgtgtatctgtgggacgtacatcatagcaagaggctcatcaaagtggacggcgttgttactaagaaaagaaaatcatattgtgtggactttgccgcgattcagccacagattgcccttctgcaagagatgcacgttacgcatttcagattctctctcgattgggccctgatccttcctctggggaaccagtcacaggtcaatcacaccatactgcagtattatcgatgcatggcaagcgagttggtccgggtgaatataacacctgtggtggcgctgtggcagcctatggcgccaaaccagggactccccagactgctggctaggcagggtgcgtgggaaaatccttacactgccctggcattcgccgagtacgcacgcctttgttttcaagaactgggacaccacgtaaagctctggatcactatgaacgagccttacacccgcaatatgacctacagtgcaggacataatcttttgaaggctcatgcactcgcctggcatgtgtataacgagaagtttcgacatgcccagaacggcaaaatttccatcgcccttcaggccgactggattgagcctgcatgtcctttttcccaaaaggacaaggaggttgcggaaagggtcctggaattcgatattggatggctcgctgagcctatttttggttctggggactacccctgggtgatgcgcgattggctgaaccagagaaacaacttcttgttgccctattttactgaggacgagaaaaagctgattcaagggacatttgactttctggcactgtcccattatacaaccatcctggtagattccgaaaaagaggacccaattaaatacaacgactatctggaagtacaagagatgactgatataacatggctgaactctccatcccaggtggctgtggtaccatggggattgcggaaggtgctcaactggttgaagttcaaatatggagacctgcctatgtatattatcagtaatggaattgatgacggcctgcacgctgaggacgaccagttgcgagtatactacatgcaaaactatatcaatgaggcactgaaggcccacatactcgatgggataaacctgtgtggttattttgcgtactcctttaacgaccgaacagcccccagatttggactctaccggtacgcagccgatcagtttgagccgaaggcctcaatgaagcactacaggaaaataatcgactccaacgggttccctgggcctgaaacgctcgagcggttctgtccagaggagttcactgtttgcaccgagtgctctttctttcacactagaaagagcctcctggcgtttatcgcttttctgttttttgctagcatcatcagcctgagcttgatcttctactattccaaaaagggaaggcgaagttacaag

SEQ ID NO: 14977 - DNA, 3036 bp, synthetic construct; identical to SEQ ID NO: 14976
  misc_feature 1..3036: note = source = /note="Description of Artificial Sequence: Synthetic coding sequence"
  source 1..3036: mol_type = other DNA

SEQ ID NO: 14978 - DNA, 3036 bp, synthetic construct
  misc_feature 1..3036: note = source = /note="Description of Artificial Sequence: Synthetic coding sequence"
  source 1..3036: mol_type = other DNA
atgccggctagcgcgcctcctcgcagaccacgcccgcctccaccgtcattgtccctgctgcttgttctgctggggctgggagggaggcggctgcgggccgagccgggcgatggtgcccagacatgggcccgcttctcacgaccgccagccccagaggctgcaggcttattccagggaacttttccggatggctttctgtgggctgtaggtagcgccgcctaccagaccgagggtggctggcaacaacatgggaaaggtgctagcatttgggacaccttcactcaccacccactggcgccaccaggagactctcgcaatgcaagtctgccgttgggggcgccatcacctttgcagccagccaccggcgacgtagcctccgacagctacaataatgtatttagagatacagaagccctgcgggagctgggcgtaacacactacaggttttcaattagttgggcacgcgttctgcccaacggaagtgctggtgtaccgaaccgcgagggattacgttactaccgtcgcttgctcgagagattgcgcgagttaggggtgcaacccgtggtgaccttgtatcattgggatctgccacaacgattgcaagacgcatacggcgggtgggcaaacagggcgctggcagatcatttcagagattatgcggaactctgcttcaggcacttcggaggccaggtaaagtactggatcacaatcgacaacccttatgtggtggcatggcatggatacgccactggaaggctggcacctggtataagaggcagtccaagactgggctacctcgtggcccataatctgctgcttgctcacgccaaagtctggcacctgtacaacactagctttcgcccaacccagggagggcaagttagcattgcgttatccagccactggatcaatccaaggagaatgaccgaccatagtataaaagagtgtcagaaaagcctggacttcgttctggggtggttcgccaagcctgtgttcatagacggagattatcctgagtctatgaagaacaatctgtcttccatcttgccggacttcacggaatctgagaaaaaattcatcaagggaactgccgatttttttgctttatgctttggtccaacactttcttttcagcttctcgacccccacatgaagtttagacagttggagagtccaaacctgcgccaacttctcagctggatcgatttagagttcaatcacccccagatcttcatagttgaaaacggttggtttgtaagtggtacaaccaagcgcgacgatgccaagtatatgtattaccttaagaagttcattatggagaccttgaaagctattaagctcgatggggtggacgtcatcggctacacagcatggtcattaatggacggctttgaatggcatcggggatacagtatccgaagggggttattctatgtcgatttcctttctcaggacaaaatgctcttgcccaagtcttctgccctcttctaccagaagctgatagaaaagaacggatttccccctctccctgaaaatcagccattggaagggacgtttccctgcgatttcgcctggggagtggtcgataactacattcaagtcgataccacactgagtcagttcacagacctgaatgtgtatctgtgggacgtacaccattctaagcgactcatcaaagtggacggcgttgtgactaagaaaaggaaatcctactgcgtcgacttcgccgcgatccagcctcagattgctttgctgcaagagatgcatgttacgcacttccgctttagcctagattgggcactgatcctacccctggggaatcagagtcaagtgaatcatacaatattacagtactatcgatgcatggcctccgaactcgtgagagtgaacatcacccctgtcgtagccctgtggcagccaatggcacccaaccaaggcctcccacgcctcctcgcacgacaaggtgcctgggagaatccttacacagcactggccttcgcagaatacgctaggctctgctttcaagaattaggccatcacgtcaagctctggattaccatgaatgagccttataccagaaacatgacctactccgccggacacaatttattgaaggcacacgccttggcatggcatgtgtacaatgaaaagttcagacatgcccagaatgggaagatctctatcgcccttcaggctgattggattgagccagcctgtcctttttcccagaaagataaagaggtggcagaacgcgtactggagttcgatataggctggctggccgaaccgatttttgggtcaggtgactatccatgggtcatgagggattggctgaaccagcggaacaatttcctgctgccttatttcactgaagatgagaaaaagctgatccaaggtactttcgactttctggccttgtctcactacaccacaatcctggtggacagcgagaaggaggaccctatcaaatacaatgattatttggaagttcaagagatgactgacattacctggttgaatagcccgtctcaggtggccgtggtaccgtggggtttgcgcaaggtattaaactggcttaaattcaagtatggagacctcccaatgtacataatttccaacggcatcgatgatggactgcacgccgaggacgatcagctgcgggtgtattatatgcaaaactacatcaacgaagctcttaaggctcacattctggacgggatcaatctgtgtggatacttcgcttatagctttaatgacagaaccgccccacggttcggactctatcggtatgcagctgaccaattcgagccaaaggctagcatgaagcattatcgtaaaatcatcgattcaaatggtttcccaggacccgaaacactggaacggttctgccccgaggaatttacagtctgcaccgagtgtagcttctttcacactagaaagtcgcttctggcgttcattgcgttcctgttcttcgccagtattatttccttatcactcatcttttactactccaagaagggtcgtcgcagttataaa

SEQ ID NO: 14979 - DNA, 3036 bp, synthetic construct; identical to SEQ ID NO: 14978
  misc_feature 1..3036: note = source = /note="Description of Artificial Sequence: Synthetic coding sequence"
  source 1..3036: mol_type = other DNA

SEQ ID NO: 14980 - DNA, 3036 bp, synthetic construct
  misc_feature 1..3036: note = source = /note="Description of Artificial Sequence: Synthetic coding sequence"
  source 1..3036: mol_type = other DNA
atgccagcctcggcgccacctaggcggcctcggccacctccaccttcgctgagccttctgctcgtgctgctggggctcggagggcggagactgcgagctgaacctggagatggtgcccaaacgtgggcacgcttttcccggccacccgcccccgaggccgcagggctttttcagggcacgtttcccgatggttttttgtgggcggtgggttcagcggcctaccaaaccgaaggaggttggcagcaacacggtaagggggcaagcatttgggatactttcacgcatcacccgttggcacctccgggtgactccaggaacgcatcgcttccactgggagcacctagcccccttcagcctgccaccggtgatgtggcctcggatagctataacaatgtgttccgagatactgaggcccttagggaactcggtgtgacccactaccggttttcaatttcgtgggctagggtgctcccaaatggttccgcgggagtgcccaatagagaaggactccggtactaccgcagattgcttgagaggcttagagagctgggagtccaacctgtggtgacgttgtaccattgggaccttcctcaacgcctgcaggatgcatacggtgggtgggcaaaccgcgctcttgcagaccacttccgggattacgccgaactttgcttcaggcatttcggaggtcaggtgaagtactggattactattgacaacccctacgtggtggcctggcatgggtacgcgaccggtcgactcgcccctggaatacgagggagccctcggctggggtacttggtggcccataatcttcttctggcgcatgccaaggtgtggcacctctacaacactagctttaggccaacccagggaggacaggtttccatcgcactttcgtctcattggattaatcctcgccgtatgactgatcactcaattaaggaatgccagaagagcttggactttgttctgggctggttcgctaagcctgtgtttattgacggagattaccctgagtctatgaaaaacaacctgtcgtcaatactcccagactttactgagtcggaaaagaaattcataaagggaacggctgacttttttgcactttgtttcggccccaccctgtcgtttcagttgcttgatcctcacatgaagtttcggcaactcgaatccccaaacctccgccaactgctttcctggatcgatctggaattcaaccatccacagatattcatcgtggaaaatgggtggtttgtgagtggcactactaagcgtgacgacgcaaagtacatgtattacttgaaaaagttcataatggaaactcttaaggcaattaagctcgacggagtcgacgtgatcggatacacggcttggtcccttatggacggttttgagtggcatcgaggttacagcatcagacggggccttttctatgtggattttctttcccaggataagatgctgttgcccaagagctccgcactgttctaccaaaagctgattgagaagaatggatttccacccttgcccgagaatcagcctctcgaaggaaccttcccttgcgactttgcgtggggcgtcgtggataactacattcaagtggataccactttgtcccaatttaccgaccttaacgtctacctttgggacgttcatcattccaaacggttgatcaaagtcgacggagtggtgactaagaaacgaaagtcgtactgcgtggattttgcagcaatccaaccacaaattgcgcttctccaagagatgcacgtgactcatttccggttttctctggattgggcacttatcttgcctctgggcaaccaaagccaagtcaatcatacgatccttcaatactaccgctgcatggcttccgaactggtgcgtgtgaacataaccccagtcgtggctctgtggcagccaatggcacccaatcagggacttccacggcttttggccaggcaaggagcttgggagaatccatacaccgcactcgcctttgccgaatacgcaagactctgttttcaagagctgggccatcatgtgaagctgtggatcactatgaatgagccatacactcgtaatatgacctactcggctggccataacctcctgaaggcacatgcattggcgtggcacgtttacaatgagaaatttcgccacgcccaaaatgggaaaatctcaattgcacttcaggctgattggattgaacctgcatgtccgttctcacaaaaagacaaggaggtggcagaacgcgtccttgagtttgacatcggctggctggcggaacccatttttggttcgggcgattacccttgggtcatgcgagactggcttaatcaacgcaataactttctcctgccatacttcactgaggatgagaagaagttgattcagggtaccttcgatttcctcgcactttcgcactacactactattctggtggactcagaaaaagaggaccccatcaaatacaacgattacctcgaagtccaggaaatgactgatatcacttggctgaattccccaagccaagtggcagtcgtgccttggggtttgcgtaaagtgttgaactggctgaagtttaagtatggagatctgccaatgtacattatctcaaacggaatagatgatggacttcacgcagaggacgatcagctgcgggtgtactacatgcagaattacatcaatgaagcccttaaagcacatatcctggacggaattaacctgtgtggatactttgcatattcgttcaacgatcgtaccgcgcccaggttcgggctttatagatacgcagcagatcaatttgaaccgaaggcatcaatgaaacactacaggaagattattgattcaaacggatttccaggacccgagactctggaacgattttgccctgaagagtttaccgtctgcaccgaatgctcctttttccataccagaaagagccttctggcctttatcgcatttctcttctttgcctcgatcatttcactttcgcttatcttttactatagcaagaaaggcagacgttcgtacaag

SEQ ID NO: 14981 - DNA, 3036 bp, synthetic construct; identical to SEQ ID NO: 14980
  misc_feature 1..3036: note = source = /note="Description of Artificial Sequence: Synthetic coding sequence"
  source 1..3036: mol_type = other DNA

SEQ ID NO: 14982 - DNA, 3036 bp, synthetic construct
  misc_feature 1..3036: note = source = /note="Description of Artificial Sequence: Synthetic coding sequence"
  source 1..3036: mol_type = other DNA
atgcctgcatccgcaccaccaagacggccccgcccaccacctccttccttgagcctgctcctggtgcttctcggcctgggtggtcggcgactgagagccgaaccaggtgacggtgcacaaacctgggcgaggttttctaggcctccagcccctgaagcagcaggactcttccaaggcaccttcccagacggatttctgtgggcagtcggatcagcagcctaccaaaccgagggaggatggcagcaacacggtaagggcgcatcaatttgggacacctttacccaccacccactggcccctccaggtgattcccggaatgcatcgctcccactcggcgcaccttcgcctctgcagccggcaacgggagatgtggcatctgatagttacaataacgtgtttagagatactgaagctctgcgggaactcggtgtgacccattacaggttctctattagctgggcaagagtgctgccaaatggatccgcaggagtccccaacagggaaggtctgcgctactatcgccgcctgctggagagattgcgcgaacttggcgttcagcctgtcgtgactttgtaccattgggaccttccacagagactccaggatgcctacggcggatgggcaaacagagcactggcagatcatttcagggactacgcagaactctgttttagacatttcggcggacaagtgaagtattggatcactattgacaacccttacgtggtggcttggcatggatacgcaacgggacggctggcgcccggaatcagaggttcgcctaggcttggataccttgtggcacataacttgctgctggcccacgccaaagtgtggcatctgtacaatacttcatttcgtccgacccaaggtggacaagtgtcgatcgctctctcctcacattggattaacccacggaggatgactgaccactcaatcaaggagtgtcagaaatcgctggattttgtgcttggttggtttgcaaagcctgtgttcatcgacggggactaccccgagtcgatgaagaacaacctgtcgtcaatccttcctgatttcaccgaaagcgaaaagaaattcatcaagggaactgcagacttcttcgcgttgtgtttcggccctaccctttcattccagcttcttgaccctcacatgaagtttcggcaactggaatcccccaacctgaggcagcttctgtcgtggattgacctcgaattcaatcacccacaaatctttattgtggagaatggatggttcgtctctggaaccactaagcgcgatgacgcaaaatacatgtactacctgaagaagttcatcatggaaactttgaaggccattaaacttgatggagtggatgtgattggctacaccgcatggtcactgatggatggatttgaatggcacagaggctactcgattaggcgcggccttttctatgtggattttctctcccaagataagatgctcctgccgaagtcgtcggcactcttctaccaaaagctcatcgaaaagaacgggttccctccacttcctgaaaaccagcctctggagggaacttttccttgtgatttcgcctggggagtcgtggataactatattcaggtggatacgaccctctcccagtttacggatttgaacgtgtacctttgggatgtccatcacagcaagagacttatcaaggtcgacggagtggtgaccaagaaaagaaagtcgtattgcgtggactttgcagcaattcaacctcaaatagcacttctgcaagaaatgcacgtgacccactttaggttttcgctggattgggcgctgatcctgcctttgggtaaccaatctcaggttaatcacacgattctgcaatactaccgttgtatggcatcagaactcgtcagggtcaacatcactcctgtggtggccctttggcaacctatggctccaaaccagggtttgccgcggctcctcgcccgccagggtgcctgggaaaacccatacactgcactcgcgtttgcagagtacgcacgtctgtgttttcaagaactgggacatcatgtgaaactttggataactatgaacgagccctacacgcgcaacatgacctattcggcgggacataacctgctgaaggcacatgctctggcctggcatgtctacaatgagaaattcagacatgcacagaacggaaagatcagcatcgcactgcaggccgactggattgagccggcctgccctttttcgcagaaggataaagaagtcgcagagagagtcttggagtttgatataggttggctggcagaacccatatttggctcgggcgactacccttgggtgatgcgagattggctgaatcagcgcaacaactttcttctcccttactttaccgaggatgaaaagaaacttattcagggcacttttgacttccttgcgctttcccactacaccactatactggtggattccgaaaaagaagatccgataaagtacaatgattacttggaagtgcaggagatgacggatatcacttggctgaactctccttcacaggtggctgtcgtgccttggggactccgcaaggtcctgaattggctcaaattcaagtacggagatcttccgatgtacattatcagcaatggaatcgacgacggacttcatgcagaagatgatcagttgagagtgtactacatgcaaaactacataaatgaagccctcaaggcgcacatactggatggaattaacctttgcgggtactttgcatactcatttaacgacagaactgcaccaagatttgggctctacaggtatgcggccgatcaattcgaacccaaagcaagcatgaagcactaccggaagataattgactcgaacggcttcccggggcctgagactctcgagcgattctgtccagaagagtttacggtgtgtactgagtgcagcttttttcacaccagaaaatctctgctggcatttatcgctttcctcttcttcgcctcgattatctcacttagccttatcttttactacagcaagaagggtcggcgctcatacaag

SEQ ID NO: 14983 - DNA, 3036 bp, synthetic construct; identical to SEQ ID NO: 14982
  misc_feature 1..3036: note = source = /note="Description of Artificial Sequence: Synthetic coding sequence"
  source 1..3036: mol_type = other DNA

SEQ ID NO: 14984 - DNA, 3036 bp, synthetic construct
  misc_feature 1..3036: note = source = /note="Description of Artificial Sequence: Synthetic coding sequence"
  source 1..3036: mol_type = other DNA
atgcccgcatctgccccccccagacgcccccgtccccctcccccatcgctgagtctcctacttgtcttattgggcctggggggtcgtcgcctgcgagctgagccaggagacggagcccagacttgggccagattcagtcgaccccctgcgccagaggctgccggcctcttccaggggacctttcccgacggcttcctttgggccgtaggttcagcagcataccagacagagggcggatggcaacagcatgggaagggagcctctatttgggatacattcacacaccaccctttggccccccctggcgacagtcgaaatgcatcactgccattaggggccccttctcccctacagcctgctacgggcgacgttgcatccgattcctacaacaacgtgtttcgagataccgaggcgctcagagagctgggggttacacattatcgcttttccatctcgtgggctcgcgtgctgcccaacggctcagccggagtgcccaatcgcgaggggttgaggtactaccggaggctgctcgagcggctgcgcgagctcggagttcagccagtggtgacactctaccactgggacctgccgcagcgtctgcaggacgcatacggagggtgggccaaccgggcactagcggatcatttccgagactatgcagaactgtgttttaggcactttggagggcaagtgaagtactggattaccatcgataatccgtatgtagtggcatggcatggctatgctactggtagactggccccagggatcagggggtctcctaggctaggttatttggtcgcacacaacttgctgttagcccacgctaaggtgtggcacttatataatacctcattccggcccacgcagggcgggcaggtgagcatcgccctttcttctcactggattaacccacgccgaatgaccgatcatagcattaaagagtgccagaagtcactggactttgtgctgggatggtttgcaaaacccgtatttatagacggtgactatcctgaatctatgaagaacaatttgtcatctatattacctgactttactgagagcgagaaaaagttcatcaaaggaactgcagacttcttcgctctgtgttttggccccacacttagttttcagctgcttgatccacacatgaagttccgccagctggaatcccctaacctgcgacagctgctcagctggatcgacctggagtttaatcatccacagatctttatcgttgagaatgggtggtttgtgtcaggtacaacgaaacgcgatgacgcgaagtatatgtattacctgaaaaaatttattatggagacgctcaaggcaataaaactggacggcgttgatgtgatcggctacacagcctggtcgttaatggacggcttcgaatggcacaggggctattccataaggcggggactgttttacgtggatttcctttcacaggataagatgctgctgcctaagagctccgctctgttctaccagaaactcattgaaaagaatggcttcccacctctgccagagaatcagcccctggaggggaccttcccatgcgactttgcctggggcgtggtggataactacattcaggtcgacactactttgagccagttcaccgatctgaatgtgtacctctgggacgtccaccacagcaagcggttaatcaaggtggacggtgtggttacaaagaagcggaaaagctactgtgtggactttgcagccattcagccccaaatcgccctccttcaggagatgcacgttacacacttccggtttagtctggattgggcgcttatcttgcccctagggaatcagtcgcaagtgaaccatacgatccttcaatactatagatgcatggcctctgagctcgttcgagtgaacatcacgccagtcgtggcactttggcagccaatggcccccaatcaagggctcccaaggctgctcgctagacagggggcttgggaaaatccttatacagctctagcattcgcggaatatgcaaggctgtgcttccaagagctcggccaccatgtcaaactgtggattaccatgaatgaaccttacacacgaaacatgacatacagcgccggtcacaatttgcttaaagcgcacgccctggcctggcacgtctacaatgaaaaattccgccatgcacaaaacggcaagataagcatagctctgcaggcagattggatcgagccggcttgcccgtttagccagaaggacaaagaagtagcagaacgggtgcttgagttcgacataggctggctggccgaacccatttttgggtccggcgattatccatgggtgatgagggattggctgaaccaacggaataattttctgttaccgtatttcaccgaagacgagaagaaactgatacaagggacatttgactttctggccctctctcactacaccaccattctggtggattccgagaaggaagatccaattaagtacaacgattatcttgaagtccaggagatgacagacatcacttggttaaactccccatcacaggtggctgtggtcccctggggacttcgcaaagtactgaactggcttaaatttaagtacggagatctccccatgtacatcataagtaacggaattgacgacgggctgcacgctgaagatgaccagttaagagtgtactatatgcagaactacataaatgaggctcttaaggcccacatcttagatggaattaatctgtgcggctacttcgcttattcctttaatgacaggactgcacctaggtttggtctgtataggtatgccgccgatcagtttgaacccaaagcttccatgaagcattatagaaaaatcattgatagtaacgggttcccaggccccgagacactggaacggttctgcccagaggagttcaccgtgtgcacggagtgcagctttttccacacaaggaaatcattgttggcattcatcgccttcctattcttcgcctctatcatcagcctgagtcttatcttctactacagcaagaagggaaggcgatcgtacaaa

SEQ ID NO: 14985 - DNA, 3036 bp, synthetic construct; identical to SEQ ID NO: 14984
  misc_feature 1..3036: note = source = /note="Description of Artificial Sequence: Synthetic coding sequence"
  source 1..3036: mol_type = other DNA

SEQ ID NO: 14986 - DNA, 3036 bp, synthetic construct
  misc_feature 1..3036: note = source = /note="Description of Artificial Sequence: Synthetic coding sequence"
  source 1..3036: mol_type = other DNA
atgcctgcaagcgcgccacctcgccgcccgcggcctccaccacctagcctgtccctgctgctcgtgctcctcgggctggggggacgcagactgagggcggaacctggggatggtgcgcagacttgggcacgcttttctcggccgccggctcctgaggccgcagggctgttccagggtaccttcccggacggattcctgtgggccgtgggatcagccgcgtaccagactgaaggaggctggcagcagcacggcaagggcgcctcgatttgggacacttttactcaccacccactggccccaccaggagatagccggaatgccagcctgccactgggagccccaagcccgctccagccggccaccggcgacgtggcaagcgactcctacaataacgtgttccgcgatacggaagccttgcgcgagctcggagtcacgcattacagattctccataagctgggccagggtgctcccaaatggatccgctggcgtgcccaaccgcgagggcctccgctactaccggagactcctggagcgcctccgggaactgggagtccagccagtcgtgaccctttaccactgggacctgccgcagagactgcaagacgcctatggaggatgggcaaatagagcgctggcggatcatttcagagactacgctgagctgtgcttcagacacttcggaggacaggtgaagtactggatcaccatcgataatccgtacgtggtcgcgtggcacggatacgctaccggacgcctcgcaccgggcatccggggatcgccgaggctgggttacctggtggctcacaatctgctgctcgcccatgccaaggtgtggcatctttacaatacttcgtttaggccgactcaaggcggacaagtctccatcgctctcagctcacactggatcaacccacgccgtatgaccgatcattcgatcaaggaatgccaaaaatcgctggattttgtgcttggttggtttgccaagccagtgtttatcgacggcgattacccggaatccatgaagaacaatctctcatccatcttgccggattttactgagtcagaaaagaaattcatcaaaggaaccgccgactttttcgcgctgtgcttcggacctaccctgtcattccaactgctggatccacacatgaagttccgccagctggaatcgcctaatctcagacaacttctgtcttggatcgatctggaattcaaccatcctcaaatcttcatcgtcgagaatgggtggttcgtgagcggaactactaaacgtgatgatgcgaagtatatgtattacctgaagaagttcatcatggaaacccttaaggccatcaagctcgacggagtggatgtgatcggttacactgcttggtccttgatggacgggttcgaatggcacaggggatactcaattcgccggggactcttctacgtggatttcctttcgcaggataagatgctcttgccgaaaagctctgctctgttttaccaaaagctgatcgaaaagaatggattcccgcctctgcctgagaaccaaccactcgaaggcaccttcccgtgtgacttcgcgtggggagtggtggacaactacattcaggtcgacacgaccctcagccaatttactgaccttaacgtctacctgtgggacgtgcaccactccaagagactgatcaaagtggacggagtcgtcaccaaaaagaggaagtcctactgtgtggacttcgccgcgattcaaccgcagatcgccctgcttcaggaaatgcatgtgacccacttccggttctcccttgattgggcactcatcctcccactgggaaaccagtcgcaagtcaaccacactatcctgcagtactaccgctgcatggcatcagaactcgtccgcgtcaacatcactccggtggtggcgttgtggcagccgatggctcctaatcagggactcccaagactcctcgctcggcagggtgcctgggaaaatccgtacacggcgctcgcgttcgcggaatacgcgagactgtgcttccaggagctgggacaccacgtgaagctctggatcacgatgaatgagccctacacccgtaacatgacttacagcgccggccataacctgctgaaggcccacgccctggcctggcacgtgtacaatgaaaagttccgccacgcgcagaatggcaagatctcaatcgccttgcaggcggattggattgagcccgcctgcccgttttcccagaaggataaggaggtcgctgaacgggtgttggagttcgatatcggatggctggccgaaccaatcttcgggtcaggagactacccgtgggtgatgagagactggctcaaccagcgcaacaacttcctgctgccatacttcactgaagatgaaaagaagctcatccagggcacgttcgacttcttggcactgtcgcactacactactatcctggtggactccgagaaggaggaccccatcaaatacaacgactacctcgaagtgcaggaaatgactgacatcacttggctgaactccccgtcgcaggtggccgtagtgccatggggacttcggaaagtcctgaactggctcaagttcaagtacggcgatctgcctatgtacattatctcgaacggaatcgacgacggactccacgctgaggacgaccaactgcgggtgtactacatgcaaaactacataaacgaggcgttgaaggcccacatcttggacggtatcaatctttgcggctacttcgcttactcgttcaacgatcggactgcaccgagatttggcttgtaccggtatgccgccgatcagttcgagccaaaggctagcatgaagcactacagaaaaatcatcgactcgaacggatttcccggaccggaaaccttggagcgcttctgcccggaagaatttaccgtctgcactgaatgctcatttttccacactcgcaagtcactgctggctttcatcgccttcctcttcttcgcatccatcatctccctctcgctgatcttttactactcgaagaaggggcgccgcagctacaag

SEQ ID NO: 14987 - DNA, 3036 bp, synthetic construct; identical to SEQ ID NO: 14986
  misc_feature 1..3036: note = source = /note="Description of Artificial Sequence: Synthetic coding sequence"
  source 1..3036: mol_type = other DNA

SEQ ID NO: 14988 - DNA, 3036 bp, synthetic construct
  misc_feature 1..3036: note = source = /note="Description of Artificial Sequence: Synthetic coding sequence"
  source 1..3036: mol_type = other DNA
atgccagcctcggcaccgccacggcggccaagacctccaccaccaagcctgtcgcttctgttggtgctccttgggctcggcggaaggagacttcgggccgagccgggcgatggagctcaaacctgggctcggttctcacgtccccctgccccagaggccgccggtctttttcagggtaccttcccggacggttttctttgggcagtgggctcggcagcgtatcagacggaggggggctggcaacaacacggtaagggcgcctcaatctgggataccttcacccaccatccactggcaccaccaggagactccagaaacgcatcgcttccacttggagctccttcacccttgcaaccagcaactggggatgtcgccagcgactcgtacaacaatgtgtttcgcgataccgaagcactgcgcgagctcggagttactcattacaggttttcgatttcctgggcacgcgttctgccaaatgggtccgcgggagtccccaaccgagaagggcttcggtactacaggagactgcttgagaggctgcgagaactgggtgtgcagcctgtggtcaccctgtaccactgggacctgcctcagcgcctccaagatgcgtacggaggatgggctaatagagcacttgcagatcatttccgggattacgcggaactgtgcttcaggcatttcggaggacaagtgaagtactggatcactatcgacaacccttacgtggtggcatggcatggatacgcaaccggtaggctggcaccaggtattagaggaagcccgaggctcggatacctcgtcgcgcacaaccttttgctcgcacatgcaaaagtgtggcacctgtacaatacctcgtttaggccaacccaaggaggacaagtctcaattgctctgtcgtctcactggattaacccacggcgcatgactgatcattcgatcaaggaatgtcaaaagtcactcgactttgtgctcgggtggtttgctaagccagtgtttattgatggagattaccctgaatcgatgaagaataacttgtcctcgattctgcctgattttaccgaatcggagaagaaattcattaaaggcacggccgacttttttgcattgtgtttcggccccactctttcgtttcagcttcttgaccctcacatgaaattcagacagcttgagtctccaaaccttcgccagcttctgtcctggatcgacctggagtttaaccatcctcagatcttcatcgtggaaaacggctggttcgtctccgggaccaccaagagagatgatgcaaagtacatgtattacttgaagaagtttatcatggagactctcaaagccattaagctcgacggtgtcgatgtgattgggtatactgcatggtcgctgatggatggttttgagtggcatcggggctactcgatccgccgcggcctcttttacgttgattttctctcgcaagacaaaatgctgctgcccaagtctagcgctcttttctaccagaaacttatcgaaaagaacggatttccccctctccctgagaaccaaccacttgaagggacctttccttgtgattttgcatggggagtggtcgataactacattcaagtggataccaccctgtcgcaattcaccgatctcaatgtgtacctgtgggacgtgcatcatagcaagcggctcattaaagtggacggtgtggtgaccaaaaagagaaagtcatactgtgtggactttgctgcaatccaaccgcaaatcgcacttcttcaggagatgcatgtcactcactttaggttttcgcttgattgggctctgatccttcccctgggcaatcagtcccaagtgaatcatactatactccaatactaccgttgcatggcatccgaacttgtccgagtgaacattacccctgtcgtggccctttggcagccgatggcgcctaatcaaggactgccgcgcctgttggcacgacagggtgcctgggaaaatccctacaccgcacttgcatttgcagaatacgcccgcctctgctttcaggagcttggccatcatgtcaaactgtggattactatgaatgaaccatacacccgaaacatgacgtacagcgctggtcacaacctcctcaaggcgcacgccctggcctggcatgtctacaacgaaaagttccggcatgctcagaacggaaagataagtattgcactgcaagctgattggattgagcccgcatgtccctttagccagaaggataaggaagtggctgaacgcgtgctggagttcgacataggatggctggcggagcctatctttggatcaggagactatccttgggtgatgcgagattggctgaaccagcggaacaacttccttctgccctactttaccgaagatgaaaagaagctcattcaaggaacgtttgattttcttgcactgagccattacacgactattctggtggattcggagaaagaagatccgattaagtacaacgattacctggaagttcaagagatgaccgatattacctggcttaattcgccttcgcaagtcgcagtggtcccatggggattgcgaaaggtgctgaactggcttaagttcaaatacggcgaccttccaatgtacatcatttccaatggaattgatgacggacttcatgcggaggatgaccagctgcgcgtgtattacatgcagaattacatcaatgaggcactgaaagcccacattctggacggtattaacctttgcggctacttcgcatactcctttaatgatagaaccgccccccgttttggcctgtaccggtacgctgctgatcaattcgaaccaaaggccagcatgaagcactaccgtaaaatcatcgattccaatggatttcctggaccagaaacccttgaacgtttctgccccgaagaatttaccgtctgtaccgaatgtagcttttttcataccagaaagtcccttcttgcgttcattgcatttctcttttttgccagcatcatcagcctttccctcattttctactattcgaagaagggtcggcgatcgtacaag

SEQ ID NO: 14989 - DNA, 3036 bp, synthetic construct; identical to SEQ ID NO: 14988
  misc_feature 1..3036: note = source = /note="Description of Artificial Sequence: Synthetic coding sequence"
  source 1..3036: mol_type = other DNA

SEQ ID NO: 14990 - DNA, 3036 bp, synthetic construct
  misc_feature 1..3036: note = source = /note="Description of Artificial Sequence: Synthetic coding sequence"
  source 1..3036: mol_type = other DNA
atgcccgcgtcggcaccgccacggcggcctcgtccacctcccccctcactctccctgctgctcgtgttgctgggactcggaggccggcggctgagggctgagccaggcgacggcgcacagacctgggcaagattctcccggcctcctgcgccagaagcggctgggctctttcagggtaccttcccggatggattcctctgggccgtgggcagcgcagcataccagactgagggaggatggcagcaacacggcaaaggcgcctcgatctgggacaccttcacccatcatccgttggcgccgcccggagattcccggaatgcgtctcttccgttgggggccccgtcgccgctgcagccagccactggagatgtggcctccgactcctacaataacgtcttcagagacacggaggccctgagggaattgggagtcacccattaccgcttttctatcagctgggcacgagtgctgcctaacggatcagcgggagtcccgaacagagaagggctcagatactaccgcagactcctggaacgactgcgagaactgggtgttcaaccggtggtcacgttgtaccactgggacttgccgcagcgacttcaggacgcatacggaggctgggcgaaccgcgccctcgcagatcacttcagggactatgctgaactgtgctttagacactttggtggacaggtgaaatactggattactatcgacaacccttacgtggtggcgtggcacggctacgcgactggcagactggcacccggcatccggggatccccaaggctgggatatctggtggcccataatctgctcctggcccatgcgaaggtttggcacctttacaacacctcgtttcgcccaacgcaaggaggacaagtctcgattgccctcagctcccactggattaacccccgccgtatgactgatcacagcattaaggaatgccaaaagtcccttgatttcgtgctcggttggttcgccaagcccgtctttatcgacggcgactaccctgaatcgatgaagaacaatctcagcagcatccttccggactttaccgagtccgaaaagaagtttatcaagggcaccgccgacttctttgcgctttgcttcgggcccactctgagcttccaactcctggaccctcacatgaagttcagacaacttgagtcgcctaatctgcggcaactcctcagctggatcgacctggaattcaatcatccacaaattttcattgtggaaaacggttggttcgtctcagggaccactaagcgggatgacgctaaatacatgtactatctgaagaagttcatcatggaaacgttgaaagccatcaagctggatggtgtggatgttatcggatacaccgcctggagcctcatggacggtttcgaatggcatcggggatactccatccggcggggattgttctacgtggatttcctttcccaagataagatgctgcttcctaaatccagcgccctgttctaccagaaactgatcgaaaagaacggatttcctccactcccggaaaaccagccgcttgagggaaccttcccgtgcgacttcgcatggggcgtggtcgacaactacatccaggtggataccactctgtcccagtttactgatctcaacgtttacttgtgggacgtgcaccactccaagcgcctgatcaaagtggacggagtcgtcaccaagaaacggaagagctactgcgtggacttcgccgctatacagccgcagatcgcactgttgcaggagatgcacgtgactcacttcagattctccctggattgggccctgatcttgccactcggtaatcagtcccaagttaaccatactatcctgcagtactaccgttgtatggcctcggagttggtgagggtcaacatcaccccagtggtggccctgtggcaaccgatggctccaaatcaaggcctcccccgccttctcgcgagacaaggtgcctgggaaaatccgtacaccgccctggcgttcgccgagtacgcccgtctgtgcttccaggagctggggcaccacgtcaaactgtggataactatgaatgagccgtacactcggaacatgacgtactctgcgggccataacctgctgaaggcccacgctctggcttggcatgtgtataacgaaaagttccggcacgcccagaacggtaagatctcaatcgccctgcaggcggactggatcgaaccagcctgtccgttctcccaaaaggataaagaggtggccgaacgcgtgctggaatttgatatcgggtggctggccgagccgatcttcggtagcggagattacccgtgggtgatgcgggactggctcaatcaacgcaacaactttctcctgccgtacttcaccgaggacgaaaagaaacttatccagggaacttttgacttcctggccctgtcgcactacactactatactggtcgattcggaaaaagaagatccgatcaagtataacgactacctggaagttcaggagatgaccgacatcacttggctgaactccccttcacaggtggcagtcgtgccttggggtctgcgcaaggtgcttaattggctcaagttcaaatacggagatctgcccatgtacatcatctcgaatggaatcgacgacggcctgcacgcagaggatgatcagctccgcgtgtactacatgcagaattacattaatgaggcactgaaggcgcatatcctggacggtataaacctctgtggttactttgcgtactcatttaacgatcgcaccgcccctcgattcggactctaccggtacgctgctgaccagttcgagccgaaagcgagcatgaagcactaccgcaagatcatcgacagtaatggcttcccgggaccggaaacgctggaacgcttctgcccggaggagttcaccgtttgtaccgaatgttcgttcttccatactcggaagtcgctcctggcctttatcgcgttcctcttcttcgcctcgattatttcgctgtccctgatcttttactattcgaagaaaggtcggaggagctataag

SEQ ID NO: 14991 - DNA, 3036 bp, synthetic construct; identical to SEQ ID NO: 14990
  misc_feature 1..3036: note = source = /note="Description of Artificial Sequence: Synthetic coding sequence"
  source 1..3036: mol_type = other DNA

SEQ ID NO: 14992 - DNA, 3036 bp, synthetic construct
  misc_feature 1..3036: note = source = /note="Description of Artificial Sequence: Synthetic coding sequence"
  source 1..3036: mol_type = other DNA
atgccagcttccgccccgcccagacgacctcgaccccctcccccatctttatcactgctcctggtgctgctcgggctgggaggtcgacgattacgggccgagcctggagatggagcccagacatgggcaaggttctcacgaccccctgccccggaagcagcaggccttttccaaggaacatttccagacgggttcttgtgggccgtggggtcggctgcctaccagacagagggaggctggcagcagcatggtaaaggcgcgagtatttgggacactttcacccatcatcctctggctccgcctggcgacagcaggaacgcgtccctacccctgggcgccccatctccccttcaacccgccacgggtgatgtggcgagtgactcttataataacgttttccgtgatacagaagccctgagggaactcggcgtgacacattacaggttttcgatcagctgggcacgagtactccctaacggtagcgccggcgttccaaacagagagggtcttcgatactatagaaggctgttggaacggttgcgggagctcggagtccagcctgtcgtaaccctgtatcattgggatctgccccagcggctccaggatgcgtatgggggttgggctaatagggcgctggccgaccattttcgggattacgcagagctgtgcttccgacactttggcggacaggttaagtattggatcaccatcgataacccatatgttgttgcctggcatgggtacgccaccggaagactcgcacctgggattcgaggatccccaagactggggtatttggttgcccacaatctgctccttgcacacgctaaggtgtggcatctctataatacatccttcagacctacacagggtggtcaggtgagcattgccctgtcctcacactggatcaatcctaggcgaatgaccgaccacagcatcaaggaatgtcagaagtcactggattttgtgctgggttggtttgctaaaccggtgttcattgacggagattatcctgaatccatgaagaataatttgtctagcatcctgcctgattttacagaatcggaaaagaaattcatcaagggaaccgccgactttttcgccttgtgcttcgggcctacgctcagttttcagttattggacccgcacatgaagttcagacagctggaaagtcccaacttgcgacagcttctgtcctggatcgacctggagtttaaccacccgcaaatctttatagtggaaaatggctggttcgtgagcgggactacaaaacgcgatgatgctaaatatatgtattacctaaagaaatttattatggaaacactcaaagccattaaacttgacggagtggatgtgatcggctatacagcatggtcactgatggacgggtttgaatggcataggggatacagcatacgaaggggccttttctacgtcgactttctttcgcaggacaagatgctactccctaagagctcagccctgttttaccagaaattaatcgaaaaaaacggattcccacctctgcccgagaatcagcccttagaaggtacgtttccctgcgacttcgcctggggagtcgtagacaattacatccaggtggacacgacactcagtcagttcaccgatctgaatgtgtatctttgggacgtccaccattctaagaggctgataaaagtggacggagtcgtcaccaaaaaacgaaaatcctattgcgtcgactttgcagccattcagcctcagattgccctcctgcaggagatgcacgtgacacacttcaggtttagcctcgactgggccctcatcctgccactggggaaccaatcccaggtgaatcacaccatcttacagtattaccggtgcatggcttcagaactggtgagagtcaatattacccctgtcgtggctctttggcagcccatggccccaaaccagggcctgccaagactgctggcccgacagggagcgtgggaaaacccttacaccgcactagctttcgctgaatacgccaggctttgtttccaagaactggggcatcatgtgaaactctggataacaatgaatgaaccctataccagaaatatgacttactctgccggccataacctccttaaagctcacgccttagcctggcacgtttataatgaaaaatttcgacacgcccagaacggaaagatcagcattgcactgcaggcagattggatcgagccggcctgtcccttctcacaaaaggacaaggaagtggctgagcgcgtgcttgagtttgatatcggctggctggcagaacccatctttggatcaggtgactacccatgggtcatgagagactggctgaatcagaggaacaactttttactgccatattttactgaggatgagaagaaattaatccagggaacgtttgatttcctcgcactctcccattacactacaatcctcgtggactcagaaaaagaagacccaattaagtacaacgattatctggaagtccaggagatgacggacatcacatggttgaactcaccatcccaggtagcggtggtcccatggggactgcgaaaggtgctgaactggcttaagttcaagtacggcgacctgccaatgtacatcatcagcaacggcattgatgatggcctgcacgctgaggacgatcagctcagggtttactacatgcagaattacataaacgaggccctgaaggctcatattctggatggaatcaacctatgcggctactttgcctactcttttaacgatagaactgctccccgatttggattgtatagatacgccgccgatcagttcgagcccaaggcaagtatgaagcattaccggaagataattgatagcaacggctttccaggccctgagaccctggagagattctgccccgaggagttcacagtgtgcacggagtgctccttcttccatactcgaaagagccttctagctttcatcgccttcctttttttcgcctcgattatctcactaagcctcatcttttactactccaaaaagggcagacgttcgtacaaa

SEQ ID NO: 14993 - DNA, 3036 bp, synthetic construct; identical to SEQ ID NO: 14992
  misc_feature 1..3036: note = source = /note="Description of Artificial Sequence: Synthetic coding sequence"
  source 1..3036: mol_type = other DNA

SEQ ID NO: 14994 - DNA, 3036 bp, synthetic construct
  misc_feature 1..3036: note = source = /note="Description of Artificial Sequence: Synthetic coding sequence"
  source 1..3036: mol_type = other DNA
atgccggcgtctgcaccgccacgaagacctaggccacccccgcctagcctttccttgctactagttctattgggcctcggaggtcgccgtctacgtgctgaacctggagacggtgctcagacttgggcccgtttcagcagacccccagccccagaagccgctggcctgttccagggcacctttccggacgggttcctgtgggcggtgggctccgccgcttatcaaacagaaggaggttggcaacagcacggaaagggcgcgagtatctgggatacttttacacaccatccactggccccacccggtgacagccgaaacgcgagcttacccctgggcgcacccagtccgctccagcccgccaccggtgatgtcgcctcggactcgtacaataacgtgttccgtgatactgaagccctgcgcgaactgggtgtgacacactaccgcttttcgatttcatgggccagagtgctgcccaatggctccgccggagtgccaaaccgagaaggcctccggtattataggagactgctcgagaggctgagagaactcggtgtccagccggtcgttacgctatatcattgggatctgcctcaacgtctgcaggatgcgtacggaggctgggccaatagggccttagccgaccactttcgcgactacgcagaactctgctttagacatttcggcggtcaggtcaagtactggataaccattgacaatccttatgtcgttgcctggcatggctacgccaccgggcgcctggctccgggaatacgtggtagcccgcgcttgggatacttagtggctcacaatctgctgttggctcatgccaaagtgtggcatctatacaatacatcctttcgtcctactcagggcggtcaggtgtcaattgccttgtcctcgcattggatcaacccccgtagaatgactgaccacagcatcaaagaatgtcagaagtccctagactttgtgctgggctggtttgccaaacccgttttcattgatggcgattatcctgagagcatgaagaacaacctgtcctctattcttcccgattttaccgaaagcgagaagaagttcatcaaaggtactgctgatttctttgccctatgctttggtcctactctgtccttccagctattggaccctcacatgaagtttcgtcagttagaatcgccaaacctgcgtcaactgttatcatggatcgatctggaattcaatcatccgcagatcttcatagtcgaaaatggatggttcgtgtcgggcaccaccaaacgagacgatgctaaatacatgtactacctcaaaaagttcataatggagacattaaaggcgataaagctggatggggttgacgttatcgggtacacggcatggagcctgatggatgggttcgagtggcatcgtggctacagcattcgccgtggccttttttatgttgattttctgagccaagataagatgcttctaccaaaatcgtcagccctgttctaccaaaagctaatcgagaagaacggcttcccccctttaccggagaaccagcctctcgaagggacctttccctgtgatttcgcgtggggagtggtggacaattacattcaggtggatacaacactgtcgcagttcacagacctgaatgtgtacctgtgggatgtgcaccactcgaagcgcttgattaaggttgatggcgtcgtcactaagaagaggaagtcgtattgcgtggattttgccgccattcaaccgcagatagccctgcttcaggagatgcatgtgacccatttcagattctctttggattgggccctgattttgcccctgggcaatcagtcccaggtgaatcataccatcctgcagtactataggtgcatggcatccgagctagtgagggtcaacattactcctgttgtcgccctctggcaacccatggcgcccaaccagggcctcccccgcctgctggcgaggcaaggtgcctgggaaaacccgtataccgccctggcctttgcggagtatgcgcggctgtgctttcaggaattgggccaccatgttaagctatggataaccatgaacgagccctacacccgcaatatgacgtatagtgccggtcacaaccttctaaaggcacacgctttggcgtggcatgtgtataatgaaaagtttagacacgcccagaacggaaagatttcaatagctctccaagccgactggatcgagcccgcctgcccgttctcgcagaaggacaaagaagtggccgagcgcgtcttggaattcgatataggctggttagctgaacccatcttcggtagtggcgattacccgtgggtaatgcgggattggctgaaccagcggaacaactttctactgccatacttcacggaggatgaaaaaaaactaattcaaggaaccttcgattttctggccctgtcgcattacacaacgatcttggtagatagcgaaaaggaggatcccatcaagtacaatgactatctggaagtgcaggaaatgactgatatcacgtggctgaacagcccctcgcaggtggctgttgtgccctggggcctgcgcaaggtgctgaattggttgaagttcaagtatggagatcttcctatgtacattatttccaacggaatagacgatggccttcacgccgaggacgatcaactgcgtgtctattacatgcagaactatattaacgaggccttgaaggcgcacattttggatggaatcaatctctgcggctacttcgcctacagtttcaacgatcgcacggctccacgcttcggactgtacaggtatgcggcagaccaatttgagccaaaggcgagtatgaaacactaccgaaaaataatcgactcaaacggatttcccggaccagagacgttggagcgtttctgtccggaggaatttaccgtctgcacggagtgcagttttttccacactcggaaaagcctgctggccttcatagccttcctgttcttcgcaagtataatctccctgtcgttgattttttactacagtaagaagggccgacgaagctacaag

SEQ ID NO: 14995 - DNA, 3036 bp, synthetic construct; identical to SEQ ID NO: 14994
  misc_feature 1..3036: note = source = /note="Description of Artificial Sequence: Synthetic coding sequence"
  source 1..3036: mol_type = other DNA

SEQ ID NO: 14996 - DNA, 3036 bp, synthetic construct
  misc_feature 1..3036: note = source = /note="Description of Artificial Sequence: Synthetic coding sequence"
  source 1..3036: mol_type = other DNA
atgcctgcctccgcacctccgcggcgccctagaccgccgccgccatctctgtcgctgctgctggtccttctgggacttggcgggcggcgtctgcgtgcggagccgggagacggcgcccaaacctgggcacggttctcacggcccccagcgccagaggctgccggcctcttccagggaactttcccagacggcttcctctgggcggtcggaagcgccgcgtaccagacggaggggggctggcagcaacatggcaagggagcctcgatctgggacactttcacccatcacccactcgccccaccgggcgattcgcggaatgcgtcgctcccgctcggagccccgtcacctctccagccagcaactggagacgtggcttcggactcctacaacaacgtattccgggacactgaggccctgcgcgagctcggagtgacccactaccgcttctccatttcctgggcacgggtgctgcccaatggaagcgcaggtgtgcctaaccgggagggtctgcgctactaccggcgcctgctggaacggctccgggagctgggggtccaaccggtggtgaccctgtatcactgggatctcccgcagcggcttcaggacgcctacgggggctgggcaaaccgcgcccttgccgaccatttcagagactacgcagaactctgctttcggcactttggaggccaagtgaaatactggatcaccatcgataacccatacgttgtggcatggcatggatacgcgaccggccggctcgcccctgggatccgcggaagcccgcggctggggtatctcgtggcccacaacctgctcctggcccacgcgaaggtgtggcacctgtacaacacgtcgttcagacctactcagggaggacaagtgtcaatcgcgctcagctcacactggatcaatccgcgaaggatgaccgaccactctattaaggaatgccaaaagtcgctcgactttgtgctgggatggttcgcaaagccagtgttcatcgacggagactacccggaatccatgaagaataatctgtcctcgattctgccggatttcacggagtcagaaaagaagttcattaagggaactgccgatttcttcgcgctgtgttttggaccaactttgtcgttccagctgctggacccgcacatgaagttcagacaactggaatccccaaatctccgtcagctgctcagctggattgaccttgaattcaaccatccacagatctttatcgtggaaaatggatggttcgtgagcggcaccaccaagagggacgacgctaagtatatgtattacctgaaaaagtttatcatggaaaccctgaaggccatcaagttggacggagtggatgtgatcggttacaccgcgtggtcactgatggacggatttgaatggcaccggggctactcgatccggaggggactgttctacgtggatttcctgtcgcaggataagatgctgctgcctaagtcaagcgcgctgttttaccagaaactgatcgagaaaaatggatttccgcctctgcccgaaaaccaaccgctggagggaacttttccatgtgatttcgcttggggcgtggtggacaactacattcaagtcgataccactctcagccagttcactgatctgaacgtgtacctttgggacgtgcatcattccaagcggctgattaaggtggacggcgtggtgactaagaagcgcaaaagctactgtgtggacttcgcggcgattcagccacaaatcgccttgctccaggagatgcatgttactcacttccggttctcgttggattgggccttgatattgccgctgggaaatcagtcccaagtgaaccacactattctgcaatactacagatgtatggcatccgaacttgtcagagtgaacatcacccctgtggtcgccttgtggcaaccgatggcccctaatcaagggctgccgagacttctggcaaggcaaggcgcgtgggagaacccgtacactgccctcgcgttcgcggagtacgcccggctctgcttccaggagctggggcatcatgtgaagctgtggatcaccatgaatgaaccgtacactcgcaacatgacgtacagcgctggccacaatctcttgaaagcccatgccctcgcctggcacgtctacaacgaaaagttcaggcacgctcagaacggtaagatctccatcgcactccaagctgattggatcgagccggcgtgcccgttctcacaaaaggataaagaggtcgcggagagggtcctggagttcgatatcggatggctggccgaaccgatcttcggatctggagattacccgtgggtcatgcgggactggttgaaccaacgcaacaattttctgctgccttacttcaccgaggacgagaagaagctgattcaagggacttttgacttcttggcgctgtcccactacaccaccatcctggtcgatagcgaaaaggaagatccgatcaagtacaacgactacttggaagtccaagaaatgactgacatcacctggctgaactcaccctcgcaggtcgccgtggtcccgtggggactgagaaaagtgctcaactggctcaaattcaagtacggagatttgccgatgtacatcatctccaatggaatcgacgacggactccatgctgaggacgaccaactgagagtctactacatgcagaactacattaacgaagccctgaaggcacacatcctggacgggatcaacctgtgtggatactttgcatacagcttcaatgaccgcaccgctccccgcttcggattgtaccggtacgccgctgaccagtttgagcctaaagcctcaatgaaacattaccggaagatcatcgactcgaacggattccctggacctgaaactctcgagcggttttgtccggaggaatttactgtgtgcaccgagtgttcatttttccatacccgcaagtccctgctcgctttcatcgctttcctgttcttcgcatcgatcatttcgctgtccctgatcttctactactctaagaagggaaggcggtcatataag

SEQ ID NO: 14997 - DNA, 3036 bp, synthetic construct; identical to SEQ ID NO: 14996
  misc_feature 1..3036: note = source = /note="Description of Artificial Sequence: Synthetic coding sequence"
  source 1..3036: mol_type = other DNA

SEQ ID NO: 14998 - DNA, 3036 bp, synthetic construct
  misc_feature 1..3036: note = source = /note="Description of Artificial Sequence: Synthetic coding sequence"
  source 1..3036: mol_type = other DNA
atgccggcttccgcccctcctcgccgcccaagacctccgccaccgtcgctgagcctgcttttggtgctgctgggactgggcggacgtcgcctccgagccgaaccgggagacggagcacagacttgggcgcgcttctcgcgaccgcctgcaccggaagcagccggactgtttcagggaactttcccagacggctttctctgggctgtgggatccgccgcataccagactgagggagggtggcagcagcacgggaagggcgcgtccatctgggacacttttacccaccacccacttgcaccacctggcgattcaaggaatgcctccctcccgctgggcgccccttccccgctgcaacctgccaccggggacgtcgccagcgatagctacaataacgtgttccgggacactgaagcactcagggaactgggggtcacccactaccgcttctcgatctcctgggctcgggtgttgccgaacggctcagccggagtgccgaatagagaaggtctgcgctattaccgccggctgctggagcgcttgcgcgaactgggagtccaaccggtcgtcacgctctatcattgggacctcccgcagcgcctccaggatgcttacggtggttgggccaaccgggccctcgctgatcactttcgcgattacgcggagctgtgcttccgccatttcggaggacaggtgaagtactggatcaccattgataacccgtacgtggtggcgtggcatgggtacgctaccgggcggctggcgccgggaatccgaggctcgccgagactgggctacctggtcgcccataatctgctgttggcacatgcaaaggtttggcatctgtataacacttccttccgcccgactcagggtggccaagtgagcatcgcactgtcatcacattggatcaacccgcggaggatgactgaccactcaataaaggagtgccagaaaagcctcgacttcgtgctgggatggttcgcaaagccggtattcattgatggagactacccggagagcatgaaaaacaatctctcatcaatcctgcccgattttactgagtcggaaaagaagttcatcaagggaacggcggatttcttcgcactttgttttggaccgactctgtcatttcagctgctggacccacatatgaaatttcgacaactcgaatcacctaatctgcgacagctgctctcatggatcgatctcgaattcaatcacccacagattttcattgtggaaaacggatggtttgtctccggcaccactaaacgcgacgacgcaaaatacatgtactacctgaagaagttcattatggaaaccctgaaggccatcaagttggacggtgtggatgtcattggatacaccgcctggagcctgatggacggtttcgagtggcacagagggtacagcatcaggcggggactgttttacgtggacttcctgagccaggataagatgctgctgccgaagtcgtcagcgctgttctaccaaaaactcatcgaaaagaacggatttcctccactgccagagaaccagccgcttgaaggcactttcccatgcgacttcgcctggggagtcgtggacaattacattcaggtcgataccaccctgtcgcagttcactgatcttaacgtgtacctctgggatgtccaccattccaagcggctcatcaaggtggatggtgtggtgaccaagaagcgaaaatcctactgtgtggattttgcagctatccaaccgcagatcgccctgctgcaggagatgcacgtgacgcacttccgcttctccctggactgggcgctgatcctgccactcggaaaccagagccaggtgaatcataccatcctgcaatactacaggtgcatggcgtcggaactggtgcgcgtgaacatcacccccgtggtggccctgtggcagccgatggcgcccaaccaagggttgccgcgcctgctggcaagacagggtgcgtgggagaatccttacactgctttggccttcgcggaatacgcccgcctgtgctttcaggagttgggacaccatgtgaagctctggattaccatgaacgagccatacacccgaaatatgacctactcggcgggtcataacctgctcaaggcccatgcactcgcgtggcacgtctacaacgagaaatttcggcacgcccagaatggcaagatctctatcgccctgcaggcagactggattgagccggcctgccccttctcacagaaggacaaggaggtcgctgaacgcgtcctcgagttcgacatcggttggctggccgaaccaatctttgggtcgggtgactatccgtgggtgatgcgggattggctgaatcagcgtaacaatttcctgttgccatacttcactgaagatgagaaaaagttgatccagggaaccttcgatttcctcgcgctttcgcattataccacgatccttgtggactcggaaaaggaggaccccattaagtacaacgactatctggaggtccaggaaatgacggacattacgtggctgaattctccatcgcaggtcgctgtcgtgccttgggggctgagaaaagtgctgaattggctgaagttcaagtacggagacttgccgatgtacatcatctccaacggaatagatgatggacttcatgccgaggacgatcaactgagggtgtactacatgcaaaactacatcaacgaagccctcaaagcacatatcctcgatggcatcaacctttgcggatacttcgcgtactcgttcaatgaccggaccgcaccacggtttggcctctaccgctacgcagcggatcaattcgagccgaaggcgagcatgaagcactacagaaaaatcatcgatagcaatggattccctggacctgaaacgctggaacgcttctgccccgaagaattcaccgtctgcacggagtgctccttctttcacacccggaagagcctgctggccttcatcgccttcctgtttttcgcaagcatcatctccctgtcactcatcttctactactctaaaaaggggagacgctcatacaag

SEQ ID NO: 14999 - DNA, 3036 bp, synthetic construct; identical to SEQ ID NO: 14998
  misc_feature 1..3036: note = source = /note="Description of Artificial Sequence: Synthetic coding sequence"
  source 1..3036: mol_type = other DNA

SEQ ID NO: 15000 - DNA, 3036 bp, synthetic construct
  misc_feature 1..3036: note = source = /note="Description of Artificial Sequence: Synthetic coding sequence"
  source 1..3036: mol_type = other DNA
atgccagccagtgcccctccccgaagacccagaccacccccaccgagcctgagcctcctgttggtactgcttggactcggtgggcgcagactgcgggccgagccaggtgatggcgcccaaacttgggcacgatttagtcgtccacccgccccagaggcagcgggcctgtttcagggcacgttccctgatggctttctatgggccgtggggtccgcagcataccagaccgagggtggttggcagcagcacgggaagggagcatcaatttgggatacatttacccaccacccactcgcgccgccaggggactcgagaaatgccagcctgcccctaggagctccctccccactgcaacccgctacaggcgatgtggctagtgatagctacaacaacgtctttcgggacacagaagctctgcgtgaactcggcgtgacccactaccggttcagcatctcctgggcccgtgtgctgcctaacggcagtgcgggggtgccaaaccgtgaaggattgcgctactatcgcaggctgctagagaggttacgagagttgggcgtgcagccagtcgtgacattgtaccactgggatctaccgcaacgtctgcaggacgcatatggcggatgggccaaccgagctctggctgaccacttccgggattacgctgaattgtgttttcgccacttcggcggacaggtaaaatactggataacaatcgacaacccttatgtagtggcttggcacggttatgccactggccgcttggccccgggaatcaggggttccccccgcctcgggtaccttgtcgcccataacctgctgctggcccacgccaaagtgtggcacctttataatacctcctttcggccaacgcaagggggccaagtgtccattgccctgagctcccactggatcaatcccaggaggatgacggaccattctattaaggagtgccagaagagcctcgacttcgtgctaggttggttcgctaagcccgttttcatcgacggtgattaccctgaaagcatgaagaacaatttgtcaagtatcttaccagacttcactgagtcagaaaaaaagttcattaaaggaacagccgactttttcgccttatgctttggccctaccttgtctttccagcttcttgatccccacatgaagttcagacaactggagtctccaaaccttcgacagctgctctcttggattgatcttgagtttaatcacccccagatctttatagtggaaaacggttggttcgtcagtggaaccacaaaacgtgacgacgctaagtatatgtattacctgaaaaaattcattatggagaccctgaaggctatcaagctagatggtgtggatgttatcggatacaccgcttggtccctcatggatggatttgagtggcaccgcggatatagcatacgacgtggccttttttatgtggattttttgtctcaagacaagatgcttctcccaaaatcctccgccctcttctatcagaagctcatcgaaaagaacgggttcccgccactcccagagaaccaacctctggagggtacattcccctgtgattttgcgtggggcgtcgtcgataattacattcaggttgacacgactctgagccagttcaccgacctcaatgtttatctctgggatgtccatcacagtaagcgattgatcaaggtagacggagtggttaccaaaaagcgcaagagttactgtgtggactttgcagctatccagccccagatcgcccttctgcaggaaatgcatgtcacacacttccgattttcactcgattgggctctgatacttccgctagggaatcagtcacaggtcaatcacaccattttgcagtattaccgatgcatggcttctgagttagttcgagtcaatatcaccccagtagtcgctctctggcaaccgatggcaccaaatcagggattgcctagactactagctaggcaaggcgcttgggaaaacccttataccgccctcgcctttgcagaatacgccagactgtgcttccaggaactggggcatcacgtcaagctgtggatcactatgaacgagccctacacaagaaacatgacctacagcgctggccataacttgctgaaagcacatgccctggcgtggcatgtttataacgaaaaattccgccatgcccagaacggcaagataagtatcgccctgcaggcggactggattgagccggcatgtccctttagccagaaggataaggaagtggcggaaagagttttggaattcgatattgggtggctggcggaacctatctttggcagtggtgattatccctgggtgatgcgggattggcttaatcagagaaataactttctgttgccctattttaccgaggatgagaagaaactgatacaaggcaccttcgattttcttgcgctaagccattacactactattctggtagattcagagaaggaagaccctattaagtacaacgactatctggaggtacaagagatgacggacattacctggctgaacagtccctcacaagtcgcggtcgtgccttgggggttacggaaggtgttaaattggctaaagttcaagtacggcgaccttcccatgtacatcatttcaaacgggatcgacgatggcctgcacgctgaagatgaccaactccgcgtctactatatgcagaactacatcaatgaggctttgaaagctcatattctagacggcatcaacctttgtggatactttgcatactccttcaacgacagaaccgcccctaggttcggactgtacagatacgctgctgatcagttcgaacccaaggctagtatgaaacattacaggaaaatcattgatagtaacgggtttcctggacccgagactttggagagattctgccccgaggaattcactgtatgcactgaatgcagctttttccatacccgcaaaagcctgctggccttcattgcgtttctattttttgccagtattattagcctctcgctcattttttattatagcaaaaaaggcaggcggagctacaaa

SEQ ID NO: 15001 - DNA, 3036 bp, synthetic construct; identical to SEQ ID NO: 15000
  misc_feature 1..3036: note = source = /note="Description of Artificial Sequence: Synthetic coding sequence"
  source 1..3036: mol_type = other DNA

SEQ ID NO: 15002 - DNA, 3036 bp, synthetic construct
  misc_feature 1..3036: note = source = /note="Description of Artificial Sequence: Synthetic coding sequence"
  source 1..3036: mol_type = other DNA
atgccagccagcgcgccccctaggaggccgaggcctcctcctcccagtctgtctcttctgttggtcctgctcggtctgggtggtagacgcttgcgcgcggagcctggtgatggtgcacaaacctgggcaagattttccagaccaccagctcccgaggccgcaggactctttcagggcacgtttccagacggcttcctgtgggcagtcggcagtgctgcttaccaaaccgagggcggctggcagcagcacggcaagggagcttccatctgggatacatttacacaccaccctctcgcaccacctggcgacagtcgcaatgcgtctttgccacttggcgctccttcccccctgcagcccgcaacaggtgatgtggcctccgacagctataacaacgtcttccgcgacacagaggcccttcgcgagcttggagttactcattacagattttccataagctgggcaagagttctccccaacggttcagcgggagtgcccaaccgcgagggcctcagatattacagaaggttgctcgagaggctgcgcgaactgggagtgcagcctgtagtgactctttaccactgggaccttcctcagaggctccaggatgcctatggaggctgggcgaaccgcgctttggctgaccatttcagagattatgctgaactgtgttttcgccacttcggcggacaggtcaagtattggatcactatcgataatccatacgttgtggcttggcacggctacgcgaccggacgcctcgctccgggcatcagaggctctcctagattgggatacttggtggcacataacctgctccttgcgcacgctaaagtgtggcatctttataacactagcttcagacctacacagggtggtcaggtcagcattgctcttagtagtcactggatcaaccccaggaggatgaccgatcactccatcaaggagtgccagaagtcactggattttgtcctcggttggtttgcaaagcccgtgttcatcgatggcgactaccctgaatcaatgaaaaacaatctgtcttccattctgccagatttcacagaaagcgagaaaaaatttatcaaaggcactgcagatttctttgccctctgctttggtccaacattgtcattccaactcctcgatccacatatgaagttccgccagctcgaaagtccaaaccttcgccagttgctttcctggatcgacctggagttcaaccacccccaaatctttatcgttgagaacggctggttcgtgtctggcacaactaaaagggacgacgcgaagtatatgtactacctcaagaaatttatcatggagacactcaaggcgataaaactggacggagtggacgttattggatacaccgcctggtcactcatggatggtttcgagtggcacagaggctattccatcaggaggggtcttttctacgttgacttcctgtctcaagataagatgctgttgcctaagtcctcagccctgttctaccagaaactgatcgagaagaacggcttccccccgctcccagagaaccaacccctcgagggtacgttcccctgtgattttgcttggggcgtggtggataattacattcaggtcgatacgactctgagccagttcactgatctcaacgtgtatctgtgggatgtccatcacagcaagcgcctgattaaggtcgatggagtcgtcactaagaagcgcaagtcttattgtgtagacttcgctgctatacaaccgcagatcgctctgctccaggagatgcacgtgacccatttccgcttcagtctggactgggctttgatcttgcctctcggaaaccaatcccaggtgaaccacacgatcttgcaatactacaggtgcatggcttccgagctcgtacgcgtcaacataacgcctgtggtggccttgtggcaacccatggctccaaatcagggcctgcccaggctgctcgctaggcagggagcctgggagaatccatatacagcgctggctttcgctgagtacgcacgcctctgcttccaggaactcggccaccacgtcaagctctggatcacgatgaacgaaccgtacactagaaacatgacctactctgccggccataatttgctcaaggcgcacgccctggcctggcacgtgtacaacgagaagtttcgccacgctcaaaacggtaagatatctattgcactgcaagctgattggattgagccagcgtgtccgttctcccaaaaggacaaggaagttgcagagagggtcctggagttcgatatcggatggcttgccgaaccaatcttcggtagcggtgattacccttgggtaatgagagactggttgaaccagaggaataactttctccttccctactttacagaggatgaaaagaaactcatccagggcacgttcgatttcttggcgctgagtcactacacaactatacttgtggactcagagaaggaggaccccatcaaatataatgattatttggaggtacaggagatgactgacatcacatggctgaattctccctctcaggttgctgtagtcccttggggattgcgcaaggttcttaattggctgaagttcaaatacggagatcttccaatgtatattatttctaatggaatcgatgatggactgcacgctgaggacgatcagcttagagtgtactacatgcagaactacatcaacgaagcgcttaaggctcacattctggacggaatcaacttgtgcggatactttgcctacagtttcaacgacaggacagcgccgagattcggcctgtacaggtacgctgcagatcaattcgagccaaaggcatccatgaagcactataggaagatcattgactctaatggtttcccgggacctgaaactctggaaaggttttgcccagaagaatttaccgtatgcaccgagtgctcatttttccacacgcgcaagtccctccttgccttcatcgccttcctcttttttgcttcaattatctctttgtccctgattttctactactctaagaagggtaggcgctcttataag

SEQ ID NO: 15003 - DNA, 3036 bp, synthetic construct; identical to SEQ ID NO: 15002
  misc_feature 1..3036: note = source = /note="Description of Artificial Sequence: Synthetic coding sequence"
  source 1..3036: mol_type = other DNA

SEQ ID NO: 15004 - DNA, 3036 bp, synthetic construct
  misc_feature 1..3036: note = source = /note="Description of Artificial Sequence: Synthetic coding sequence"
  source 1..3036: mol_type = other DNA
atgcccgcctccgcccctccccgccgtcctcggcctcctccgccgtctctgagtctgcttctcgtcctccttggcctaggcggaagacgacttcgtgccgaaccaggcgatggagcgcagacatgggcccgtttcagcagacctcccgcccccgaggcagcgggtctctttcaagggacctttcctgacggctttctctgggccgtggggagcgccgcctatcagactgagggggggtggcagcagcatgggaagggagcatcgatttgggacacattcacgcaccatcctttggctccacctggagattcccgcaacgcaagcctccccttgggcgccccttccccacttcagcccgccacaggggatgtcgcgtccgacagttacaacaacgtatttcgggacacggaagccttgcgcgagctgggggtgactcattacagattttccatctcatgggctcgtgttctgccaaatggatctgccggcgtgccaaaccgcgaaggcctgcgatattaccgcagactcctggagagactgcgggagctcggcgtccagcccgttgtaactttgtatcactgggacctgccacaacgtctccaggatgcatacgggggctgggcgaaccgcgccctcgctgaccacttcagggattatgcggagctctgtttccgtcacttcggcggtcaagtgaagtactggatcacaatcgacaacccgtatgtagttgcatggcatggttacgccacagggcgcctggctccagggatccggggatcccctcgtctcggttacttagtagctcacaatctgctcctcgctcacgccaaggtgtggcacctctacaacacttcatttcggcccacacagggcggacaggttagcattgccctgagctcccactggatcaaccccaggcgaatgactgaccactccattaaagagtgccagaagtctctggattttgtgctgggctggttcgccaaaccagtgtttattgacggcgattacccggaatccatgaaaaacaacttatcgtccatcctccctgacttcacggagtcagagaagaagtttattaagggaaccgctgacttcttcgctctatgctttggtccaacactatcattccagctcctcgaccctcatatgaaattccgacaactcgaatcccccaatctgaggcagttactgtcttggatagatttagaatttaatcacccccagatcttcatcgttgagaacgggtggttcgtctcaggtacaactaagcgggatgacgcgaagtatatgtattatcttaaaaagttcatcatggaaacactgaaggctattaaacttgatggtgtcgatgtgatcggctacaccgcctggagcctaatggacgggttcgagtggcacagagggtacagtatccggagagggctgttttacgtggactttctgtcgcaggataagatgcttctccccaagagctccgccctgttttaccaaaaactgatcgagaaaaatggatttccaccgcttccagagaaccagcccttggagggcaccttcccctgcgactttgcctggggcgtggtggacaactatatccaagtcgatacgacactttctcagttcaccgacctgaatgtgtatttgtgggatgtccaccacagcaagagattgattaaagtggacggagtggtaacaaaaaagcgcaaaagttattgcgtggattttgccgccattcagccacagatcgccctgttacaagagatgcatgtcactcacttccggttcagtctggactgggcgttgattctgcctctggggaaccagtcccaggttaaccatactatcctacagtattatcgctgcatggcaagtgaactggtgcgggtaaatatcacaccggtggtcgccctgtggcagccaatggctcctaaccaaggactaccccggctactcgcaagacagggtgcttgggagaacccttacaccgctctggccttcgccgagtacgctcgcctgtgtttccaggaacttgggcaccatgttaagctgtggattacgatgaatgagccctacactcggaatatgacctattcagcgggtcacaacctcctgaaagcacacgcactggcatggcacgtgtacaacgagaagttcagacatgctcagaacggcaagataagcatagcccttcaggcggattggatcgagcccgcctgtccattctcgcagaaagataaggaggtagctgaacgggtactcgagtttgacatcggctggctggcagagccaatcttcgggagcggagattatccttgggtgatgagggattggctgaatcaacgaaacaactttcttcttccttatttcacagaggatgagaaaaagctgatacaaggaactttcgactttctggcactatcacactatacaactatccttgttgacagcgagaaggaggaccccattaagtacaatgattacctggaggtgcaggagatgactgacataacttggctgaattctcccagtcaggtcgcagtggtcccttgggggctgcgcaaagtcctgaactggttgaagtttaagtatggagatctccctatgtacatcattagcaatggcattgacgatggcctgcacgccgaggacgaccaactgcgggtatattatatgcagaattacataaatgaggcactgaaggctcacatcttggacggaattaatctgtgtgggtactttgcttactctttcaacgataggacagcccccagatttggcctctaccggtacgccgcggatcagtttgagccaaaggcttccatgaagcattatcgtaagataattgactctaatgggttccccggccccgagacactggaaaggttctgccctgaggagttcaccgtctgcaccgagtgtagcttttttcataccagaaagtcacttctcgcttttatagcgtttcttttcttcgcatccattattagcctttccctgattttttactactctaaaaaaggacggagaagctacaag

SEQ ID NO: 15005 - DNA, 3036 bp, synthetic construct; identical to SEQ ID NO: 15004
  misc_feature 1..3036: note = source = /note="Description of Artificial Sequence: Synthetic coding sequence"
  source 1..3036: mol_type = other DNA

SEQ ID NO: 15006 - DNA, 3036 bp, synthetic construct
  misc_feature 1..3036: note = source = /note="Description of Artificial Sequence: Synthetic coding sequence"
  source 1..3036: mol_type = other DNA
atgccagctagcgccccccctcgacgaccacgcccaccccccccgtctttgtctctgttgttagtactgctcggtctcgggggaagacgtctccgagcagagccaggtgacggggcccaaacctgggctcgtttcagtagacccccagcacccgaggccgctggcctgttccaggggacctttcctgatggctttttatgggctgtcggcagtgcagcctatcagacagagggcggctggcagcagcacggcaaaggggcttctatctgggatacgtttacccatcacccacttgcacctccgggagattctcgcaatgccagcctccctttaggagccccttccccactccagcctgccaccggagacgtcgcctctgattcatataacaacgtctttcgcgacacggaagccctcagagaactcggagtcacccactacaggttcagtatttcctgggccagagttttgcccaacggttcagctggcgtccccaaccgggaggggctaagatattatcgccggctgcttgagcgcctgcgcgaactaggcgtccagcccgtcgttaccctctaccattgggacctccctcaacgcctacaggatgcatatggcggctgggccaacagagctttagccgaccattttcgggattatgcagagctttgctttagacactttggaggccaggtgaagtattggataactatagacaacccttacgtcgtggcttggcatgggtatgcaaccggtaggctagcacctggtatccgggggtcccctagactgggatatctggtggcccataaccttctattggcccatgcgaaggtctggcatctgtacaatactagtttccggcccacacaggggggccaagtctcaattgctctgtcttctcattggatcaatcccaggcgaatgaccgatcattctattaaagagtgtcagaagtccttagatttcgtgcttggatggttcgctaagccagtgttcattgatggtgactaccccgaatcgatgaaaaacaacttatcctccatactgcccgacttcaccgagtcagagaaaaaattcataaagggcacggcggacttttttgcgctgtgtttcggcccgaccttatccttccagctcttagatccacatatgaagtttagacaactggaaagccccaatctgaggcaactcctttcatggatcgatctcgaattcaaccatccccagatctttattgtcgaaaacgggtggtttgtcagtggcacgacaaagagggacgacgcaaagtatatgtactacctgaaaaagttcatcatggaaacactgaaggcaatcaaactcgatggggttgatgtcatcggatacaccgcctggagtctgatggacgggttcgagtggcatcgagggtacagtattagacgaggtctattttacgttgacttcctcagccaggacaaaatgttactgcctaaatcctcagcactattctaccagaagcttattgagaagaacggattccctcctctgccagaaaaccagcctcttgaggggacttttccgtgtgacttcgcttggggggtggtggacaactacattcaagtggataccaccctcagccagtttaccgatctgaacgtgtacttgtgggatgtgcaccacagcaagagactaatcaaagtcgacggtgtggtgaccaaaaagagaaagtcatactgtgtggactttgcagcgatccaaccccagatagccctgctgcaggagatgcacgtgacgcactttcggttttcactggattgggctttgatcctcccactcggaaatcagagtcaagttaatcatacaatcctgcagtattacagatgcatggcaagcgagctggtacgagtgaacataacacctgtggttgccctgtggcagccaatggcaccaaatcaaggcttgccccgactcctcgccagacagggggcatgggaaaatccttataccgcactcgccttcgcagaatatgcgcgcttgtgctttcaggaactcggtcaccatgtcaagctgtggataactatgaatgaaccctacaccagaaacatgacgtactcagctgggcacaaccttttgaaggcgcacgcattggcatggcacgtgtacaacgaaaagttccggcatgcacagaatggtaaaattagcatcgcgttgcaggcggattggatcgagcctgcatgtcccttttctcagaaggacaaggaggtggcggagcgggtcctggagtttgatatcggatggctagcagagcccatcttcggctcaggcgactacccctgggttatgagggattggctcaaccagcggaacaacttcctgctgccttacttcactgaagacgaaaaaaaactgatccaggggacatttgatttcctggccctcagtcactatacaaccatcctggtggattccgagaaagaggatccaattaagtataatgattacctcgaggttcaggaaatgaccgatattacatggctgaattcaccctcacaggtggccgttgtgccttggggactgaggaaagtgttgaactggttgaaattcaaatatggagacctacctatgtacataatcagtaacggcatagatgatggcctccatgccgaggacgaccaactccgcgtgtattatatgcagaattatataaacgaagctctgaaggcacacattctcgacggaataaacctttgcggctatttcgcctattctttcaacgaccggaccgcccctcgttttggcctatatcgttacgctgctgaccagttcgagcctaaggcatcaatgaaacattatcgcaagatcatcgactcaaatggcttcccagggcccgaaactttagaaagattttgccccgaggaatttacagtgtgtacagagtgtagctttttccatacaagaaagagcctccttgctttcatcgcctttttgttctttgcctctataatcagcttaagcctaattttttactactctaagaaggggaggaggtcatacaaa

SEQ ID NO: 15007 - DNA, 3036 bp, synthetic construct; identical to SEQ ID NO: 15006
  misc_feature 1..3036: note = source = /note="Description of Artificial Sequence: Synthetic coding sequence"
  source 1..3036: mol_type = other DNA

SEQ ID NO: 15008 - DNA, 3036 bp, synthetic construct
  misc_feature 1..3036: note = source = /note="Description of Artificial Sequence: Synthetic coding sequence"
  source 1..3036: mol_type = other DNA
atgcctgcctctgctcccccacggaggccaaggcctccccccccttcgttgtctctgcttctggtcctgctcggtctcggcgggcgccgcctacgagccgaacccggcgacggggcccagacctgggcccgatttagtcgccctccggctcctgaggcagctgggctgttccagggcacctttccagacgggtttctgtgggccgtggggtctgctgcctatcagaccgagggcggctggcagcagcacggaaagggagctagcatttgggacacctttacacaccatccactggctcctccaggagactctaggaatgccagtctaccccttggcgctccctcacccttgcagcccgccacaggggatgtggcttccgacagttacaacaatgtgttccgggatacagaagccctgagggaacttggagttacccattatcgcttttcaatcagctgggcccgagtcctacccaacggaagcgctggggtccctaatcgggaaggattacgatactaccgcaggcttctggaaagactgagagaactcggcgtgcagcccgttgtgaccctgtatcattgggacttaccccagcgcttgcaagacgcatacggtggatgggctaacagggccttggctgatcactttcgagactacgctgagctatgctttcggcactttgggggacaggtgaagtattggattacgatagacaatccctacgttgtcgcttggcatgggtacgcaaccggacggctagcccctggtattcgggggagcccgcgcctgggctacctagttgcccacaacctgctgctcgcacatgccaaggtgtggcatctttataataccagcttccgtcctactcaggggggccaggtctctatcgcccttagctctcattggattaatcccagacgcatgaccgaccactccattaaggagtgtcagaagtccctcgatttcgttctcggctggttcgcgaaaccagtttttatcgatggagactatcccgagagcatgaagaacaatctgagctcaatccttcctgatttcacagagtctgagaagaagtttatcaaaggcactgctgatttttttgctttgtgttttggtccgactttatcttttcagttattggatccccatatgaaattccgtcagctggaatcccctaacctgaggcaacttctctcttggatcgatctggagttcaaccatccacagatctttattgttgagaatggctggttcgtatccggcacaaccaaacgggacgatgccaagtatatgtactacctgaagaaattcatcatggagactctgaaggcgatcaagctagacggggtggacgtaatcgggtacactgcctggtccctgatggacggcttcgaatggcatagaggttatagtataaggagagggctcttctatgtggacttcctgagtcaggacaagatgcttctgccaaaatcctcagccctcttctaccagaagcttatcgaaaagaacggattcccccctctcccagagaatcaaccattggaaggcaccttcccctgcgactttgcctggggggttgtagacaactatatccaggtggacaccacccttagccaatttacagatctcaacgtatacctgtgggatgtgcaccactcaaaaagactcatcaaggtggatggtgtggtcaccaagaaacggaagtcctattgtgtggatttcgcagcaatccagccacaaattgccctgctgcaagaaatgcatgtgactcattttcgcttcagtctagattgggcacttattctccccttgggaaaccaatcccaggtgaaccacactatcctgcagtactatcgctgcatggcttcagaactagtgcgcgtaaatatcacgcccgtggttgccctttggcagccaatggcgccaaatcaggggctgccaagattgctcgcccgtcagggggcttgggaaaatccgtacactgccttagcattcgccgagtacgcccgtctctgttttcaagaattgggtcaccacgtgaagttgtggatcacgatgaatgagccatacacacgaaatatgacctacagcgcaggccataacctgttaaaggcccacgccctcgcttggcatgtatataacgagaagttccggcatgcacaaaacggcaagatttccatagctctgcaggccgactggattgaacctgcctgtcccttcagccagaaggacaaggaggttgccgagagggtgctcgagttcgacatcgggtggctcgctgagcctatcttcgggtcaggggattacccctgggttatgcgcgactggctgaatcagcgcaacaactttttgctgccatattttactgaggatgaaaaaaaacttattcaaggcacatttgacttcctggcactgtcccattatactacaattctcgtcgatagcgagaaagaggatcccattaagtacaacgactacctagaagtgcaggagatgactgatattacttggcttaactcaccatcccaggtagccgtggttccatgggggcttcgcaaagtgttgaactggctgaaattcaaatacggagatcttcctatgtatattatttcaaatggaattgacgacggcttacacgcagaggatgatcagctcagggtgtactacatgcagaactatattaatgaggctctgaaagcccatatcctggacgggattaacctgtgcggctactttgcttactccttcaatgaccggaccgctccacggtttggcctttaccggtacgccgccgaccagttcgagcccaaagcctcaatgaagcactataggaagataatcgattccaacgggttcccaggccctgaaacgctggaacggttttgtcccgaagagttcacggtttgtacagaatgctcctttttccatacacggaagagcctcctggcttttattgcttttttgttttttgccagtattataagtctctctctgatcttctactactccaagaaggggaggcgctcctacaag

SEQ ID NO: 15009 - DNA, 3036 bp, synthetic construct; identical to SEQ ID NO: 15008
  misc_feature 1..3036: note = source = /note="Description of Artificial Sequence: Synthetic coding sequence"
  source 1..3036: mol_type = other DNA

SEQ ID NO: 15010 - DNA, 3036 bp, synthetic construct
  misc_feature 1..3036: note = source = /note="Description of Artificial Sequence: Synthetic coding sequence"
  source 1..3036: mol_type = other DNA
atgcctgcttccgcaccccccagacgaccccggccacccccgccatctctgagcctactcctggtgctgctaggtctgggggggcggagactgcgcgccgaacccggagatggagcccagacttgggcacgttttagtcgacctccagcgcccgaggcggcaggactgttccaaggcacttttccggatgggttcctgtgggccgtcggcagcgctgcctatcagacagaaggaggttggcagcagcacggcaagggtgcttctatctgggacacattcacccatcaccccttggccccccctggagatagcagaaacgcctcactgcctttgggcgctccaagtcccctacagcctgctactggggatgtcgcttctgacagttacaacaatgtattcagagataccgaagccctgagggaacttggcgtcacccactatcgattcagcataagctgggccagagtactccctaacggatccgctggagtccctaacagagagggcttgcggtattaccggcggttgctagagagattgcgtgaactaggggtccaacctgttgttactctgtatcactgggatctgccccagcggctgcaagacgcatatggaggatgggctaatagagcgctggctgatcacttccgggattatgctgagttatgcttccgtcattttggaggccaagtcaaatactggatcacaatcgataatccatacgtggtcgcctggcacggatacgcaaccggcagactggcccccggcattcggggatccccccggcttggctacctggttgcacacaatctcctgctggctcatgcgaaagtgtggcatctctataatacatcatttcgtcccactcagggcggtcaggtgagtatagccttatcttcccactggattaatcccaggcggatgaccgaccatagtattaaggaatgccagaagagcttggattttgtcctgggctggttcgccaaacccgttttcatcgacggcgattaccccgagtccatgaagaacaacctctcgtctatattacccgattttacggagagcgaaaagaagtttatcaaaggcaccgctgatttcttcgccctgtgttttggccccacactgtcgtttcagcttctcgacccacacatgaaatttcgacagctggagagcccaaatctaaggcaactgctaagctggattgacctagagttcaaccatcctcagatatttatagtggaaaatggctggttcgtaagtggaacaaccaaaagagatgacgccaagtatatgtactacctgaaaaaatttattatggaaacgctgaaagccattaaactagacggggttgatgttatagggtacacagcctggtcattgatggatggctttgaatggcatcgcggttatagtatccgcagaggcctgttctacgtggacttcctcagccaagacaagatgctgctgcctaagtctagtgctcttttttaccagaaactgattgaaaagaacggtttcccccctctcccagaaaaccagccattggaaggcacgttcccatgtgatttcgcatggggggtcgttgacaactacatacaggtggatactacactgagtcagttcacggacctgaacgtttacctctgggatgttcatcactcaaaacgtctgatcaaggtggacggagtggtcacaaaaaaacggaagagctattgtgtggattttgcagcaattcagccacagatcgcactgcttcaagaaatgcacgttacccactttcgtttctctttggactgggccttgatcttgcccctaggcaatcagagccaggtgaaccatactattctacagtactacaggtgcatggccagcgagctggttcgtgtaaacatcacgcccgtagtggcgctctggcaacctatggcccccaaccagggcctcccaaggcttctcgctcgccagggagcctgggagaatccatatactgcactcgcctttgccgaatatgccaggctgtgcttccaagaactcggacatcatgtgaaactctggattaccatgaacgaaccctatacgaggaacatgacctattccgcaggacacaacctgctgaaagctcacgctctggcgtggcacgtgtataatgagaagtttcggcatgctcagaatggcaaaattagcatcgctctgcaggctgattggatagagccagcttgtccgtttagtcagaaagacaaggaggtagcggagcgcgttctggaatttgatatcggttggttggccgagcccattttcgggtctggggactacccctgggtaatgagagactggcttaaccagcgcaacaattttctgctcccatacttcacagaggatgaaaagaagctcatccaaggaacatttgactttctcgccttgtcgcattatacaactatcttagtggactctgaaaaagaagacccaatcaagtataacgactacttagaggttcaggaaatgaccgatatcacttggctgaactctccctcccaggtagccgtcgtgccctggggactccggaaggttctcaattggctgaaattcaagtatggcgatctgccaatgtacatcattagcaatggcatcgatgatggccttcatgcagaggatgaccagctgcgtgtctattatatgcaaaattatattaacgaggccttgaaagcccatattctagacggtatcaatctttgcggctactttgcttacagtttcaatgaccgaacagcccctcgtttcggcttgtatagatacgccgcagatcagtttgaaccaaaggcatccatgaagcattaccgaaaaatcattgatagtaacggatttcccggacccgagacactggagcggttctgtcccgaagagttcacagtttgcacggaatgttccttttttcatacccgtaagtctcttctggcttttatcgcttttttgttctttgcaagcatcatttccctgagcctgatcttctactattcgaagaaaggccgacgcagctacaag

SEQ ID NO: 15011 - DNA, 3036 bp, synthetic construct; identical to SEQ ID NO: 15010
  misc_feature 1..3036: note = source = /note="Description of Artificial Sequence: Synthetic coding sequence"
  source 1..3036: mol_type = other DNA

SEQ ID NO: 15012 - DNA, 3036 bp, synthetic construct
  misc_feature 1..3036: note = source = /note="Description of Artificial Sequence: Synthetic coding sequence"
  source 1..3036: mol_type = other DNA
atgcccgcttctgctcccccgaggcgtccccggccccctccaccctcgctgtccctgctgcttgttctcttagggctgggagggcgacggctgcgcgccgagcccggagacggagcccagacctgggcccgctttagccgccctcctgcgcccgaggcggctggactgttccaaggcacatttcccgatggattcctttgggcggtggggagtgctgcataccaaaccgagggcggttggcagcaacacgggaaaggggcatctatatgggacacttttacacaccatcctctagcaccccctggagacagtcggaatgcttctcttccacttggggccccatctcctctccagcccgcgacaggcgatgtcgcttccgactcttacaataacgtgttccgggacacagaggccttacgtgagctcggcgtgactcactaccggttctctattagctgggcacgggtgcttcctaacggctcagcgggcgtgccaaaccgggagggtcttcggtactatcggcgactgctggaaaggctgcgggaacttggcgtgcaacccgtcgtcactctgtaccactgggatttgccacaaagattacaggacgcatatggcggatgggccaacagagcactagctgaccattttagggactacgcggagctgtgcttccgccattttgggggccaggtgaaatactggatcacaattgataatccctacgttgtggcatggcacggatatgccacaggtcgactggcacctggaatccgggggtctccccgactgggctatttggtcgcccataatctattgctggcgcatgcaaaggtgtggcacctctataacaccagcttcagacctactcaaggcggacaggttagtattgccctttctagccactggataaacccccgcagaatgactgatcattccatcaaagagtgtcagaagtcattggacttcgtcctcggatggtttgccaaacccgtcttcattgatggggactatcctgagtctatgaagaacaacctgtcttctatactaccagactttacggagtctgagaagaaatttattaaggggactgccgacttcttcgccctctgtttcggccctaccctctcctttcagctccttgacccgcatatgaagttccgccaattggaatctccgaatctcaggcaactgctaagttggattgacctggaattcaaccatcctcagattttcattgttgaaaacggttggttcgtgtcagggacgaccaaaagggacgacgcaaaatacatgtactatttaaagaaatttattatggaaaccttaaaggccatcaagctagacggagtagacgtcatcggatatactgcctggagcttgatggacgggtttgagtggcatagaggctactctatccgtaggggcttgttctatgtggattttctctcccaggacaaaatgttgcttcctaagagtagcgctctcttttaccagaagctcatcgaaaagaacggattcccacccttgcctgagaaccagcccctcgagggtacctttccatgtgactttgcatggggggtagttgacaactacatccaggtagacacgacactgtctcagttcactgatctgaacgtgtatttgtgggacgtgcaccactccaagcggctaatcaaagtggatggagttgtgacaaagaagaggaaatcatattgcgtcgattttgcagcaatccagccccagatcgctctgctgcaggaaatgcacgtgacccacttcagattttccctggattgggctctgattttacctcttgggaaccaatctcaagtgaatcacactatcttacagtactacaggtgtatggccagcgaactcgttcgagtgaacataacaccagtggtggccttgtggcagcctatggctcccaaccaaggccttcctagactgctggcccggcagggggcctgggaaaatccctatacagccctcgctttcgcagagtatgcgcgcttgtgcttccaggagctggggcaccatgtgaaactctggatcactatgaacgagccctacacgaggaacatgacctatagtgccggtcacaatctgctgaaagcccacgccctcgcatggcatgtgtacaacgaaaaattccggcatgctcagaatgggaaaatctcaatcgcgctgcaggccgattggatcgagcccgcctgtccctttagccagaaggacaaggaggtcgcagagagggttttggagttcgatataggatggctggccgagcctatcttcggttccggtgattacccatgggttatgcgggattggttgaatcaaagaaacaacttcctgctcccatattttactgaagacgagaaaaaattgattcagggaacattcgacttcctcgctctgtctcactacactaccattcttgtggatagcgagaaggaggacccaatcaaatataacgattacctggaagtccaagaaatgacggacatcacgtggctgaactcaccatcgcaagtcgcagtggtgccctggggtctgaggaaagtgctgaattggcttaaattcaagtatggtgacctgcctatgtatattatctccaatgggattgacgatggtctccacgccgaggacgaccagctgagagtgtattacatgcagaattacattaatgaagcactgaaagctcacattttggatggcattaacctgtgcggatattttgcatacagctttaacgacagaactgctcctaggttcggcctttacagatacgccgcagatcagtttgagcccaaagcctcaatgaagcattataggaagatcatcgattctaacggatttccaggccccgagactctcgagaggttctgccccgaggagttcactgtgtgtaccgaatgctctttcttccacacccggaagagcctcctggcattcatcgccttccttttttttgcaagcattatctccctgagtctaatcttttattactctaaaaaggggagacggtcttacaaa

SEQ ID NO: 15013 - DNA, 3036 bp, synthetic construct; identical to SEQ ID NO: 15012
  misc_feature 1..3036: note = source = /note="Description of Artificial Sequence: Synthetic coding sequence"
  source 1..3036: mol_type = other DNA

SEQ ID NO: 15014 - DNA, 3036 bp, synthetic construct
  misc_feature 1..3036: note = source = /note="Description of Artificial Sequence: Synthetic coding sequence"
  source 1..3036: mol_type = other DNA
atgccagcttcggctccaccacgtcgcccgaggcctccaccgcctagtctctccttgttattggttttactcgggttaggcgggaggcgactacgtgccgaaccaggagacggggctcagacctgggctcgtttttctagaccaccagctcccgaggctgcagggctatttcagggaacttttccagatgggtttttgtgggcagtgggatccgctgcataccaaacagaaggaggttggcaacaacatggcaaaggtgcgagcatctgggacacattcacccatcatccattggcacccccaggggattccagaaacgccagtcttccacttggggccccttctccattacagcctgctacaggcgatgtcgcttccgattcttataacaacgtgttcagggacactgaggctcttagggagttgggagttactcattatcgtttttccatcagctgggctagggttttgcccaacggatctgctggggttcctaacagggaagggcttagatactatcgtagactcttggaacgcttgagggagctgggcgtgcagccagttgtgaccctttaccactgggatcttccccagagattacaggatgcttacggcggatgggctaatagggccttggctgatcattttagggattacgcagagctttgttttcgtcattttggaggacaagtgaaatactggataacaattgacaatccttacgttgtcgcttggcacggatacgccactggaagactcgcccctggcattcgaggaagcccccgattgggttatcttgtagcccacaacttactgttggctcacgctaaagtctggcacctgtacaatacctccttccgtcctacacaaggggggcaagtatcaatagccctttcaagccattggataaatcctcgaagaatgactgatcactctattaaagagtgccagaagagcttggatttcgttttggggtggtttgctaaacctgtatttatcgatggcgattaccccgagtccatgaagaataatctcagttccatactcccggactttacagagtctgagaagaaatttattaagggaacggcagacttctttgctctgtgttttggtcctacactctcgtttcagctgctcgatcctcatatgaagtttaggcagttggagtcaccaaatctccggcagttattatcctggatcgatcttgagtttaaccatccccagatatttattgttgagaacggttggtttgtctctggtacaacaaagcgtgacgacgccaagtatatgtactacctcaagaaatttattatggagaccctgaaggctatcaagcttgatggtgtggatgttatcggctacactgcgtggtctcttatggatggcttcgagtggcataggggctattcgattcggcggggtctcttctacgtcgattttctttctcaggataagatgctactcccaaagtcatctgccttgttctatcagaagcttatcgagaagaacggcttccctcccctacctgaaaatcaaccacttgaggggacttttccatgcgatttcgcatggggtgttgtggacaactatattcaagttgatacaactttgtcacagtttactgacctcaacgtttatttgtgggatgtgcatcattccaagcgcctcattaaggtggatggtgttgtgactaaaaagcgtaagagttactgcgtagacttcgctgcaattcaacctcagattgcgctcctgcaggagatgcacgtcacacactttaggttttctcttgattgggctctcattttgccacttggaaatcagtctcaagtcaaccacactattctgcagtactataggtgtatggcaagtgaactcgtcagggtgaacattacgccagttgttgcattatggcagcccatggctcctaaccagggtctgcccagattgcttgctaggcaaggagcttgggaaaacccatacactgctttggcattcgccgaatatgctagattgtgcttccaagagcttggacatcatgttaaattgtggataaccatgaatgagccctatactaggaatatgacatattcagctggccataatcttttaaaagcacatgccctggcttggcacgtttataatgaaaaattcagacacgctcaaaatggaaagatttcaatcgctcttcaggctgactggattgaaccggcttgtcccttttcacaaaaggataaggaggtggctgaacgtgttttggaatttgatatcggatggttggcggaacctatctttggaagtggcgattacccgtgggttatgcgggactggctgaatcaacgtaacaacttcttgctaccatactttaccgaagatgagaaaaagcttatccaaggaacctttgacttcttggcactttcacattataccacgatccttgttgattccgaaaaggaagatcctatcaaatataacgactatttggaggttcaggagatgacggatattacatggttgaattccccaagccaagtggcagtggtgccatgggggttacgaaaagtgctcaattggctgaagtttaagtacggtgacctacccatgtacataattagcaatgggatagatgatgggttgcatgccgaagacgaccaactcagggtttattatatgcaaaattatattaacgaagctttgaaggctcatatccttgatgggattaatttgtgtggatacttcgcatattcctttaatgataggactgcacctcgttttggcctgtaccgttacgcagcggatcaattcgaacccaaggctagtatgaagcattacaggaaaatcatagattccaacggttttccgggacctgaaacattagaaaggttctgcccagaggaatttaccgtatgcaccgaatgcagtttttttcacacccgaaagagcctccttgctttcattgccttcttgttcttcgcttcgatcatctcactaagtcttatattttattatagtaagaagggtaggagatcgtacaag

SEQ ID NO: 15015 - DNA, 3036 bp, synthetic construct; identical to SEQ ID NO: 15014
  misc_feature 1..3036: note = source = /note="Description of Artificial Sequence: Synthetic coding sequence"
  source 1..3036: mol_type = other DNA

SEQ ID NO: 15016 - DNA, 3036 bp, synthetic construct
  misc_feature 1..3036: note = source = /note="Description of Artificial Sequence: Synthetic coding sequence"
  source 1..3036: mol_type = other DNA
atgcctgcatccgcccctcccagaaggccaaggcctccaccaccatccctgagccttctgctcgtccttctgggactgggcggacgccggctgcgcgccgagccaggcgatggagcacaaacttgggccagattttcgaggccccctgcaccggaagctgcgggtttgttccaaggtacgttcccagacggatttctgtgggcagtgggatcggcagcctaccagaccgaagggggatggcaacagcacggaaagggtgcttcgatctgggacacgttcacccatcaccctttggcacctcctggggattccagaaatgcatcacttccactcggcgcgccctcgcctctccaacccgcaacgggagatgtggcatccgattcatacaacaacgtatttagagataccgaggcattgcgagagcttggcgtgactcattaccgcttctcgattagctgggcgagagttctcccaaatggaagcgcaggcgtgcctaaccgtgagggactgcggtactatcgaaggctcttggaacgactcagagagctgggcgtgcaaccggtcgtcactctttaccattgggatctgccgcagagactgcaagacgcgtacggagggtgggcaaaccgggcactggccgatcactttagggattacgctgaactttgttttcgacatttcggagggcaggtgaaatactggattaccattgataacccttacgtggtggcgtggcacggttacgcaaccggtaggctggcccctggtattcggggaagccctaggctggggtacctggtcgctcataacttgcttcttgctcatgctaaggtctggcatctctacaataccagttttagacctactcaagggggtcaagtgtcaattgcattgtcgtcacattggattaacccacggcgaatgaccgaccacagcattaaggagtgccagaagtcgcttgatttcgtgctcggatggttcgcaaaaccggtctttatagatggcgactaccctgaatcaatgaagaataacctgagctctattcttcctgactttaccgaatcagagaagaagttcattaaaggcactgccgacttttttgcgctgtgtttcggacccacccttagctttcaactcttggatccgcatatgaagtttcgacaacttgaatctcctaacctgaggcaactgcttagctggattgatcttgaattcaaccaccctcaaatctttattgtcgaaaacggatggttcgtgagcgggaccacgaagcgagacgatgccaagtacatgtattatcttaagaaattcattatggagactctgaaggcgatcaaactggatggagtcgatgtgattggatacactgcgtggtccctcatggacggtttcgaatggcacagaggttacagcataagacgggggctcttttatgtcgactttttgtcgcaagacaagatgctgcttccaaaaagctcggcactgttttaccagaagctgattgaaaagaacggtttccctccacttccagaaaaccaaccactggagggcacgtttccatgcgactttgcatggggagtggtcgataactatatacaagtcgacacgactctttcccagtttaccgacctgaacgtctacctgtgggacgttcaccactccaagcggctgattaaggtggatggggtcgtcactaagaaacggaagtcgtactgcgtggattttgccgcaattcaaccacaaattgcccttttgcaggagatgcatgtgacccattttcgcttctccctggattgggcactgattctgccactgggaaatcagtcgcaagtgaaccataccatcctccaatactaccgctgtatggcgtcggaattggtcagagttaacatcacccccgtcgtcgccttgtggcaacccatggcaccgaatcaagggcttcctcgtctgttggcgcgccagggagcctgggaaaacccatacaccgcacttgcttttgcggagtacgcacgcttgtgcttccaagaactgggacatcacgtgaagctgtggatcactatgaacgaaccatatacccgcaacatgacttactctgcaggtcataatcttctgaaggcacatgcacttgcatggcatgtctacaacgaaaagtttagacacgcacagaatggaaagatatcgattgccctgcaagctgattggattgaacccgcatgtccgtttagccagaaggataaggaagtggccgagagagtgcttgaatttgatataggttggctggcagaaccgatttttggatccggtgattacccgtgggtgatgagagactggctgaaccaaaggaataacttcctgctgccctactttactgaggacgagaaaaaacttatccagggtacttttgattttctcgctctttcccattataccaccattctggtggactcagagaaagaggaccccattaagtacaacgattaccttgaagtccaggagatgaccgatataacgtggttgaactccccttcccaggtcgcagtcgtgccttgggggctgcgtaaggtgctgaactggctgaagtttaagtacggtgatctgcctatgtacattatctcgaacggtatcgatgacgggctccacgcagaagatgatcaactccgagtgtactatatgcagaactacataaacgaagcactgaaagcacatatactggatgggataaatctgtgtgggtactttgcctactcgttcaacgaccggaccgcaccgcgctttggcctttacagatacgcagcagaccagtttgaacccaaagcgtcgatgaagcattaccgaaaaatcatagattcaaatggctttccgggacctgaaacgctggagcggttttgtccagaagaattcaccgtgtgtaccgagtgcagcttttttcatactcgcaagtcgcttctggcctttattgctttccttttctttgcatcaattatcagtctttcactgatcttttactactcgaaaaagggtaggcgatcctacaag

SEQ ID NO: 15017 - DNA, 3036 bp, synthetic construct; identical to SEQ ID NO: 15016
  misc_feature 1..3036: note = source = /note="Description of Artificial Sequence: Synthetic coding sequence"
  source 1..3036: mol_type = other DNA

SEQ ID NO: 15018 - DNA, 3036 bp, synthetic construct
  misc_feature 1..3036: note = source = /note="Description of Artificial Sequence: Synthetic coding sequence"
  source 1..3036: mol_type = other DNA
atgcccgcatcggcgccgcctcggcgccctagacccccccccccgtctctctcactgcttctcgttcttttgggcttgggcgggcgccgactccgtgctgaaccgggcgacggcgcacagacctgggctcggttctcccgccccccggcacctgaggccgcgggattgttccaggggacattcccggatggcttcttgtgggccgtggggtctgcggcctatcaaaccgagggtggctggcagcaacacggcaagggcgcctctatctgggatacattcacccaccatcccctcgcccctcccggcgactcccggaatgcctcgctcccccttggcgcgccttcacccctccagcccgccaccggtgatgttgcttctgactcctacaacaatgtttttcgggacaccgaggcgctccgcgagctcggcgtgacccattatcgtttctctattagttgggcccgcgtcctgcccaacggttctgcgggtgtgccgaaccgagaaggactgagatattatcgtcgactgcttgagcgactacgcgagttgggtgttcagcccgtggttaccttgtaccactgggacctgccccaacgacttcaagacgcttatggaggttgggcgaatcgtgccctagctgatcatttccgcgattatgccgaactttgtttccgccacttcggcggccaggtcaagtattggatcacaatcgacaacccctacgtggtcgcgtggcacggctacgcgaccggtcgcctggcgcctggtatccggggaagtccacgactgggctacctagtcgcccataatcttttgctcgcccatgctaaggtttggcacctgtacaacacctctttccgcccaactcagggcggtcaagtgtccattgcgttgtcgagccactggattaacccccgtagaatgactgatcactctatcaaggagtgccagaagtcgctcgatttcgttctgggttggttcgcaaaacctgtcttcatcgacggagactaccccgaaagtatgaagaacaacttgtcgtccatcctgcctgacttcaccgagtcggagaagaagttcatcaagggaacagccgatttctttgccctgtgctttggccccactttaagcttccagctgttggaccctcatatgaagttccgtcaactggagagccccaaccttcgccagttactgtcctggatcgatctggagttcaaccacccacagatcttcattgtggagaatggttggttcgtgtcaggtaccaccaagcgggatgacgccaagtacatgtactatctcaagaagttcatcatggagaccctcaaggccatcaagcttgacggtgtggacgtgattggttacaccgcgtggagcctgatggacggcttcgagtggcatcggggctacagtatccgccgcggcctgttctatgttgatttccttagtcaggacaagatgctgctgcccaagtcctccgccctgttctaccagaagctgatcgagaaaaacggctttcccccgctcccggagaaccaacctctagagggcaccttcccctgcgacttcgcctggggcgtggtggacaactacattcaggtcgacacaaccctgagccagttcaccgatctcaacgtgtatctctgggatgtgcaccattctaagcgtctgatcaaagtggacggcgtggtgacgaagaagcgtaagtcgtactgtgtagacttcgccgccatccagcctcagattgcccttcttcaagagatgcacgttacgcacttccgcttctccctcgattgggctctcatcttgcccttaggtaatcagagccaggtgaaccataccattttgcagtattaccgctgcatggcttctgaactggtccgcgtgaatatcacccccgtcgtagccctgtggcagcctatggctcccaaccaggggttgcctagactccttgcgcgccagggcgcttgggagaacccctacaccgctctggctttcgcggagtacgctaggttgtgcttccaggagctgggccatcacgttaagctgtggatcaccatgaacgagccgtacactaggaacatgacctactccgctgggcataacctcctgaaggcgcacgcgctcgcttggcatgtttataacgaaaagtttcgtcacgcccagaacggtaagatttcgatcgcgctccaggccgattggatcgaacccgcatgcccgttctcccaaaaagataaggaggtcgctgaacgtgtccttgagttcgacataggttggctggccgaacccatcttcggtagcggtgactacccctgggtcatgcgcgattggttgaaccagcggaacaacttccttctcccctacttcactgaggacgagaagaagcttatccagggcactttcgacttcctcgccctcagtcattataccactatcctagtcgactcggagaaggaagatccgattaagtataacgactacctcgaggttcaggaaatgacggatattacgtggctcaactccccatcgcaagtggctgtagttccttggggcttgcgcaaggtcctcaattggctcaaattcaagtacggggatctcccaatgtatattatttcgaacggcatcgacgatggcctacacgccgaagacgaccaactccgtgtctactatatgcagaactacatcaacgaagctttgaaggcccacattctggatggaatcaacctctgcggttatttcgcctactcattcaacgacaggaccgccccacgtttcggtctgtatcgttacgcggctgatcagttcgaacctaaggcatctatgaagcactaccgcaaaatcattgactctaacggtttcccgggcccggagaccttggagcgcttctgcccggaggaatttaccgtgtgcaccgagtgctccttcttccacacgcgaaagagcctgctggcattcattgccttcctcttcttcgccagtatcatcagcttgtccctgatcttctactatagcaagaagggccgccgttcttataag

SEQ ID NO: 15019 - DNA, 3036 bp, synthetic construct; identical to SEQ ID NO: 15018
  misc_feature 1..3036: note = source = /note="Description of Artificial Sequence: Synthetic coding sequence"
  source 1..3036: mol_type = other DNA

SEQ ID NO: 15020 - DNA, 3036 bp, synthetic construct
  misc_feature 1..3036: note = source = /note="Description of Artificial Sequence: Synthetic coding sequence"
  source 1..3036: mol_type = other DNA
atgcctgcctcagctcctccaagacggcctcgacccccacctccctctctgtccttgctccttgtacttcttgggctcggaggacgccgactcagagctgaacccggagacggggcacagacatgggcgcggttttctagaccaccagctcctgaagctgctggattgttccaggggacatttcctgatggatttctttgggctgtgggatctgccgcatatcagacagaaggagggtggcagcaacacggaaagggagcttctatctgggacactttcacacatcatccactagctcctcctggggattcaaggaacgccagtctccctttgggggctcccagtcctctgcagcctgccactggggacgtggcttcagactcatataataatgtgttccgggatacagaggccctcagggaactcggagtaacacattacagattctcaatatcctgggctcgggtccttccaaacggatctgcaggggtgcccaatagagaaggacttcgctattatcgacgactcctcgagaggttacgggaactcggggtgcagcctgttgttacactttaccattgggatctaccccagaggctgcaggatgcgtatgggggatgggccaatagggccctagccgatcactttagagattacgccgagctttgtttcaggcactttgggggacaggtgaaatactggatcactatcgataacccttatgtggtagcctggcacggatatgccacagggaggctcgcccccggaatccgggggtctccacggcttggatatctagttgcccataatctcctgttagcccatgccaaagtgtggcatctttataatacatcattccggccaacacaaggagggcaggtgtctattgctctcagttctcattggatcaatcccaggcggatgactgatcactctataaaagaatgtcagaaatcactcgactttgtgctgggatggtttgcaaaacctgtgttcatcgatggagattacccagagagtatgaaaaacaacctttcatcaatactacctgatttcacagaatctgagaaaaaatttattaaagggacagctgatttctttgccttatgctttggacctacactctcctttcagcttctggacccccacatgaaattccggcagcttgagagtcccaacctcagacagctgttatcttggattgatcttgaattcaaccacccccagatattcatagtggaaaatggatggtttgtctctgggacaacaaaacgggatgatgcaaaatatatgtattatctcaaaaaattcatcatggaaacattgaaggccattaaattagatggggtagatgtcattgggtatactgcctggtcactcatggatgggttcgaatggcataggggatactctattaggcgcgggctattttatgtcgacttcttgtcccaggataaaatgctcctaccaaaatctagtgcccttttttatcagaaactgatcgaaaagaatgggttcccacctctccctgaaaatcagccactagagggaacattcccttgtgattttgcttggggggtcgttgataactatatacaggtggatactacgctctctcagttcactgatttgaatgtgtatctctgggatgttcaccatagtaagagattaatcaaagtcgatggggtggttacaaaaaaaagaaagtcctattgcgttgatttcgcagccatccagccccagattgccttgttgcaggaaatgcacgtgacacactttcgattttcactggattgggccttaatactaccattgggaaatcagagtcaggtgaaccacacgatactgcagtattacaggtgcatggcttcagaactggtgagagtgaacataacacctgtcgtggcgctgtggcagcccatggcacctaaccagggactcccgcgccttctcgcccgacagggagcatgggagaacccctatactgcactggcatttgcagagtatgccagactgtgtttccaggaactcggacatcatgtgaaactttggatcacaatgaacgaaccttatactaggaacatgacttatagtgctggacacaacctactgaaggctcacgcacttgcttggcacgtatataatgaaaagtttagacacgcccagaatgggaaaatatctatcgctctccaggccgattggatagaacctgcctgtcctttcagtcaaaaagacaaagaagtggccgaaagggtgctggaattcgatataggatggctcgctgaaccaatcttcgggagtggggattacccttgggtaatgagggattggctaaaccagcgtaacaattttctcctgccatattttactgaagacgaaaaaaaactgatccagggaacttttgattttctcgctctgtcccattacacaactatattagtcgatagtgagaaagaggacccgataaaatacaatgactaccttgaagtacaagaaatgacagatatcacatggcttaactctccttctcaggtcgcagttgtaccctgggggctgcggaaagttctcaactggttaaaatttaaatacggagacctgcccatgtatataatttcgaacgggattgatgatgggctacatgctgaggatgatcagctacgcgtgtattatatgcagaattatattaacgaggcattaaaagcccatatacttgatggaattaacttgtgcgggtatttcgcctactcatttaacgatcggacggctccacgcttcggactgtatcgctatgccgcagatcagtttgaacccaaggcctcaatgaaacactatagaaaaataattgattcaaacggatttccaggacccgaaactttagagagattttgtcccgaagagtttactgtctgtacagaatgcagtttttttcatactaggaaatcactccttgcatttatagccttcctattcttcgcttctatcatctctttgtcccttatcttctactactccaaaaaaggaagacgatcatacaaa

SEQ ID NO: 15021 - DNA, 3036 bp, synthetic construct; identical to SEQ ID NO: 15020
  misc_feature 1..3036: note = source = /note="Description of Artificial Sequence: Synthetic coding sequence"
  source 1..3036: mol_type = other DNA

SEQ ID NO: 15022 - DNA, 3036 bp, synthetic construct
  misc_feature 1..3036: note = source = /note="Description of Artificial Sequence: Synthetic coding sequence"
  source 1..3036: mol_type = other DNA
atgccagcatctgcaccacctcggcggccccgaccgcctcccccgtctctgtccctgctactcgtcctcttaggtcttggcgggcgtcgcctcagagcagagcctggagacggcgcacagacctgggcaagattctctcggccgccagcacccgaggccgctgggctgtttcaaggaaccttcccagatggctttctttgggcggttggtagcgctgcatatcagacagaaggcggctggcagcaacacggtaagggagcctccatttgggacacattcactcatcatcccttagcccctccaggcgattctcggaatgcctctttgccccttggcgccccgagcccactgcagcccgcaaccggggatgtggcctctgatagctataataacgtctttcgggacacagaggcactgcgggaactcggtgtcacacactatagattttctatatcctgggctcgggtgttgcccaatggaagtgccggcgtgccgaacagggagggcttaagatattaccggcggttactggagcgactgagagagctgggggtccagccagtggttactttatatcattgggatctgccccagaggctgcaggacgcctatggtggctgggctaatcgggcacttgcagaccatttcagagactacgctgagctgtgttttcggcactttggcgggcaggttaagtactggataaccatcgacaatccatatgttgtggcttggcatggatatgccaccgggcgtctcgcgccgggtattcgggggtcccctagactgggctacctcgtggcccacaacctattactggcccatgctaaggtctggcacctttataacactagctttagacctacccaagggggtcaggtgtctatcgcactgagcagccactggattaatccaaggagaatgacagaccactccatcaaagagtgtcagaagtctctggatttcgtgctaggctggtttgctaagccagtcttcatcgacggagactacccagaaagtatgaagaacaacctgtcctcgattttacccgactttactgagtctgagaaaaagttcattaaagggactgctgatttctttgccctatgctttgggcctacgctgtccttccagcttttggatccccatatgaagttccggcagttggagtcacctaacctcaggcagttactaagctggatcgatctcgaattcaatcatccccagattttcatcgtagagaacggctggttcgtctcagggacaactaagcgtgacgacgccaaatatatgtattatctgaaaaagttcatcatggaaaccctgaaagccattaaactagacggcgtggacgtaattggttacaccgcctggtccctcatggacggattcgaatggcacaggggctattcaataagacgggggctgttttacgtcgactttctatctcaggataagatgctcctccctaagagcagtgccttgttctatcagaaactcatcgagaagaacgggtttcccccactgcccgaaaatcagcccctggaaggtactttcccttgcgactttgcatggggcgtggtcgacaactatatacaggtcgacacgaccctgtcgcaattcacagatttgaacgtttacctctgggacgtccaccacagcaagcggttgatcaaagtggacggggtggtaaccaagaaaaggaaaagctactgtgtcgatttcgcagccattcagcctcaaatagctctgctgcaggaaatgcacgtgacacactttcgattttctttagactgggctctgattctacctcttggtaatcagagccaggtgaatcacaccatcttgcagtattaccgatgtatggcctccgaactggtcagggtgaacataactccagtcgtggccttgtggcagccaatggcccccaatcagggactacctcgtctcttggctagacagggagcctgggagaatccgtatactgccctcgcctttgctgaatatgctcggttatgttttcaggaactgggacaccatgtgaaattgtggattaccatgaacgaaccttatacgcgcaacatgacgtattctgcgggacacaacttgcttaaggcacacgccctggcatggcacgtgtataacgaaaaatttaggcacgcccaaaatggaaaaattagcattgctttgcaggctgattggattgaaccagcatgccctttctcacaaaaggataaagaagtggctgaaagggtactcgagttcgacattgggtggctggctgaacccattttcgggtctggcgattacccatgggtgatgcgcgactggctgaaccaacggaataactttctgctgccatactttacagaagatgagaagaagctcatccagggtacatttgatttcctggcacttagtcactacaccacaatactggtcgacagcgagaaagaggaccccattaaatacaacgactatctcgaggtccaggaaatgacagacatcacatggctcaactctccaagtcaggtcgcggttgtaccctgggggcttcgtaaggtattgaactggctgaagttcaaatatggtgatctgccaatgtacatcattagtaatggaatcgacgatgggttgcacgccgaggacgaccaactccgggtttactacatgcagaactatataaacgaagccctgaaggcacacattctagatggcattaacctgtgcggatatttcgcgtactcttttaacgacagaaccgcaccaagatttggactgtacagatacgcagctgaccagtttgaacctaaggcctccatgaagcattatcgcaagataatagactccaatggttttccaggaccggagacgctggaacggttttgccctgaggagttcactgtttgtaccgaatgcagcttttttcacactcggaagtctcttctggccttcatcgcattcctcttcttcgcgtccattatatccttaagcctcatattctattattcgaaaaaaggccgcagaagctacaaa

SEQ ID NO: 15023 - DNA, 3036 bp, synthetic construct; identical to SEQ ID NO: 15022
  misc_feature 1..3036: note = source = /note="Description of Artificial Sequence: Synthetic coding sequence"
  source 1..3036: mol_type = other DNA

SEQ ID NO: 15024 - DNA, 3036 bp, synthetic construct
  misc_feature 1..3036: note = source = /note="Description of Artificial Sequence: Synthetic coding sequence"
  source 1..3036: mol_type = other DNA
atgcccgcatcagcacctccacgtagacccaggcctccaccaccaagcctgtcactccttctggtcttgctgggactgggcggtcggcggctgcgtgcagaacctggtgacggtgcacagacctgggcaaggttttcgcgtcccccagccccggaagccgccggactgttccaaggtacctttccggacggatttctctgggcagtcggcagcgcagcgtaccagactgaaggaggatggcagcaacatggtaagggcgcatctatttgggatacctttactcatcacccactcgcccctcccggcgacagccgaaatgcgtcccttcctctgggcgcaccttctccacttcagcccgcaaccggagatgtcgcgtccgattcctacaacaacgtgttcagggataccgaagcactgcgggaactgggagtgactcattacaggttttcgatctcctgggcacgcgtgctccctaacggaagcgccggcgtgccgaaccgggaagggctgcgttactaccgcagacttttggagaggcttcgcgaacttggcgtgcaacccgtggtgaccctttaccattgggacctgccccaaaggctgcaagacgcttacggaggatgggctaatcgagccttggccgatcatttcagagattatgcggaactttgttttagacatttcggtggacaggtcaagtactggattactattgacaacccttacgtggtcgcatggcatggatacgcaactggcaggcttgccccgggcatcaggggatcacctaggctgggttaccttgtcgctcataacctgcttcttgcacatgccaaagtgtggcatctgtataacacgtcattcagaccaacccagggaggtcaagttagcattgctctttcgtcgcattggattaatcctaggcggatgactgaccatagcataaaggagtgtcaaaagtccttggattttgtccttggttggtttgcaaaacctgtgttcatagatggagattaccctgaatccatgaagaacaatctgtcgtccatactccctgactttaccgaatcagaaaagaagtttatcaaaggtactgccgatttcttcgctctgtgtttcggtcctactctctcctttcaacttctggatcctcacatgaaattccgtcagcttgaatcgccaaacctgagacagctgctttcgtggattgatctggagtttaatcatccgcaaatcttcatagttgaaaacggatggttcgtctcggggactactaagagagacgacgccaagtacatgtattacctcaagaagttcatcatggaaactctcaaagcgataaaactcgatggagtggatgtgattgggtacactgcgtggtccctcatggatgggtttgaatggcatcgtggctacagcattcgaaggggactgttttacgtcgatttcctgtcccaggacaaaatgctgctccctaagtcctctgcactcttttaccagaagctgattgaaaagaacggatttcccccacttcccgaaaaccaacctcttgagggaacgtttccatgtgattttgcctggggcgtggtcgataactacattcaagttgacaccaccctgagccaatttaccgatctgaacgtgtatctctgggatgtgcatcacagcaaaagactgattaaggtggacggagtggtcaccaaaaagcgaaaaagctactgtgttgattttgcggcaatccaaccacagattgcactgcttcaggagatgcatgtgactcactttagattttcacttgattgggccctgatcctgcctcttggaaaccagtcgcaagtcaaccataccatcctgcagtactacagatgtatggcatcggaactcgtgagggtgaacatcactcctgtggtggcactctggcagccaatggccccgaaccaagggcttccgcggctgctggcaagacaaggagcgtgggagaatccctacaccgcgctggcttttgcagaatacgctcgactttgcttccaagagcttggacaccatgtgaagctgtggataactatgaatgagccttacaccaggaacatgacctactcagcaggccacaaccttcttaaggcgcatgcactggcctggcacgtctacaacgaaaagttccgtcacgcacaaaacggtaagatctcgatcgcgctccaggcagactggatcgagccggcatgccctttttcgcagaaggataaggaagttgcagaacgggtccttgagtttgatattggatggcttgcagagcccatttttggatcaggtgactacccttgggtcatgcgcgattggttgaatcaaagaaacaatttcctgctcccttacttcacggaggacgaaaagaagctgatccagggcacctttgactttctcgcactctcgcactatacgaccatcctggtcgattccgagaaagaggaccctattaagtataatgattatctggaggttcaggagatgaccgatatcacttggcttaatagcccctcacaagtcgcagtggtgccgtgggggctgagaaaggtgcttaattggctcaagtttaagtacggcgatcttcccatgtacatcatttctaacgggatagatgacggactgcatgcagaagatgatcaactgagagtgtactacatgcagaactacattaatgaggctctcaaggcccatatactggatgggatcaatctctgtggttactttgcgtactcctttaatgatagaaccgcaccaaggtttggtctgtacagatacgcggccgatcaatttgaacccaaagctagcatgaagcactaccggaagattattgactctaacgggttccccgggcccgaaactcttgagcggttctgcccggaggaatttacggtgtgcaccgaatgttccttttttcacacccgcaaatcgctcttggcattcatcgcatttctgttcttcgcatcgatcatttcccttagcctgatattctactacagcaagaagggaagaagatcatacaaa

SEQ ID NO: 15025 - DNA, 3036 bp, synthetic construct; identical to SEQ ID NO: 15024
  misc_feature 1..3036: note = source = /note="Description of Artificial Sequence: Synthetic coding sequence"
  source 1..3036: mol_type = other DNA

SEQ ID NO: 15026 - DNA, 3036 bp, synthetic construct
  misc_feature 1..3036: note = source = /note="Description of Artificial Sequence: Synthetic coding sequence"
  source 1..3036: mol_type = other DNA
atgccagcatcggcaccacctaggcgaccgcgacccccaccgccctccctctcgcttcttttggtgcttcttggactgggtggtcgcagacttcgcgcagaacctggggatggcgcacaaacctgggcccggttttccaggccccctgcaccagaagcagccgggctctttcaaggaacgtttcccgacggtttcctgtgggcagtgggttcagcagcgtaccagactgaaggtggatggcaacagcatggaaaaggagcatcaatctgggatacgttcacccatcatcctctcgctccccctggagatagcagaaacgcctccctcccactgggagcgccctcacccttgcagcctgctaccggagatgtggcctcagattcctacaataatgtgttccgggataccgaagcactcagagaacttggagtgactcattatcgtttttcgatttcgtgggcacgtgtactgcctaacggctcggccggcgtcccaaaccgagagggcttgagatactacaggcggctcctggaaaggctccgtgagctgggggtgcagccagtggtgactctgtaccattgggatcttcctcagcggctgcaggatgcttacggtggttgggccaaccgggcacttgcggatcactttagagattacgcagagctgtgttttcggcattttggcggtcaggtgaagtactggataaccattgacaacccatacgtcgtcgcatggcatggctacgccaccggaaggcttgccccaggaatccggggcagcccgaggcttggatacttggtcgcccataatctgctgctggctcatgcgaaggtgtggcatctctacaacacttccttccgcccgactcagggcgggcaggtgtcgattgcactctcctcgcattggattaacccccgaagaatgacggaccatagcataaaggagtgtcagaagagccttgattttgtcctgggctggtttgccaagcctgtctttattgacggggactacccagaaagcatgaagaacaatctttcgtccatcctcccagatttcaccgagagcgaaaagaagttcattaaagggaccgccgatttctttgccctctgtttcggaccaactttgagcttccagctgcttgacccacacatgaagtttaggcaactggaatcacctaacctccgacagcttctgagctggattgatctggagtttaatcatccccagatcttcattgtggagaatggttggtttgttagcggaaccactaagagagacgatgccaagtatatgtactaccttaagaagtttatcatggaaacgctgaaagcgattaagctcgatggagtcgatgttattggatatacggcatggtcccttatggacggattcgaatggcaccggggatattcgatacgccgtggactgttctatgtggatttcctttcccaagacaagatgctgctgccgaagtcctcggcactgttttaccaaaagttgattgagaaaaacggcttccctcctctccctgagaatcagccccttgaaggaaccttcccgtgcgactttgcctggggtgtcgtagacaactatattcaggtcgatacgactcttagccagtttaccgatctgaacgtctacctttgggacgtgcatcattcgaagcggttgataaaagtggacggagtcgtcaccaaaaagagaaaatcctactgtgtggactttgcggcaatccagcctcaaatagcactgctgcaagagatgcacgtgacgcactttcgattttccctggattgggcactcattctgccccttggaaatcagtcacaggtgaaccacactatccttcagtactaccgatgtatggcaagcgaacttgtgagagtcaacattactccagtcgtggcactgtggcaaccaatggcacctaatcaaggacttcctcgtctcttggcccgtcaaggcgcttgggagaacccttacactgcccttgcatttgcagaatacgccagactttgtttccaagagctcggacatcatgtgaaactttggatcactatgaacgagccttacacccggaatatgacctacagcgccggccacaatctgcttaaagcacatgctttggcgtggcacgtttacaacgaaaagttccgtcatgcacaaaacggcaagatctccatcgcactgcaggccgattggattgagcctgcatgtcctttttcgcagaaagataaggaagtggccgaacgcgtcctggaatttgatatagggtggctcgcagaacctatattcggttcgggtgactacccttgggtgatgagagactggctgaaccaacgaaacaattttctgctcccttactttaccgaggacgagaagaagttgatacaaggaacttttgatttcctcgcgctctcacactacactaccattcttgtggatagcgaaaaggaggacccaattaagtacaatgactacctcgaagtgcaagaaatgaccgatataacgtggctcaactcgccttcacaagtggcagtggtgccgtgggggcttcggaaagtcctgaattggctgaagtttaagtacggtgatcttccaatgtacataatctccaatggcatagacgatggattgcatgcagaagatgaccagctgcgagtgtactacatgcaaaactacattaacgaagccctgaaggcacacatcctggatggtataaacctgtgcggatactttgcatacagctttaacgatagaaccgctcctagatttggactttacaggtacgcagcagatcaatttgaacctaaggcaagcatgaagcattacaggaagattattgattcaaacggatttcccgggccggaaacccttgaaaggttttgccctgaggaatttaccgtgtgcacggagtgttcgttcttccacactaggaagagccttcttgcatttatcgcattccttttctttgcctcgattatcagcctgagcctcatcttttactatagcaaaaaaggaaggcggagctacaaa

SEQ ID NO: 15027 - DNA, 3036 bp, synthetic construct; identical to SEQ ID NO: 15026
  misc_feature 1..3036: note = source = /note="Description of Artificial Sequence: Synthetic coding sequence"
  source 1..3036: mol_type = other DNA

SEQ ID NO: 15028 - DNA, 3036 bp, synthetic construct
  misc_feature 1..3036: note = source = /note="Description of Artificial Sequence: Synthetic coding sequence"
  source 1..3036: mol_type = other DNA
atgccagcctcggcgccaccgaggcgaccgcggcctccaccgccgagcctgtccctgcttctcgttctcctcggcttgggagggcgccgcctgcgcgccgagcctggagacggtgcccagacctgggcccggttctcccgtccgcccgcgccggaagccgcaggactgtttcagggcacttttcccgacggatttttgtgggctgtcgggtctgccgcatatcagactgaggggggttggcaacaacacggaaagggtgcatcgatctgggacacctttacccaccacccccttgcgcctccaggagactcaagaaacgcgtccctcccgctgggcgctccgtcgccgcttcagcctgcgaccggggatgttgcctccgattcatacaacaacgtgtttcgcgacaccgaagcgctgcgcgaactcggtgtcactcattatcgcttttccatctcctgggccagggtgctcccaaacggctcagccggagtcccgaatcgggaaggactcagatactaccgcaggctgctggaaagactgcgcgaactgggcgtgcaaccggtggttaccctctaccattgggatctccctcagcggctgcaggatgcgtacggagggtgggctaaccgggccctggcggaccatttcagagattacgccgagctgtgctttcggcattttggtggccaggtgaaatactggattactatcgataacccgtacgtcgtggcctggcacggctacgcgaccggtagactggccccgggaatcagagggtcgcccagactgggatacctggtggcccataacctgctcctcgcccatgccaaagtgtggcatttgtacaacaccagcttccggccaactcaagggggccaggtgtccatcgcgctgtcctcacattggatcaacccacggagaatgactgaccactcgatcaaggagtgccaaaagagcctggacttcgtccttggttggttcgccaagccggtgttcatcgacggagattacccggagtcaatgaagaataatctctcctcaatcctgccagacttcaccgagtccgaaaagaagttcatcaagggcactgccgatttctttgcactgtgcttcggccctacgctgtcgtttcagctcctggatccgcacatgaagttccgccagttggagagccctaatctcaggcagctcctctcctggatcgacctggagttcaatcacccgcagattttcattgtggagaatggctggtttgtgtcaggaaccactaagcgcgatgatgcgaagtatatgtattacctcaagaaattcattatggaaaccctcaaggcgatcaagctggacggagtggacgtgatcggctacacggcgtggagcttgatggatgggtttgagtggcaccggggatactcgattagacggggtctgttctacgtggacttcctctcacaagacaagatgctgctcccgaagagctccgctctcttctaccagaagctcatcgaaaagaacggctttccgccgctcccggagaatcagccacttgaaggaaccttcccgtgcgacttcgcttggggagtggtggacaattacatccaggtggacaccaccctgtcccagtttacggacctgaatgtctacctgtgggacgtgcatcattcgaaacgcctcataaaagtcgacggcgtcgtgactaagaagcggaagtcctactgcgtcgacttcgcggcgatacagccgcagatcgcgctgctgcaggaaatgcacgtcacccattttcgcttttcactggactgggcgctcatcctgcctttgggaaaccaatcgcaagttaatcatactatcctgcagtattaccgctgcatggcctccgaactggtgcgggtgaatatcaccccggtcgttgccctctggcaacctatggctccaaaccagggactccctcgactcctggcgcggcaaggagcgtgggaaaatccatacactgccttggctttcgccgaatatgcccggctgtgctttcaagagctcggccaccacgtcaaactctggatcactatgaacgaaccgtacaccaggaacatgacctactcggcaggccacaacctgcttaaagcccacgcccttgcgtggcatgtgtacaatgagaaattcaggcatgcccagaacggaaaaatctcaatcgcgctgcaggccgactggatcgaacctgcctgccccttctcacagaaggacaaggaagtggccgagagagtcctggaattcgatatcggatggctggccgagccgattttcgggagcggagactacccgtgggtgatgcgagactggctgaaccagcgaaacaatttcctcctcccgtacttcactgaagatgagaagaagctcatccaagggaccttcgatttccttgcattgtcccattacaccaccattctggtcgatagcgaaaaggaggacccaatcaagtataacgactacctcgaggtgcaggaaatgactgatatcacgtggttgaatagcccatcacaggtggcggttgtgccgtggggactgcgcaaggtgctcaactggctgaagttcaagtacggcgacctgccgatgtacattatctccaacgggattgacgacggactgcatgcggaggatgatcagctcagggtgtactacatgcagaactacatcaacgaagccctgaaggctcacatccttgatggcatcaacctgtgtggttacttcgcctactcattcaacgatcgcaccgctccacgcttcggactctaccggtacgcagccgaccagtttgagccgaaagccagcatgaagcactacagaaagatcatcgactccaacgggtttccgggtccagaaaccctcgaacgcttctgtccggaagagttcactgtttgcactgaatgctcgttctttcatacccggaaaagcctgctggcgttcatcgcattcttgttcttcgcctcaattatctcactctcgctcatcttctactactctaagaagggaagaaggtcatacaag

SEQ ID NO: 15029 - DNA, 3036 bp, synthetic construct; identical to SEQ ID NO: 15028
  misc_feature 1..3036: note = source = /note="Description of Artificial Sequence: Synthetic coding sequence"
  source 1..3036: mol_type = other DNA

SEQ ID NO: 15030 - DNA, 3036 bp, synthetic construct
  misc_feature 1..3036: note = source = /note="Description of Artificial Sequence: Synthetic coding sequence"
  source 1..3036: mol_type = other DNA
atgcccgcatccgctccccctagaaggcctcgcccaccgcctccttctctaagcctgcttttggtgctgcttgggcttggcggtagacgtctgagggccgaaccaggggacggcgcccaaacttgggccagatttagccgtccccctgccccagaggcagccggcctgtttcagggcacttttcccgacggctttttgtgggcagtcgggtccgcagcataccaaacggaagggggttggcaacagcacggcaagggagctagtatctgggataccttcactcatcaccccctggcacctccaggcgactcaaggaacgcctccctgcccctgggagctccatctccgctgcagcctgcaaccggcgacgtggccagcgacagctataacaatgtgtttagggacactgaagctttacgtgaactgggcgtgacgcactaccgattttcaatatcctgggcccgggtgctaccaaatggttccgccggcgtaccaaacagggaagggctacggtattacagacgtttgctggaaaggctgagggaactaggtgtgcaacccgttgtgacactataccattgggatctgccacagcggctgcaggacgcatatggaggatgggccaaccgagccctggctgaccatttcagggattacgctgaactgtgctttaggcattttggggggcaggtaaaatattggatcactatcgataatccctatgtcgtggcctggcacggatacgcgacggggcggcttgcccctggcatcaggggatctccccgactgggatatctggtcgctcataacctgctgctagcgcacgctaaggtttggcacttatataacaccagctttcgacccacccagggcgggcaggtgagtatcgcactgtcttctcattggatcaacccccgacggatgaccgatcatagcataaaagagtgccagaagagcctggactttgtgttgggctggtttgctaagccggtgtttatcgacggcgattaccccgagtctatgaagaataatctgagttccatcttaccagacttcactgagtcagagaagaagttcattaaaggtaccgctgattttttcgcactgtgctttggccccacactgtctttccagctgctcgaccctcatatgaaattcaggcagttagaatccccaaacctgcgccagttgctgtcctggatcgatctggagttcaatcatccccaaatttttattgtggaaaatggatggtttgtttcaggtacgactaaaagggacgacgctaagtatatgtactatttgaaaaaatttataatggaaacattgaaggcgattaagttagacggagttgatgtcatcgggtacacagcttggagcctcatggatggctttgaatggcataggggttactccattcgaagggggctgttctacgttgacttcctctcccaggacaagatgctcctccccaagtcaagcgccctcttttatcagaagctaatcgagaaaaatgggttcccacctttgcctgaaaaccagccgttggagggcacatttccctgcgacttcgcctggggggtggtggacaactatatccaggtggatacaaccctatctcaatttaccgacctgaacgtgtacctttgggacgtgcaccactccaaaagactcataaaggtggacggcgtcgtgactaaaaagcgtaagtcttattgcgtggatttcgccgcaatccaaccgcagattgcgttactgcaggaaatgcatgtgacccacttccgtttttcccttgattgggctctgattttacccctcggtaaccagtctcaggtgaaccacacaatattgcagtactaccggtgtatggcttctgaactggttagggtaaacatcacaccagtggtcgccctgtggcagcccatggcacccaatcagggactgccgagactgcttgccagacagggagcgtgggaaaacccctacaccgcactcgcatttgcagagtacgcaagactgtgtttccaagaactgggacatcatgtgaagttatggatcaccatgaatgagccttacactcgaaacatgacctattctgcaggacataatttattaaaggctcacgcgttggcgtggcacgtctataatgagaaatttagacacgcacaaaacggcaagataagtatcgcattgcaggctgattggatcgaacctgcctgccctttttctcaaaaagacaaggaagtcgcagagagagtgctcgagttcgacattggatggcttgcggaacccatcttcggtagtggcgactacccatgggtgatgagagactggttgaaccagcgaaacaattttctgctgccttatttcaccgaagatgaaaaaaagttgatccaaggcacgttcgacttcctggctctgtcccactatacgacaattctcgtggactctgaaaaagaagatccgattaagtacaatgattatttggaagtacaggaaatgacggacatcacgtggctcaacagtccatcgcaagttgctgtagtaccctggggcctgagaaaggtactcaactggctaaaattcaagtacggggacctgcctatgtacatcatttctaatggcattgacgatgggttacacgcggaggatgatcagctgagagtctattatatgcagaattacatcaatgaggcccttaaagcgcatattctagacgggattaatctgtgcggatacttcgcctattcttttaacgaccgaaccgccccgaggtttggtctctatcggtacgcggctgaccagttcgaaccaaaggcctccatgaagcattaccgcaagattattgattctaacggattccccgggccagaaaccttggagagattttgtcccgaagagttcacagtgtgcactgagtgctcttttttccacacacgcaaatccctgctggcctttatcgcatttctgttcttcgctagcattattagcttgagccttatcttttactatagtaaaaagggcaggagatcatataag

SEQ ID NO: 15031 - DNA, 3036 bp, synthetic construct; identical to SEQ ID NO: 15030
  misc_feature 1..3036: note = source = /note="Description of Artificial Sequence: Synthetic coding sequence"
  source 1..3036: mol_type = other DNA

SEQ ID NO: 15032 - DNA, 3036 bp, synthetic construct
  misc_feature 1..3036: note = source = /note="Description of Artificial Sequence: Synthetic coding sequence"
  source 1..3036: mol_type = other DNA
atgcctgcttcggcgccaccaagacggccgaggccaccgcctccttcgctgtcattgctcctcgtgcttctcggactgggcggacgacgcctgagagctgaacctggagacggagcccagacctgggcccgtttctcacgcccgccggcgccagaagccgccgggctcttccaagggacgttccctgacggattcctgtgggctgtgggttcggccgcgtaccaaaccgagggtggctggcaacagcacggaaaaggagcgagcatctgggatactttcactcaccaccctctggcaccaccaggcgactcccgcaacgcttcacttccgctcggcgcaccaagcccgctccaaccagcaaccggagacgtcgcgtccgactcctataacaacgtgttccgagatactgaggccctgcgggagctcggggtgacgcactacagattttcgatctcgtgggcacgggtgctgcctaatggatccgccggtgtgccaaaccgggagggactgcgctattaccgcagactcctggagcgcctgagagaactgggagtccagccagtggtcaccctgtatcattgggacctgccacagcgactgcaagatgcctacggaggttgggccaaccgggcactcgccgaccatttcagagactacgctgaactctgtttccggcacttcggaggacaggtgaaatactggattactatcgacaatccatacgtcgtggcttggcacggatatgccactggacgactggctcccggaatcaggggcagcccaagactgggatacctggtggctcacaacctcctgcttgcccacgcaaaggtgtggcacctgtacaacacttcatttaggcctacccaagggggacaggtgtcgatcgctctctcaagtcactggattaaccctaggagaatgactgaccattcaatcaaggaatgccagaaatccctggactttgttctgggctggttcgcgaaaccggtctttattgacggagactatccagagtccatgaagaacaacctgtcgagcatcctgccggacttcaccgaaagtgagaagaaattcatcaagggaaccgccgacttctttgcgctgtgcttcggaccaacgctctcattccagctgctggatccacatatgaagttccggcagctggaatccccgaacttgagacagctcctgagctggatcgatctggagttcaaccacccgcagattttcatcgtcgagaatggatggttcgtgtcgggaactaccaagagagatgatgccaaatacatgtactatcttaagaagtttatcatggagactcttaaggccattaaacttgacggcgtggacgtgatcggctacaccgcctggtcgctgatggacggattcgagtggcacagaggatactccatccgccgcggactgttctacgtggatttcctgtcacaggataagatgctgctgcctaagagctcggcactgttctaccagaaacttattgaaaagaatgggtttccgccactgccagagaaccaaccgcttgagggtacttttccttgtgactttgcctggggtgtggtcgacaactacatccaggtggatactaccctgtcacagtttaccgacctgaatgtctacctgtgggacgtgcatcacagcaagaggctcattaaagtggacggagtcgtgactaagaaacgcaagtcctactgcgttgacttcgctgccatccagcctcagatcgcccttttgcaggaaatgcacgtgacccatttcagattctccctggactgggccctcatcctcccactgggaaatcaatcccaggtgaaccacactatcctccaatactaccgctgcatggcttccgaactggtgcgcgtcaacattaccccggttgtcgcgctgtggcagccaatggccccaaaccagggcctgccgcgattgctggccagacagggggcctgggagaacccatacacggctctcgcgtttgcggaatacgcccggctgtgcttccaagaactgggacatcatgtcaagctgtggatcaccatgaatgaaccttacactcgcaacatgacttactcggcggggcacaatctcttgaaggcccatgccctggcttggcatgtctacaacgaaaagttccgccacgcacagaatggaaagatttccattgcactgcaagcggactggatcgaaccggcttgccctttttcacagaaggacaaggaggtggcggaacgcgtgctcgagttcgatatcggatggctggcagaaccgatctttggctccggcgattacccatgggtgatgcgggattggctgaatcagcggaataacttcctgctgccgtatttcaccgaggatgaaaagaagctgatccaaggtactttcgattttctggcgctcagccattacaccaccatcctggtggattccgagaaggaagatccgatcaagtacaatgattacctcgaagttcaagagatgactgacatcacttggctcaattccccctcccaagtggcagtggttccgtggggtctgcgcaaagtgctcaattggctgaagttcaaatacggggacttgccgatgtacatcatctccaacggcatcgatgatggactgcacgctgaagatgaccagctgcgcgtctattacatgcaaaactacatcaacgaagccctcaaggctcacatcctggacggaatcaatctctgcggatacttcgcttactcgttcaacgatcggactgcaccccggttcggcctctaccgctacgccgctgaccagttcgaaccgaaggcaagcatgaagcactaccgcaagataatcgactcgaacggattccctggaccggaaaccctcgaacgcttctgccctgaagagtttactgtgtgcactgagtgctccttttttcacaccaggaagtcgctccttgctttcatcgcattcttgtttttcgcatccatcatcagcctctcccttatcttttactacagcaaaaagggacggcggagctacaaa

SEQ ID NO: 15033 - DNA, 3036 bp, synthetic construct; identical to SEQ ID NO: 15032
  misc_feature 1..3036: note = source = /note="Description of Artificial Sequence: Synthetic coding sequence"
  source 1..3036: mol_type = other DNA

SEQ ID NO: 15034 - DNA, 3036 bp, synthetic construct
  misc_feature 1..3036: note = source = /note="Description of Artificial Sequence: Synthetic coding sequence"
  source 1..3036: mol_type = other DNA
atgcctgctagtgcaccgccacggcggccacggcccccccctccctccttatccttgctgctcgtcttgctcggattaggaggccggcgactgcgcgcagagcccggggatggcgctcaaacatgggctcgcttcagccggcccccagccccagaagccgcaggactgttccagggaaccttccccgacggcttcctctgggcagtgggaagcgcggcctaccaaaccgagggcggctggcagcagcacggcaagggtgcttctatttgggatacattcacacaccacccgctggcacccccaggtgatagtaggaatgcttctttgcctctgggcgccccatcacctctgcagcccgccacaggagacgtcgctagtgacagctataataacgtgttccgcgatacagaggcgctccgagaattgggagtgacccactatcgtttctcaatcagctgggcccgagtcctgccgaacgggagcgcaggggtgcccaatcgggaaggcctgcgttactatcgaaggctgctggagcgtttgcgggagctgggcgtccaacccgtcgtgacgttgtatcactgggacctgccacagcggctgcaggacgcctacggtggatgggcaaaccgtgctctggcggaccatttccgagattatgccgaactgtgttttcgccattttggcggacaggtcaagtattggatcactattgataatccctacgtcgtcgcttggcatggctacgccactggtcgtctagctcccggaatcaggggctccccccgcctggggtacctcgttgcccacaacctgctcctggcccacgcgaaagtctggcacttgtataatacttcctttcggccaacccagggcggacaggtctctatcgccctgagcagtcactggattaatccccgccggatgacagatcatagcattaaggaatgtcagaagagcctcgacttcgtattgggatggttcgccaagcccgtttttatagacggagactatccagagtctatgaaaaacaatctgtcctccatcctgccagatttcaccgagtctgagaaaaaattcattaagggaactgccgatttcttcgctttgtgtttcggtcctacattgtcctttcagctcctcgatcctcatatgaaatttagacagctggaaagtcccaatctccgtcagttgctttcatggattgatcttgaatttaaccacccacaaattttcatcgtggaaaatggctggttcgtcagcggcacgaccaaacgggatgatgctaagtacatgtattatcttaagaagttcattatggagacgttaaaggccatcaagctggacggcgtggatgttataggctatactgcatggagtctgatggatgggttcgagtggcacaggggctactctatacgccgtgggctattctatgtggacttccttagccaggataagatgctcctgccaaagtcgtctgctctcttttaccagaaactgatagaaaaaaacgggtttcctccattacctgaaaaccaacccctcgaaggcacctttccctgcgattttgcctggggtgtcgttgataattatatccaggtggataccactctgagccaatttacagatctcaatgtatatctttgggatgtgcaccacagtaaacgcctgatcaaagtggacggcgtcgtaaccaagaagaggaagtcttactgcgtggattttgccgccattcaaccccaaatcgcacttctccaggagatgcatgtaacgcacttcaggttctccctggactgggcgttaatcctcccgttggggaaccaatctcaggttaaccatactattcttcagtactatcgctgcatggccagtgagctagtgcgagtgaacattacacctgtggtggcactctggcagccgatggcaccgaaccaaggtctacctcgcctcctggctaggcaaggcgcgtgggaaaatccttacactgctctggctttcgccgagtatgccaggctttgttttcaagaactggggcaccacgtaaaactgtggatcacaatgaatgaaccctacactcggaatatgacctactccgcaggccacaacctactcaaagcgcatgcgctcgcctggcatgtttataatgagaaattccgtcacgcacagaacggcaaaatatccatcgcactccaggcggattggatcgagccagcctgcccgttcagtcagaaggacaaagaggtggcggagagagtcctggagtttgatatcgggtggctggcagaacccatctttggcagcggagactacccatgggtgatgagagactggctcaatcagaggaacaacttcctccttccctatttcaccgaagacgaaaagaaactgatacaaggtacatttgacttcttggccctgagccactacacaaccatcctggttgactctgaaaaagaggatcctatcaaatacaacgactacttggaggtacaggagatgacggatattacatggctcaactcgccctcacaggtggcagtggtgccttggggattgaggaaagtgttgaattggttaaaattcaaatacggggacttgcctatgtacataatttccaatggcattgacgatggactccatgccgaagacgaccagctcagagtgtattacatgcagaactacatcaacgaggcgctgaaagcacatattttggatgggataaatttgtgtgggtattttgcatattcctttaacgaccggacagcaccacgattcggattgtatcgctacgccgctgatcagttcgagcctaaggcttctatgaaacactacaggaaaattatagactctaatggtttcccaggcccagagacactggagcgtttctgtcctgaggagttcaccgtctgcacggaatgcagtttcttccacacgaggaagtcactcctggcgttcatagcttttctttttttcgcttctatcatctcactttccctaatcttttactacagtaagaaaggacggcgctcctataag

SEQ ID NO: 15035 - DNA, 3036 bp, synthetic construct; identical to SEQ ID NO: 15034
  misc_feature 1..3036: note = source = /note="Description of Artificial Sequence: Synthetic coding sequence"
  source 1..3036: mol_type = other DNA

SEQ ID NO: 15036 - DNA, 3036 bp, synthetic construct
  misc_feature 1..3036: note = source = /note="Description of Artificial Sequence: Synthetic coding sequence"
  source 1..3036: mol_type = other DNA
atgcctgcatcggcaccacctcgcagacctcggccgcctcctccctccctgagccttctccttgtgttgctcgggctgggtggccgtaggcttcgcgcggaaccaggagacggggcacaaacctgggcaagattttcgaggcccccggctccagaagccgccggactgttccagggtacttttcccgatggattcttgtgggcagtgggtagcgccgcataccaaaccgagggtggatggcagcaacatggcaagggagcaagcatttgggatacgtttacccatcaccccctcgcacctcctggcgactcgagaaacgcgtcgctcccattgggggccccttcaccactccaaccggccactggagatgtcgcctcagatagctacaataatgtgtttcgggataccgaagcactgagggagctgggagtgactcattaccgctttagcatttcatgggcaagagtgctcccgaatggctcggcaggagtgcccaacagagaaggtctgagatactaccggcgcctcctggaacgactccgcgagcttggggtccagcctgttgtgaccctttaccattgggacctgcctcagaggttgcaggacgcatacggaggatgggcgaaccgggcgctggcagatcatttccgggattatgccgagctttgcttcaggcatttcggagggcaggtcaagtactggattactatagataacccatacgtggtggcatggcatggatacgcaaccggaaggctcgcacctggaattagaggatcgcctcggcttggttaccttgtggcacacaacctgctgctggcccatgcaaaggtttggcacctgtacaatacctcgttccggcctactcaaggtggacaagtctcgattgcactgtccagccattggatcaacccaaggagaatgaccgaccactccattaaggaatgtcaaaagagcctcgactttgtgcttggctggttcgcaaaaccagtgttcatcgacggggactacccagaaagcatgaagaacaacctttcatccattcttccggattttactgaatcagaaaagaaattcatcaagggtactgcggacttctttgcactctgctttggcccaaccctgtcttttcaacttctcgacccacacatgaagtttagacaactcgagtcgcctaacctgagacagctgctgtcctggattgatcttgagttcaatcatccgcagatattcatcgttgaaaatggctggtttgtgtcaggcactactaagagagacgatgcgaagtatatgtattacttgaagaagtttatcatggaaacgcttaaagcaattaagctggacggcgtcgatgtgatcggttacactgcatggagcttgatggacggttttgaatggcaccggggctactccattcgtcgcggtctgttctacgtggattttctgagccaggacaaaatgctgcttcctaaatcatcggctctcttttaccaaaaacttatcgaaaagaatgggtttccgccattgccagagaatcagcctctggagggcacctttccttgcgacttcgcatggggggtggtcgacaattacatacaagtggataccaccctttcccaatttaccgatcttaacgtgtatctgtgggatgttcatcattcaaaacgtctcattaaagttgatggagttgtgactaagaaaagaaagagctactgtgtggactttgcagctattcaaccacaaattgctctcttgcaagaaatgcacgtgacgcatttccgcttctccctggattgggcactgattctgccgctgggaaatcagtcccaggtgaaccacactatcctgcagtactaccgctgcatggcatcggaactggtgcgcgtgaacattacgcctgttgtcgcactctggcaaccgatggctccaaaccagggtttgccccgacttcttgcaagacagggtgcttgggaaaacccatacacggcactcgcatttgcagaatacgcgagactgtgctttcaagagctggggcaccatgtcaagctgtggatcaccatgaacgaaccctacactcgcaacatgacctactccgccggacataaccttctgaaggcacacgcccttgcatggcatgtgtacaacgaaaagtttaggcacgcccaaaacggaaagatttccattgcacttcaagctgactggattgaacctgcatgtcctttttcacagaaggataaagaggtcgcggagcgcgtgctggagtttgatattggctggcttgcagaacctatctttggatcgggagattacccgtgggttatgcgggattggcttaatcaaaggaacaactttctccttccttactttactgaagatgagaagaaacttatacaaggcacctttgattttctcgccctctcccattataccaccatccttgtcgattcggaaaaggaggaccctataaagtacaatgattatctggaggtgcaggagatgacggatataacttggttgaactctccatcccaggtggccgtggtgccttgggggcttcggaaagtgctgaactggctcaagtttaagtatggtgacctgccgatgtacataatcagcaatggaatcgatgatggacttcatgccgaggacgaccaactgagggtgtactacatgcagaattacatcaacgaagcgcttaaggcccacatccttgatggaattaacctgtgtggctacttcgcctattcctttaatgatagaactgcaccccgattcggtttgtacagatacgcagcggatcaatttgaacccaaggcgtcgatgaaacattaccggaagatcatcgattctaacgggttcccggggcccgaaactttggaacgcttttgtccggaagaattcaccgtgtgtaccgaatgttcttttttccatactagaaagagcctgctcgcgttcatcgcctttctctttttcgcatccatcatttctctttcgcttatcttctactacagcaagaagggacgacggtcatacaaa

SEQ ID NO: 15037 - DNA, 3036 bp, synthetic construct; identical to SEQ ID NO: 15036
  misc_feature 1..3036: note = source = /note="Description of Artificial Sequence: Synthetic coding sequence"
  source 1..3036: mol_type = other DNA

SEQ ID NO: 15038 - DNA, 3036 bp, synthetic construct
  misc_feature 1..3036: note = source = /note="Description of Artificial Sequence: Synthetic coding sequence"
  source 1..3036: mol_type = other DNA
atgcccgcctccgccccccccagacgcccccgtccacctccccccagtctttcacttctgctggtactcttgggactcggaggtcgccgtctcagggctgagccaggcgacggcgcacaaacctgggcacgtttttcaagacctcctgccccagaagctgctggtctgtttcagggtaccttccccgatggtttcctctgggctgtgggatccgcagcctatcaaactgagggtggttggcagcagcatggcaaaggagcttctatctgggacactttcactcatcatcctttggcaccacccggcgactcaaggaatgcttctctgcctttgggagccccctctccactccagcccgcaacaggagacgtagcatcagactcatacaacaatgtctttagggatactgaagcccttcgcgagctgggagttacacattatcgtttcagcatcagttgggctcgcgtgctgccaaacggttccgcaggtgtccccaaccgtgaaggtctgcgctactaccgcaggctgctggagaggctgagagagcttggagtgcagcccgtcgtgacactctaccactgggatctgccccaacgtctgcaggacgcttatggaggatgggccaacagggccctggccgatcacttcagggactacgcagagctttgctttcgccatttcggcggacaggtgaagtactggatcaccattgataacccctacgtggtcgcctggcatggatacgccaccggtcgcctggccccaggcattaggggctcacctaggcttggatatcttgtggcccacaaccttcttctggctcacgctaaagtgtggcacctttacaatacctcctttcgcccaactcagggcggacaagtgtctattgccctcagttcccattggattaaccccagacgcatgactgatcattctatcaaagagtgccaaaaatccttggattttgttctcggatggtttgccaagcctgtgtttatcgacggtgattatccagaatctatgaaaaataatttgtctagcatcctgcccgacttcactgagtctgaaaaaaaattcatcaaaggaaccgccgatttctttgctctgtgcttcggacccacactgagcttccagctgctggacccccatatgaagttcagacagcttgaatcccccaatctccgtcaactgttgagttggattgacctggaattcaatcaccctcaaatctttatcgtggaaaacggctggttcgtgagcggaaccacaaagcgcgacgatgctaagtacatgtattacttgaagaagttcataatggagactctcaaagctatcaaactggacggtgtggatgtgattggctataccgcctggtctcttatggatggcttcgaatggcatcgtggatactcaattcgccgcggcttgttctatgttgacttcctgagtcaggataagatgcttcttcctaagtcctccgcacttttctatcagaaactcatcgaaaagaacggcttccctccattgccagagaaccagccactggaaggaactttcccctgcgacttcgcttggggcgtggttgacaactatatccaggtcgacaccactctgagccagttcactgatctgaacgtttacctgtgggatgtgcatcacagcaaaaggctgataaaggttgacggcgtcgtcacaaagaagagaaaatcctactgcgttgattttgctgccatccagccacagattgccttgttgcaggaaatgcacgtgacacacttcagattcagtctcgactgggcactgatcctgcctctgggaaaccagtcacaggtgaatcacacaatactgcagtactacaggtgtatggctagtgaactcgtccgtgtcaatataaccccagtcgtggccctgtggcagcctatggctccaaatcagggtctgcctcgcctgcttgcaaggcagggcgcctgggagaatccttatacagccttggcattcgccgagtatgctcgcctttgtttccaagagctgggccaccatgttaaactgtggatcacaatgaatgagccctacactcgcaacatgacctactctgccggacacaacctcctcaaggctcatgccctggcttggcatgtttataacgagaagttcaggcacgctcagaacggcaagatctccatagctctgcaagccgactggattgagcctgcctgcccattctctcagaaagataaagaggtcgcagagagagtgctcgaatttgatatcggttggctggctgaacctattttcggaagtggcgactacccctgggttatgcgcgattggctgaaccagagaaataacttcctgctgccctacttcacagaagacgagaaaaaacttattcagggcaccttcgattttctggctctgtctcactacaccaccatcttggtggactctgaaaaggaggacccaattaagtataatgactatctggaggtgcaggagatgactgacatcacctggttgaactcaccctcccaagttgccgtagtgccctggggcctgaggaaagtcctgaactggcttaagtttaagtacggagacctgccaatgtatatcataagtaatggcatcgatgacggcctccacgctgaagacgatcagcttagggtttactatatgcagaactacatcaatgaagctctcaaggcccacatcctggatggtattaacctgtgtggatattttgcttactcattcaacgatcgtacagctcctagattcggcctgtaccgctacgctgcagaccagttcgagcctaaggcttctatgaaacattataggaagatcattgacagtaacggtttccctggtcccgaaactctggagagattttgtcctgaggaattcactgtatgcactgagtgctccttttttcacaccaggaagtccctcctggctttcatcgccttcctgttctttgcttctatcatcagcttgtcccttattttttactactctaagaaaggccgcaggtcctacaag

SEQ ID NO: 15039 - DNA, 3036 bp, synthetic construct; identical to SEQ ID NO: 15038
  misc_feature 1..3036: note = source = /note="Description of Artificial Sequence: Synthetic coding sequence"
  source 1..3036: mol_type = other DNA

SEQ ID NO: 15040 - DNA, 3036 bp, synthetic construct
  misc_feature 1..3036: note = source = /note="Description of Artificial Sequence: Synthetic coding sequence"
  source 1..3036: mol_type = other DNA
atgccagcttcagccccacccagaaggccgagaccacctccccctagtttgagccttctgcttgtgctcctgggcctgggaggtcgacggctccgggcagagccaggtgacggcgcccaaacatgggcaagattctccagacctccagcaccagaagccgccggcctgtttcagggcacatttccagacgggttcttatgggcagtgggctctgctgcataccaaactgagggagggtggcaacagcatgggaaaggtgctagtatttgggatacatttactcatcaccctctggcgccacccggggattccaggaatgcctccctgcctctgggggctccatcacccctgcagcccgcaactggcgatgtagcaagcgactcatataataacgtgtttagagacaccgaggctctgagagagctgggagtcactcactacagattttctattagctgggcaagggtgctgcccaatggcagtgcaggcgtcccaaaccgggagggcctgagatattacagaagactccttgagaggcttcgggagttgggcgtacaaccagtagtgaccctttaccattgggacctgccacagagattacaggatgcgtacggcgggtgggctaatcgcgccttagctgaccatttcagagattacgccgagctgtgcttcaggcacttcggtgggcaggtaaagtactggatcaccatagataacccatacgtcgtggcatggcacggatatgcaaccggtcgcctggcccctgggatcagaggctcaccaagactcggctatctggtggcccataatttgctgttggcccatgcgaaggtttggcacctatacaatacttctttccgaccaactcaggggggccaggtgtccattgcactgtctagccattggataaacccccgtaggatgaccgatcacagtatcaaagagtgtcagaaatccttggactttgtgttgggatggttcgcgaagccagtgttcattgatggtgactatcctgagtccatgaagaataatctgtcctctatcctgccagactttactgagtctgagaaaaagttcataaagggtaccgccgattttttcgccctctgctttgggcctacactaagtttccagctgttagacccccatatgaagttcaggcaactcgaatccccaaacctgcggcagctgctgtcatggatagatctggaattcaaccatccacagatttttatcgtggaaaacgggtggtttgtgtctggaacaaccaaaagagacgacgccaaatatatgtattacctgaagaaatttatcatggagaccctcaaggccataaaacttgacggagtcgacgtgattgggtacaccgcgtggtcgttgatggacggttttgaatggcataggggttactcgattaggcgcggcctgttctacgtcgatttcctgtcacaggacaagatgctcctcccgaagtcgtccgccctgttttaccagaagttaatcgagaaaaatggatttccacctcttcccgagaaccaaccactggagggcactttcccttgtgacttcgcctggggggtggtggataattacatacaggtcgacaccacactgtcacagttcacggaccttaatgtgtatctgtgggacgtacaccattctaagcgtctgattaaggtggatggtgtcgtcacaaagaagcgcaaaagctactgcgtcgatttcgctgctattcagcctcaaatcgctctgttacaggaaatgcacgttacccacttccggttctctctggattgggcgctgatacttccattgggaaaccaatcacaggtgaatcataccattctgcagtattatcggtgcatggcatccgagctggtgcgagtgaacattacacctgtcgtagctctgtggcagcctatggccccaaatcaagggttgccccgccttttagcccggcaaggggcgtgggagaatccatacacggcactcgctttcgcagagtatgcacggttgtgtttccaggaactcggacatcatgtgaagttatggatcacaatgaacgaaccgtatacccgaaatatgacctacagcgcgggtcataacctgctcaaagcgcacgccctcgcttggcatgtgtacaatgagaaattcagacacgcacagaacggaaagatttcaattgcactgcaggctgactggatagaaccagcttgtccgttttcccagaaagataaggaagtcgccgaacgtgtgctcgagtttgatataggctggttagccgaacccatcttcgggtccggagactatccatgggtaatgagagattggctgaaccagcggaataatttcctcttgccttactttacagaagatgagaagaagctaattcagggcacctttgatttcctagcactatcgcattacacaaccatcctggttgacagcgagaaggaggatccaatcaaatataacgactatttagaggtacaggaaatgacagatatcacatggttaaactcaccttctcaggtggcagtagtgccttggggactcaggaaggttctgaattggctgaagtttaagtatggcgatctgccaatgtatatcatctccaatgggatcgatgatggcctccacgccgaggacgaccaattgagggtgtattacatgcagaattatatcaacgaggctctgaaggctcacatcctcgatgggattaatctttgcggctattttgcatactcctttaatgaccgcaccgcaccccgtttcggcctgtaccgttatgcggccgaccagttcgagcccaaagcaagcatgaagcattaccgaaagatcatcgactccaatggatttccggggcctgagaccctggaacgcttctgtcccgaagaatttacggtatgtactgaatgcagttttttccacactagaaagtccctcctcgccttcattgcctttctcttctttgcctcaatcatctcactgtctctcatcttctactatagtaagaaaggcaggagatcctataag

SEQ ID NO: 15041 - DNA, 3036 bp, synthetic construct; identical to SEQ ID NO: 15040
  misc_feature 1..3036: note = source = /note="Description of Artificial Sequence: Synthetic coding sequence"
  source 1..3036: mol_type = other DNA

SEQ ID NO: 15042 - DNA, 3036 bp, synthetic construct
  misc_feature 1..3036: note = source = /note="Description of Artificial Sequence: Synthetic coding sequence"
  source 1..3036: mol_type = other DNA
atgccggcctcggcacccccccggcggcctagacccccaccacccagtctgagcctcctgctcgtcctcctaggactgggaggccgcaggctgagggcagagcccggagacggcgctcaaacatgggcgcgtttcagcagacctcctgcccctgaagccgcaggtctgttccaggggacattccctgatggtttcctgtgggccgtgggatccgccgcttatcagaccgagggagggtggcagcagcacggcaagggcgctagcatttgggatacatttactcatcatcccctcgctccacctggtgactccagaaatgcatcactgcctctcggggcaccgtcccctctgcagccggccaccggcgatgtggcaagcgactcttacaataacgtttttcgggacacagaggcactgcgggagttaggagttactcattatcgtttctccatttcgtgggctcgcgtcctccccaacggttccgccggtgtgccaaaccgggaggggttaagatactatcgccgactgctcgagcgtctgcgcgaattgggtgtgcagcccgtagtgacactgtatcactgggacttgccacagaggttgcaggacgcgtacggtggatgggccaatcgcgcactggccgaccatttcagggattacgccgaactgtgtttccgccattttggtggtcaggtgaagtactggattactattgacaacccttacgtcgtagcctggcatggctatgctaccggacggttggcccctggcattcgcggttctccgaggctgggctatctggttgctcacaacttgctactcgcccacgcaaaagtgtggcacctttacaacacttcttttcgccccacgcagggcggacaggtatccattgccttgtcttcgcactggatcaatcctcggcgtatgaccgaccacagcattaaagaatgccagaagagcctagatttcgttctggggtggtttgcaaagcccgtgtttattgacggcgattaccctgaaagcatgaagaacaatttgtcaagtattttgccagattttactgagtccgagaagaagttcatcaaaggaaccgctgatttcttcgccttgtgttttgggccaaccctgtctttccaactgctggacccgcatatgaaattccggcagctggagtccccaaaccttcgccagcttttgagctggattgaccttgagttcaaccaccctcagatatttatagtggagaacggttggtttgtgtctgggacaaccaaaagggatgacgcaaagtatatgtactacctcaagaaattcatcatggaaaccttgaaggcaatcaagctcgacggtgtggatgtgatcgggtacactgcctggagtttgatggatgggtttgagtggcatcgtgggtatagcatcagacgcggactattttatgtggatttcctgtctcaagataagatgctgctgcccaagtcctccgccctgttttatcagaaacttatagagaaaaatgggttccctccgttgcctgagaatcagccacttgagggcacctttccgtgcgattttgcttggggggtcgtcgataactatatccaggttgataccaccctgtcgcagttcacagacctcaacgtgtacctgtgggatgtgcaccattccaagcggctgatcaaagtcgacggagtggtgaccaagaagcggaaaagctattgcgtggacttcgccgctatccagccacagatcgctttactccaggagatgcacgtgactcacttccggttcagtcttgactgggcactcatactacccttgggcaaccagtctcaagtcaaccataccatcctgcagtattatcgatgcatggcatctgagctggtgcgagtcaatatcactccagtggtcgcgttgtggcagccaatggctcctaaccagggccttcccaggctgctcgctcgacagggggcctgggaaaacccatatacagcactcgcctttgctgaatatgcacgtctctgcttccaggagttgggccatcatgtgaagctgtggattacaatgaatgagccctacaccagaaacatgacatattccgcaggccataatctgttaaaagcccatgccttagcctggcacgtgtacaacgaaaagttccggcacgctcagaatggaaagatatctatagccctccaggccgactggatcgagcctgcctgtccattttcccaaaaggacaaggaagtcgcggagagagttctggagtttgacatcggttggctggccgagcctatttttggatccggcgattacccgtgggtgatgagagactggctcaaccaacgcaacaattttcttctgccctacttcacggaggatgaaaaaaaactgatccagggtacctttgatttcctggcgctctctcattataccaccatcctggtggactccgagaaagaggaccctatcaagtataatgattacctggaagtgcaagagatgacagatataacctggctaaattcacccagccaggttgctgtcgtcccctggggactaaggaaggtgttgaactggctgaaattcaaatatggcgacctgcctatgtacatcatatctaatggaattgacgatggcttgcacgctgaagatgatcagctgagagtttactatatgcagaactacattaatgaagccctgaaagcacacattctggatgggattaacctgtgcggctatttcgcttatagctttaacgaccgcacagccccacgcttcggcctgtaccggtacgccgccgatcagtttgaacctaaagcaagtatgaaacattacaggaaaatcatagattccaacggctttcccggaccagagaccctggagagattctgccctgaagaatttaccgtgtgcacagagtgttcatttttccatacccggaagtccctgttggcttttattgcgtttttatttttcgcaagcattatttcgctttctcttatattctattactcgaaaaaagggagacggtcttacaag

SEQ ID NO: 15043 - DNA, 3036 bp, synthetic construct; identical to SEQ ID NO: 15042
  misc_feature 1..3036: note = source = /note="Description of Artificial Sequence: Synthetic coding sequence"
  source 1..3036: mol_type = other DNA

SEQ ID NO: 15044 - DNA, 3036 bp, synthetic construct
  misc_feature 1..3036: note = source = /note="Description of Artificial Sequence: Synthetic coding sequence"
  source 1..3036: mol_type = other DNA
atgccggcttcagcacctccgagaaggccgcgccctccgccgccatccctctcgctgcttctcgtcttgttgggtctgggaggaaggcgcctgcgcgcggagccgggagacggcgcccagacgtgggcacggttttccagacctcccgcccctgaagccgccggacttttccaagggactttcccggatggttttctgtgggctgtggggtcggcggcctaccaaactgaaggaggatggcagcaacacggaaagggcgcaagcatttgggatacgttcactcatcatccgctcgctccgccaggagacagccgtaacgcttccctcccactcggcgcgccaagcccactgcaaccggccaccggggatgtcgccagcgactcctacaacaacgtgttcagagacaccgaagcgctgcgagaactgggggtcacccactaccggtttagcatctcatgggcgcgggtgctgccgaacggaagcgcgggcgtcccgaaccgggaaggcctgaggtactacagacgcctcctggagcggctgcgagagttgggcgtgcagcctgttgttaccctgtatcactgggacttgccgcaacgcctccaagatgcatacgggggttgggccaatcgcgccctcgcagatcattttcgagactatgctgagctgtgcttccgccatttcggcggacaggtcaaatactggatcactatcgacaatccttatgtggtggcttggcatggatacgcaaccggccggctcgccccgggaatccggggctcgccaaggctcgggtacctggtggctcacaacctcctgcttgctcacgcgaaagtgtggcacctgtataacacctcgttccggccgactcagggtggacaggtgtccatcgcactgtcaagccattggatcaatccgaggcgcatgaccgatcactcaatcaaggagtgccaaaagtctctggacttcgtgttgggatggtttgccaagcctgtgttcatcgacggagactaccccgagtcgatgaagaacaacctctcgtcgatccttcctgatttcaccgaatcggagaaaaagttcatcaagggaactgccgacttcttcgcgctttgtttcggaccgaccctgtcctttcagctgttggacccacatatgaagtttcgccagctggaatcgcccaacctcagacagctgctgagctggatcgatctggagttcaatcacccgcagattttcatcgtggagaatggatggttcgtctccggcactactaagagagacgacgccaagtatatgtactatctcaagaagttcatcatggaaactcttaaggcaatcaaacttgacggagtggacgtgatcggatacactgcgtggtcactgatggatggcttcgagtggcaccggggctactccatccgccggggtctgttctacgtcgacttcctgtcccaggacaagatgctcttgcctaagtcatccgcgttgttttaccagaagctgatcgaaaagaatggattcccgccgttgcccgaaaatcaaccgctcgagggtacttttccgtgtgacttcgcttggggagtggtggacaactacattcaagtggacactaccctttcacaattcacggaccttaatgtgtacttgtgggatgttcaccattccaagcggctgatcaaagtggacggagttgtgacgaagaaaaggaaatcatactgcgtggatttcgctgccatacaaccacagatcgcgcttctgcaagaaatgcacgtgactcacttcagattctctctggactgggcgcttatactccctcttgggaaccagtcacaggtgaaccacactattctgcagtactatcggtgcatggccagcgaactggtccgcgtgaacatcacccctgtcgttgcactgtggcaacctatggccccaaaccagggccttccgaggctccttgcccgccagggagcatgggaaaatccgtacaccgccctcgccttcgccgaatacgcccggttgtgtttccaagaactgggccaccatgtgaagttgtggatcaccatgaatgagccatacactagaaacatgacttacagcgcggggcataatctgttgaaggcgcatgcgctggcctggcacgtgtacaacgagaagtttaggcatgcacaaaacggaaagatttcgatcgcgctccaggcggactggattgagccggcgtgccccttttcgcaaaaggacaaagaagttgccgaacgtgtcttggagttcgacattgggtggctggcagaacccatcttcggatccggtgactacccttgggtgatgagggattggctgaaccagcggaacaacttcctcctgccatacttcaccgaggacgagaaaaaactcatacagggaacgtttgattttctggccctctcccactacaccaccatcctggtggattccgagaaagaagatcccatcaaatacaatgattacctcgaagtgcaggagatgacggacatcacctggctgaactcgccctcccaagtggccgtggtcccgtggggtctgagaaaggtgcttaactggctcaagtttaagtacggtgatctgccgatgtacatcatctcgaacggcatcgatgacgggctgcacgccgaggatgatcagctgcgcgtctactacatgcagaattacatcaatgaggcgttgaaagcacacatcctggatgggataaatctgtgcggttacttcgcttactcttttaacgatcgcaccgcgccacgcttcggcctgtacagatacgccgctgaccagttcgaacctaaggcctcgatgaaacattacaggaagattatcgactcaaatggatttccgggaccagaaactctggagcgattttgcccggaagaattcaccgtgtgcaccgaatgctcattcttccacacccgcaaatcgctcctcgccttcatcgcattcctcttcttcgcctctatcatctctctttcactgatcttctactacagcaagaagggacggcggagctacaag

SEQ ID NO: 15045 - DNA, 3036 bp, synthetic construct; identical to SEQ ID NO: 15044
  misc_feature 1..3036: note = source = /note="Description of Artificial Sequence: Synthetic coding sequence"
  source 1..3036: mol_type = other DNA

SEQ ID NO: 15046 - DNA, 3036 bp, synthetic construct
  misc_feature 1..3036: note = source = /note="Description of Artificial Sequence: Synthetic coding sequence"
  source 1..3036: mol_type = other DNA
atgcctgccagcgcccccccaaggcgaccgcggccccctcctccttctctgagccttttgctggtgctgttggggctaggaggacgcagactgcgggcagagccaggggacggcgctcaaacatgggcccggtttagccgcccgcccgcgccagaagcagcagggttattccaaggcacctttcctgacggatttctctgggcagttggatctgccgcttatcagacagaaggcggatggcagcagcatggtaaaggagcctctatctgggacactttcacccaccacccactcgcacctccaggagatagcaggaatgcatccctgcctctgggtgcaccgtcgcctttacaacccgcaaccggcgatgtggcatccgatagctacaacaacgtgttccgcgataccgaagccctgcgggagttgggagtgacccattaccgcttttccatctcttgggcccgcgtgctgcctaacggcagcgctggggttcctaatcgtgaagggttgcgttattatcgaaggctcttggagcggctgagggaactcggggtccagcccgtggtgacactgtaccattgggatctgccccagaggttgcaagacgcctatggtggctgggccaatcgcgctctggctgaccatttcagggattacgctgaactgtgcttcaggcatttcggaggtcaggtgaagtactggataaccatcgacaacccgtacgtagtagcttggcacggctatgccacaggtaggcttgcacccggcattaggggcagcccgagactcggttacctcgtggcccacaacttgcttctggcccacgcaaaagtgtggcacctttacaatacttcattccgccccacacagggaggacaagttagcatcgccctgtccagtcactggataaacccacggcggatgaccgatcatagtatcaaagaatgccagaagtcactggacttcgtactgggctggttcgccaaaccagtttttatagatggggactaccctgaatccatgaaaaataacctcagcagcattctgcctgacttcaccgagtctgagaagaagttcatcaagggaaccgccgatttctttgccctttgctttggacccaccctgtctttccaacttttggatcctcatatgaagtttagacagctggagtcccctaacctgcgccagttgctctcatggatcgacctggagttcaaccacccccaaatctttattgtcgagaatggatggtttgtgagtgggactacaaagcgggacgacgctaagtacatgtactacctcaagaagtttataatggaaactctgaaagctatcaagctggatggagtcgacgtcatcggctataccgcatggagccttatggatggatttgaatggcaccgcggatacagcattaggaggggcttgttctacgttgactttcttagtcaggataagatgctcctgcctaaatcatccgcactgttttatcagaaattgatcgaaaaaaacggattcccacctctccctgagaatcagccactggaagggacctttccctgcgacttcgcttggggagtcgtggacaattatatccaggtcgatacaaccctgagccagttcactgacctaaatgtatacctgtgggatgttcatcacagcaagaggcttataaaggtggacggggtcgttaccaaaaaacgtaaaagttactgtgtggactttgcggccatccaacctcagatagctctcttgcaagagatgcacgtcacccactttcgcttcagcctggactgggccctcatcctgcccttgggcaaccagagccaagtcaaccatacaatactccagtactacaggtgcatggcatctgagctggtgagagtgaacatcacaccggttgttgctctgtggcaaccgatggcaccaaaccagggactgccaaggctgctggctcgacaaggcgcatgggagaatccctacactgcactggcattcgccgaatacgctcgcctgtgttttcaggaattgggacatcatgtgaaactgtggattacaatgaacgagccatatacccggaacatgacatactcggccggccacaacttgttaaaggcacacgctcttgcctggcacgtctataatgaaaaattcagacatgcacaaaacgggaagatctctatcgcattgcaagccgattggatcgagcctgcgtgtcctttctcccagaaagataaggaagtggcagagagggtgctggagttcgacatcggatggcttgcagaacccattttcgggagcggggactacccttgggtgatgagagactggctaaaccagcgcaacaactttctgcttccatactttacagaggatgagaaaaaactgattcaggggacctttgacttccttgctctctcccactatacaactatcttagtcgacagtgagaaggaggatcctatcaaatacaatgattacttggaggtgcaagagatgacggacataacttggctgaattcacccagccaggtggcagtggtcccgtggggccttaggaaggtactgaattggttgaaatttaaatatggagatctgcctatgtacattatttccaacggaatcgacgatggactgcacgccgaagatgatcaactcagagtctactatatgcagaactacattaacgaagcattaaaggcccacatcctggatggcatcaatttgtgcggctactttgcttacagctttaacgataggacagctccacgattcgggctctatagatacgctgccgaccaattcgaacctaaagcatcaatgaagcactatcgtaagatcattgatagcaatggatttccgggcccggagaccctggaaaggttctgtcccgaggaattcacagtgtgtactgagtgcagcttctttcacacccgcaaatcgctcctggcgtttatcgcttttctttttttcgccagtatcattagtcttagcctgattttctactactcaaaaaagggtagaagatcatataag

SEQ ID NO: 15047 - DNA, 3036 bp, synthetic construct; identical to SEQ ID NO: 15046
  misc_feature 1..3036: note = source = /note="Description of Artificial Sequence: Synthetic coding sequence"
  source 1..3036: mol_type = other DNA

SEQ ID NO: 15048 - DNA, 3036 bp, synthetic construct
  misc_feature 1..3036: note = source = /note="Description of Artificial Sequence: Synthetic coding sequence"
  source 1..3036: mol_type = other DNA
atgcctgcgagcgccccaccaagaagaccaagaccacctcccccaagtctcagcctgcttcttgttcttcttggcttgggaggcagaaggctgcgcgctgaacctggagacggagcccagacatgggctaggttttctagaccgcccgctccagaagccgcaggcctgttccagggaactttccccgacggattcctctgggcagtaggctccgccgcataccagacagaagggggatggcagcaacacggcaaaggcgcatcaatttgggacacgttcacgcaccatcctcttgcaccaccaggcgactcacggaatgctagtctacccctgggggccccaagcccgttgcaaccagctaccggagatgtcgcatctgacagttacaataacgtattccgtgacacagaggccctccgcgaactgggggtgacacattatcgttttagtatttcctgggctagggtgttgccaaacgggagcgcaggagtccctaaccgcgagggactgaggtactacagaagactgctcgagaggctcagagagctgggggtccagcctgtcgtcaccctgtaccactgggatctgccacaacgtctccaggacgcttacggcggctgggcaaatagagctctcgcagatcatttccgcgactacgccgaactttgcttcaggcacttcggaggccaagtaaaatactggatcacaattgacaacccctacgtcgtggcttggcacggttacgccacgggacgtcttgctcctggaatcagaggatctcctcggctgggatatttggtcgctcataacctgctgctagctcacgctaaagtctggcatttatacaatactagctttcgcccaacacaaggaggacaggttagcattgcgctctccagtcattggatcaatccgcgcaggatgaccgaccacagcatcaaagagtgccaaaaatctcttgactttgtgctcggctggttcgctaagcctgtttttatcgacggtgactatcctgagagtatgaaaaacaacctcagcagcatcttaccagattttaccgaatcagagaaaaaattcattaaaggtacagctgatttcttcgccctttgtttcggacctaccctctctttccagttgctagacccacacatgaagtttcgtcagctggaaagcccaaacctgaggcagctcctgtcatggattgacctggaatttaaccaccctcaaatttttatcgtcgaaaacggttggtttgtctcgggcactacaaaaagggacgacgctaagtacatgtactacctgaagaagttcatcatggagactttaaaggccataaaattagatggtgtggacgtgatcggctacactgcatggtcccttatggacggatttgaatggcataggggctattccatcaggagaggactcttttatgtagactttctgagtcaggataaaatgctgctccctaaaagcagtgctttgttttaccaaaaattaatcgagaaaaacggttttcccccacttccagaaaaccagcccttggaaggcactttcccttgtgatttcgcttggggagtggttgacaactacatccaggttgatactaccctctctcagttcacagacttgaatgtgtacctgtgggacgtgcaccactccaagaggctgatcaaggtggacggagtggtcacaaaaaagagaaaaagttactgcgtggacttcgcggctattcagccccagatcgctcttcttcaggaaatgcatgtcacccactttcgctttagcctggactgggccctcatcctgcctctggggaaccagtcgcaggttaaccacacaatcctccaatactaccgctgcatggccagcgaacttgtaagggtgaatataactccagtcgtcgcattatggcagcccatggcacccaaccaaggcctccctagactcctggcccgccagggagcctgggaaaatccgtacacggctctcgcgttcgcagagtacgcaagattgtgtttccaagagcttggccaccacgtgaagctttggatcaccatgaatgaaccatatacgcggaacatgacctatagcgctggacacaacctcctaaaggctcacgctctcgcatggcacgtgtacaacgagaagttcagacacgcccaaaacggcaaaatctcaatcgctctgcaggcagactggatagaacctgcctgcccattctcacagaaggataaagaggtggcagaacgagtattagagttcgatattggctggttggctgaaccaattttcggcagcggggactacccttgggtgatgagggactggctaaaccagaggaataacttcctgctgccatattttacagaggatgaaaaaaaactgatccagggtacctttgatttcctagctctctctcactataccacaatactcgtggatagcgaaaaggaggatccaatcaagtataatgattatctcgaagtgcaggaaatgaccgacattacatggcttaacagcccgagccaggttgccgtggttccttgggggcttagaaaggtgttgaattggctgaaattcaagtacggggacctgcctatgtacatcatcagtaacggaatcgatgacgggctccacgccgaagacgatcagctgcgcgtctattacatgcagaactatattaacgaggctttaaaggcacacattcttgatggcatcaacttgtgcggctattttgcatactcctttaacgatagaactgcacccagatttggattgtaccggtacgccgctgatcagtttgaacccaaggctagcatgaaacactacaggaaaatcatagactccaacggattccccgggccagagacccttgagaggttttgccccgaagaatttactgtgtgcacggagtgcagcttctttcacacccgtaagagtctgttggcatttatcgcattcttgttttttgcgagcattatcagcctgtcactgattttttattacagtaaaaaagggaggaggagttataag

SEQ ID NO: 15049 - DNA, 3036 bp, synthetic construct; identical to SEQ ID NO: 15048
  misc_feature 1..3036: note = source = /note="Description of Artificial Sequence: Synthetic coding sequence"
  source 1..3036: mol_type = other DNA

SEQ ID NO: 15050 - DNA, 3036 bp, synthetic construct
  misc_feature 1..3036: note = source = /note="Description of Artificial Sequence: Synthetic coding sequence"
  source 1..3036: mol_type = other DNA
atgcctgcctctgcacctccacgccgcccccggccacctcctccctctctaagcttattgctggtcctgctggggcttgggggaagacggctccgcgccgaaccaggtgatggcgctcagacttgggcaaggtttagcaggccccccgctcctgaggcagcgggtttgttccaaggtactttccctgacggattcctgtgggctgtgggatctgccgcataccagaccgagggaggttggcagcagcacggaaagggagccagcatctgggacaccttcacccaccaccccctggcaccgcccggtgactctcgtaacgcctcactcccgctgggtgccccaagtcccctccagccggcaaccggggatgtcgccagtgattcctataacaatgtcttccgcgacacagaggccctcagagaattaggagtcacccactacagattcagcatctcttgggcccgagtcttacccaatggttccgcaggcgtcccgaatagagagggactgagatattacaggcggctgcttgagcgcctccgtgagctgggcgttcagccagtggtgacgttgtaccactgggatctgccccagcgcctacaagacgcatatggcggatgggccaatcgagcccttgcagatcactttagagattatgctgaactttgtttcaggcacttcggcggacaagtcaaatactggataactattgacaatccttacgtcgtggcttggcacgggtacgcaacgggtcggctagcacccgggattcggggatcccccagactgggctatttagtggctcataacctgctgctggcccatgctaaggtttggcatctctataatacatccttcaggcctacgcaaggtggacaggtcagtatcgcgctgtcttctcactggattaaccccagaagaatgacggatcattctataaaggagtgtcagaagagccttgatttcgtgcttgggtggtttgcaaagccggttttcattgatggagattatcctgagtctatgaaaaacaatctttcatctattctgcccgactttaccgaaagtgaaaagaaattcataaagggaactgccgactttttcgcgctgtgcttcgggcctaccctctcgttccagctgctagacccacatatgaaatttcgacagctcgaaagccccaacctgcgccaactgctgagttggatcgatctggaattcaatcatccacagatcttcatcgtggaaaacgggtggttcgtgtcaggcactaccaagcgcgacgacgccaagtatatgtactatctcaagaagttcattatggagacacttaaagccatcaagcttgatggcgtggatgtcattggttataccgcatggtcacttatggacggtttcgagtggcatcggggctacagtattcggagaggactcttttatgtggatttcctgagccaggacaagatgctgctgcctaagtccagcgcgctgttctaccagaaactgattgagaagaacggttttccacccctgcccgagaatcagcccctggaagggacttttccgtgtgactttgcctggggtgtggttgataattatatccaggtggacaccaccctgagtcagtttacggatctgaacgtgtatttgtgggatgtgcatcattccaagcgtttgatcaaagtggatggcgtcgtcaccaagaagcgcaagagctattgtgtcgacttcgccgcaatccagccgcagattgcactcctgcaagagatgcacgtaactcacttcagatttagtctagattgggccctgatcctaccgcttggtaaccagtcccaagtcaatcataccattttgcagtactaccgttgcatggctagcgagctggttagggtcaacattacacccgtggtcgccctttggcagccaatggcaccaaatcaaggcctgcccagacttttagccagacaaggcgcatgggaaaacccctatactgctctggcctttgcagaatacgcacgcctttgcttccaggagcttggacaccatgtcaaactctggattaccatgaatgagccttatacgcggaacatgacctattccgcagggcacaatctacttaaggcacacgccctggcctggcacgtgtataatgaaaagttccgccatgcacagaacgggaagatctccattgcgctccaggctgattggatcgagcccgcctgcccgttcagccaaaaggataaagaggtggccgaacgcgtgcttgagttcgacatcgggtggctggcagaacctatcttcggttccggtgactatccatgggtaatgagagattggctcaatcagcggaataatttcttgttgccctacttcacagaagatgaaaagaaacttatacaggggacattcgactttctcgcattgtcccactataccaccatactggtggattctgagaaagaagatcctatcaaatataatgattatctggaggtccaggagatgacagacataacatggctgaactccccctcacaggtcgctgtcgttccttggggcctgaggaaggtgctcaattggttgaagttcaagtatggggatttacctatgtacataataagcaatggtatcgacgatgggttacacgctgaagatgatcagcttagggtatattacatgcagaattacatcaatgaggccctgaaggctcacattctggatggtattaatctttgtgggtatttcgcctacagctttaacgacagaacagccccacgcttcggcctgtacagatacgcagccgatcaattcgaacccaaagcttctatgaaacattacaggaaaataattgatagcaatggcttccccggacctgagacactggaaagattctgtcctgaagagttcactgtttgtaccgagtgtagtttttttcacactcggaagagcctgctggcattcatagcgtttctgttttttgcatcaattatctcactttcactgatcttttactattccaagaagggccgcagaagctacaag

SEQ ID NO: 15051 - DNA, 3036 bp, synthetic construct; identical to SEQ ID NO: 15050
  misc_feature 1..3036: note = source = /note="Description of Artificial Sequence: Synthetic coding sequence"
  source 1..3036: mol_type = other DNA

SEQ ID NO: 15052 - DNA, 3036 bp, synthetic construct
  misc_feature 1..3036: note = source = /note="Description of Artificial Sequence: Synthetic coding sequence"
  source 1..3036: mol_type = other DNA
atgccggcttctgcccccccaaggcggccaagaccccctccgcccagtctttcactgctgctggtgttgctcgggttggggggacgcagactgagagccgaacccggcgatggagctcagacatgggctcgcttttcccggccccccgcacctgaggccgcaggattgtttcagggaacctttcccgacggctttctgtgggcagtcggaagtgccgcctatcagaccgagggaggttggcagcaacacggcaaaggggccagtatatgggacacattcactcaccaccctctcgccccccctggggattccagaaacgcctcactcccactgggcgccccgagccctctccagcccgccacaggggacgtggcaagcgattcatacaataacgtgtttagagacaccgaagcgttgagggagttgggcgtgacccactacagattctctatctcctgggctagggtcctccctaatggaagtgcgggggtccccaacagggagggccttaggtactacaggcggctcttggagcggctgagagaactcggcgtgcagccggttgtcactctttaccactgggacctgccacagcggctccaggacgcttacggaggctgggctaatagggccttggctgaccattttcgggactacgctgagctgtgcttccggcatttcggcggccaggtgaagtactggataaccatagataatccgtatgtagtggcctggcacggatatgccaccggtaggctggctccagggatccggggatctccacgcctggggtacctggtggcacacaatctgctgctcgcacatgcaaaagtttggcacctgtataacacgtcttttagacccacacaggggggccaggtgtccatagcgctgagcagccactggatcaatcccaggcgcatgacagaccactccattaaggagtgccagaagagcctggacttcgtgttggggtggttcgccaaacctgttttcattgacggggactacccggagtccatgaagaataacctttccagcatcctcccagatttcacagagagcgaaaagaaatttatcaaaggcacggcagacttcttcgcactgtgcttcggccccaccctgtcctttcagctgctcgacccacatatgaaatttagacaactggaatcccccaatctgcggcagctcctcagctggatcgatcttgaatttaaccacccccagatctttatcgtcgaaaatggctggtttgtctccggaacaaccaagcgagatgacgcgaagtatatgtactatctgaagaagttcattatggaaactctgaaggccatcaagctcgacggagtggacgtaatcggatacacagcatggtctctgatggacggcttcgaatggcatcggggttactcaattagaaggggactgttctatgtcgattttctcagccaggacaagatgttgctcccaaagagcagcgcacttttttatcagaagctgatagagaaaaacgggttcccacccttgcctgaaaaccagcctctggagggaaccttcccctgcgacttcgcttggggagtcgtggataactatattcaggtagataccaccctcagccagtttacagatctcaatgtatacctgtgggatgtacaccacagcaagagactcattaaggtagacggggttgtgaccaaaaaacggaagagttattgcgtagatttcgctgctattcagcctcagattgctctgcttcaggagatgcacgtgacccacttcagattttccctggattgggctctgattcttcccttgggcaaccagagtcaagtcaatcacacgatccttcagtattatcgatgcatggcttccgaactggtgcgagtgaatataacccccgtggtcgcgttgtggcagccaatggcccctaatcagggcctgccccgcctcctcgcccggcagggggcctgggagaacccatataccgccctggctttcgctgagtacgcaaggctgtgcttccaggagctgggccaccacgttaaactgtggatcaccatgaacgagccgtacacacggaacatgacgtacagtgctggacacaacctcttgaaggcccacgctctggcatggcacgtttataacgagaagtttcggcacgctcaaaatggcaagatctccatagctcttcaagctgattggattgaaccagcctgccccttctctcagaaggataaggaagttgccgagcgcgtactcgaatttgacattgggtggctggctgaacctatcttcgggagcggagattacccctgggtgatgcgcgattggctgaatcagaggaataattttctcctgccatatttcaccgaggacgagaagaagctgatccagggcaccttcgacttcctggcactttctcattatactactattcttgtcgattcagagaaggaagaccccattaaatacaacgattacctggaggtgcaggagatgacagacatcacttggctgaattcaccaagccaggtggctgtggtcccctggggcctcagaaaagtattgaactggctgaagttcaagtatggtgatctccccatgtacatcatctccaatgggatcgacgacgggcttcatgccgaggatgatcagctgagggtctactatatgcagaactacatcaacgaggctttgaaggcgcacattctggacgggataaacttgtgcggttacttcgcatatagttttaatgatcgaaccgcaccacgctttggactctaccgctatgcagctgaccagtttgagccaaaggcctcaatgaagcactataggaagatcatcgacagcaacggcttccccggtcccgaaaccttggagcgcttttgccctgaagaatttacggtgtgcaccgagtgctccttttttcataccagaaaatcacttctggccttcattgcttttctgttctttgccagcatcattagcctgtcacttatattctactattccaagaagggacggaggtcctacaag

SEQ ID NO: 15053 - DNA, 3036 bp, synthetic construct; identical to SEQ ID NO: 15052
  misc_feature 1..3036: note = source = /note="Description of Artificial Sequence: Synthetic coding sequence"
  source 1..3036: mol_type = other DNA

SEQ ID NO: 15054 - DNA, 3036 bp, synthetic construct
  misc_feature 1..3036: note = source = /note="Description of Artificial Sequence: Synthetic coding sequence"
  source 1..3036: mol_type = other DNA
atgccggcttccgcccccccacgtcggcccagaccccctcccccatcattatctctgctgctggtgttactcgggctgggcgggcggcggctccgggctgagcccggagatggagcacagacatgggctcggttctcaaggccaccggcccccgaagccgccggtttgttccagggcaccttccctgatggttttctttgggccgtcggctctgcagcctatcaaacagaggggggatggcaacaacatggcaagggcgctagcatatgggatacctttacacaccatcccctggccccccccggggattcaagaaacgcgagtctgccccttggcgctccttccccactgcaacccgcaactggggacgtggcgtctgattcgtacaacaacgtgttccgcgacaccgaggctctgagggagctgggagtgacacactataggttctctatctcttgggctcgggttctccctaacggctccgctggggtgccgaaccgcgaaggcctccgctactataggcgcctacttgagcggctgcgggaattaggagtgcagccggttgtcacactataccactgggacctgcctcagagacttcaggatgcatacggcggttgggccaaccgagcgctggcagatcacttcagagactacgccgagctctgtttccgccacttcggaggccaggtgaaatactggatcactattgataatccctatgttgtggcgtggcacgggtacgcaaccgggcgtttagcacccggaatccgagggtctcctcgcttaggctaccttgtggcacacaatctcctgctggcccatgccaaggtctggcatttgtataacacgtcttttagacccacccagggcggacaggtgtccattgctttaagttcacactggatcaatcccagacgcatgacagaccattccatcaaagagtgtcagaaatctctagacttcgttctgggttggttcgcgaagcccgtgttcattgacggcgactatcctgagtccatgaagaacaacctttcaagtatcctacctgactttacagaatccgagaaaaaattcatcaaggggactgctgactttttcgccctgtgtttcggacccaccctctcctttcaacttctggatcctcatatgaagtttcgccagttggagagtccaaatctgcggcagctcctgtcctggattgatttggagttcaaccatcctcagatctttattgtggaaaacggctggttcgtgtcggggactacaaagagagatgatgcgaaatacatgtattacctgaagaaattcatcatggagacccttaaagctataaagctggacggggttgacgtaatcggctatacagcttggtctctgatggatggtttcgaatggcatcgcgggtacagcatcagacggggactcttctacgtggacttcctctcccaggacaaaatgctgctacctaaatcttccgcgttgttctaccagaaactgatagaaaagaacggttttccccccctgcctgaaaaccagccgttggaaggtacattcccatgcgacttcgcctggggcgtcgtcgataactacattcaagtagacacaactttaagccaattcaccgacttaaatgtatacctttgggacgtgcaccacagtaagagactgattaaagtagatggggtagtgactaagaaacgtaagagttactgtgtggactttgctgctattcagccacaaatcgccctcctccaggagatgcatgtcacccatttcagattttccttagattgggcgctgatcctccccctggggaatcagtcccaggtgaatcacacaatccttcagtactatcgatgtatggccagcgagctggtgcgcgtaaacatcacaccagtcgtggccctgtggcaacccatggccccaaaccagggcctgcctcggcttctggctcgccagggagcttgggaaaacccttataccgcgctcgcttttgcggagtatgccaggctctgctttcaggaactcggacatcacgtcaagttgtggataacaatgaatgaaccctatacgagaaatatgacgtatagcgccggccacaatctcctgaaagcccatgcgcttgcctggcacgtgtacaatgaaaagtttagacatgcccaaaatggcaagatatccatcgccctgcaggccgattggatcgaacctgcttgccctttcagccaaaaggataaggaggtggcagaacgggtcctggagttcgatatcgggtggcttgcagagccaatcttcggtagtggtgactacccctgggtgatgagggactggcttaaccaacgtaataatttcctgctcccctattttaccgaagatgaaaaaaaactgatacaaggcacgtttgactttctggcattgagtcactatactactatcctcgtcgattccgaaaaagaggatccaatcaagtataacgactatcttgaggtgcaggagatgaccgatattacctggttgaactccccatcccaggtggcagtggtgccatggggactacgcaaagtattgaactggttgaagttcaagtacggcgatctccccatgtacataatcagtaacggaattgacgatggcctgcatgcggaggacgatcagttgcgcgtgtactacatgcagaattacatcaatgaggcacttaaagcacacatcctagacggaattaatttgtgtggctatttcgcctatagtttcaacgatcgcactgcaccgagattcggcctgtaccgctacgctgccgatcagtttgagcccaaggccagcatgaaacattacaggaagattatcgattcaaacgggttccccggccccgaaaccctcgagcgtttctgtcctgaggaattcaccgtttgtacggaatgtagcttctttcacacacgcaagagcctgttggcgttcatagcctttctctttttcgcatctattatttcactgagcctgatcttctattatagcaaaaaggggaggaggtcctataaa

SEQ ID NO: 15055 - DNA, 3036 bp, synthetic construct; identical to SEQ ID NO: 15054
  misc_feature 1..3036: note = source = /note="Description of Artificial Sequence: Synthetic coding sequence"
  source 1..3036: mol_type = other DNA

SEQ ID NO: 15056 - DNA, 3036 bp, synthetic construct
  misc_feature 1..3036: note = source = /note="Description of Artificial Sequence: Synthetic coding sequence"
  source 1..3036: mol_type = other DNA
atgcctgccagtgccccgccccgacgaccccgcccgcccccaccatcacttagccttctgctggttctgctcggactgggcgggagacgcctgcgcgcggaaccaggagatggagcgcagacttgggcgcgcttttcgcggccgccggctcccgaagcagcgggactgttccagggaacgtttccggacggcttcttgtgggccgttggatcggccgcctaccaaactgaaggcggctggcaacagcatggaaagggcgcttcaatctgggacaccttcactcaccatccgcttgccccgccgggggactctcggaatgccagcctcccgctgggagcaccgtccccactgcagccagcaacgggggacgtggccagcgactcgtacaacaatgtgtttagggatacggaggcccttcgagaattgggagtcacccattaccgattctccatatcatgggctagagtgctccccaatgggtccgctggggtgcctaaccgcgaaggtctgcgttattaccggcggctgctcgaacgcctgagagaacttggagtccagccggtcgtgaccctctaccactgggatttgcctcagagactgcaagatgcgtacggtgggtgggctaatcgggccctggcagaccatttcagggactacgccgaactgtgctttagacattttggaggacaggtcaagtactggattacgatcgataatccatacgttgtcgcctggcacggctacgccactgggcgcttggcgccaggtatccgcggatcaccgcggttgggttaccttgtcgcgcacaacttgctcctcgctcacgctaaagtctggcacctctacaacacttcgttccgcccgacccagggagggcaagtgtcgatcgctctgtcctcacactggatcaacccaaggaggatgactgatcattcgataaaagagtgccagaaaagcctcgacttcgttttgggctggtttgccaaacctgtgttcattgacggagactaccctgagagcatgaaaaacaacctgtcgtccatcctgcctgattttactgagtcggagaagaagtttatcaagggcaccgcggacttctttgcattgtgcttcggacctaccctcagtttccagctgctggacccacacatgaaattccggcaactggaaagcccaaatctccggcagttgctgtcgtggattgacctggagttcaatcacccacagatattcatagtcgagaacgggtggttcgtgagcggaaccactaaacgggacgacgccaagtatatgtactatctcaagaagttcatcatggagactctgaaggccatcaagctggacggcgtcgatgtcattggctacaccgcttggagcctgatggatggcttcgaatggcatcggggatactccatccggcgggggttgttctacgtggacttcctgtcgcaggacaagatgttgctccctaagagctcggccctgttctaccaaaagctgatcgaaaagaacgggttcccgccgcttccggagaaccaacccttggaaggaactttcccgtgcgacttcgcgtggggagtcgtagataactacatccaagtggacaccaccctgtcccaattcactgatctcaatgtgtacctgtgggatgtccaccactccaagcggctgatcaaggtggatggggttgtcactaaaaagagaaagagctactgcgtggattttgccgccatccagccgcaaatcgccctgctccaagagatgcatgtcacgcatttccggttttccctggactgggcactcatcctgccgctcggaaatcagtcgcaggtgaaccacaccattcttcaatactaccgctgtatggcttcagaactggtgagggtgaacatcaccccggttgtcgctctgtggcaacccatggcgccgaaccagggcctgccgcgtttgcttgccaggcagggagcctgggagaatccgtacaccgcgctggcctttgcagaatacgcgcggctgtgtttccaggagctgggacaccatgtgaagctctggatcactatgaacgagccgtacacccggaatatgacgtactctgccgggcacaacctcctgaaagctcacgcactggcatggcacgtgtacaatgagaagtttaggcacgcgcagaacggtaagatctcaattgcactgcaggcagattggatcgaacccgcatgccccttctcacagaaggacaaagaagtcgccgaacgcgtgctcgagtttgacatcggctggctcgccgaaccaatcttcggaagcggtgattacccctgggtgatgagagactggctcaatcaaaggaacaactttctcctcccgtacttcaccgaggacgagaaaaagctcatccagggaacttttgacttcctggcgctttcacattatactacgatcttggtggacagcgagaaggaagatccaatcaagtacaacgactatctggaggtccaagaaatgaccgacataacctggctgaactccccatcgcaagtggcagtggtgccgtggggcctgcgcaaagtgctgaactggctcaagttcaaatacggagatctgccaatgtatatcatttccaatggcatcgatgacggtctgcacgcggaagatgaccagttgcgagtgtactacatgcagaattacatcaacgaggccctcaaggcacacatcctggatggtatcaacctgtgtggatactttgcctactcgtttaacgaccggactgccccgaggttcggtctttaccgctacgccgcggaccaattcgagccgaaggcttcaatgaagcattaccgcaagattattgattcaaatggcttccctggtccagaaactcttgaacggttctgtcctgaagaattcactgtctgcactgaatgttctttctttcacacgagaaagtccttgctggcgttcatcgcgttcctcttctttgctagcatcatctcgctttcgttgatcttctactacagcaaaaaaggcagaagatcctataag

SEQ ID NO: 15057 - DNA, 3036 bp, synthetic construct; identical to SEQ ID NO: 15056
  misc_feature 1..3036: note = source = /note="Description of Artificial Sequence: Synthetic coding sequence"
  source 1..3036: mol_type = other DNA

SEQ ID NO: 15058 - DNA, 3036 bp, synthetic construct
  misc_feature 1..3036: note = source = /note="Description of Artificial Sequence: Synthetic coding sequence"
  source 1..3036: mol_type = other DNA
atgcctgcctcggcacctcctagacggcctagaccgccacccccgtcactgtccctcctccttgtactcctcggcctgggaggtcgacgcctcagagcagaacctggagacggtgcccagacttgggctaggttttcacggccccctgcaccagaagctgcaggcttgtttcaaggtactttcccagatggttttctgtgggcagtggggtccgcagcataccaaaccgagggaggttggcaacaacacggtaagggtgcatcaatctgggatacttttacccaccatcctttggcacctcccggtgacagcagaaatgcatcgcttcctttgggggccccttccccacttcagcctgcgacgggcgatgtggcctcagacagctacaacaatgtattcagggataccgaggcgcttcgagaattgggagtcactcattacagattttcgatcagctgggcacgcgtcctgcccaacggatcagcaggagtgccaaaccgggaaggacttagatattacagacggctcttggagagactccgggaactgggagtccaaccagtggtcactctgtaccactgggaccttccccagcgcctgcaagacgcgtacggaggctgggccaaccgagccctcgcagaccatttccgtgactacgctgaactgtgctttcgacattttggcggccaagtgaagtactggattactatcgataatccctacgtggtggcatggcatgggtacgcaactggacggctggctccagggattcggggttcgcctaggctcggctacctcgtcgcccataaccttcttcttgcacatgctaaggtgtggcatttgtacaacaccagctttcgtccaacccaaggtggacaggtgtcaattgctctttccagccactggataaatccaagacggatgaccgatcactcgataaaggagtgtcaaaagtccttggattttgtcttgggctggtttgcaaagccagtgtttatagatggggattacccagagtccatgaagaacaatctgagttcgattctcccagatttcaccgagtcggaaaagaagtttatcaagggaactgcggatttcttcgctctctgtttcggacccaccctttcgtttcagctgctcgatccacacatgaaattcagacaattggagagtccaaacttgagacaactcttgtcctggattgacctggagttcaaccacccccagattttcattgtggaaaacggctggtttgtctccggtaccacgaagagggatgatgcaaagtatatgtattacttgaagaagttcattatggaaaccctcaaggccataaagctggatggtgtggatgtcataggctacactgcatggtcgctgatggacggattcgaatggcaccgcgggtacagcattcggagggggttgttttacgtggatttccttagccaggataagatgcttctgcctaagtcatccgcactgttttaccagaagctgattgagaaaaatggatttccacccctccctgaaaatcagccactggaaggcactttcccctgcgattttgcatggggggtggtggacaactacatccaggtcgacactaccctgtcgcaatttaccgaccttaacgtgtacctttgggatgttcatcatagcaaaagactcatcaaagtggatggagtggtgacgaaaaagagaaagtcgtactgcgtcgatttcgcggcaatccagccacagatcgcactgctgcaggagatgcatgtcactcatttccgcttttccctggactgggccctgatccttcctttgggaaatcaatcacaggttaaccatactattctccaatactacagatgtatggcgtccgaactcgtgcgcgtgaacataacgcccgtcgtggccctttggcaaccgatggcaccaaaccaaggccttccacgcttgctggcacgccagggcgcatgggagaacccttacaccgcacttgcatttgccgaatacgctcggctgtgctttcaggaattgggtcaccatgtcaagctgtggattactatgaatgaaccctatacccgtaatatgacctactctgcgggacacaatttgctcaaggcacacgcccttgcatggcatgtgtacaacgaaaagtttcgtcatgcacaaaacggcaagatctccatagcacttcaggcagattggattgagcctgcatgccctttttcacagaaggataaggaagtcgcagaaagagtcctggagttcgatattggatggctggccgaaccaattttcggtagcggggactacccatgggtgatgagagactggctgaatcaacgaaataacttcctgcttccttactttaccgaggacgagaagaagctgattcaaggcactttcgattttcttgcgctgtcccattacaccactattttggtggatagcgaaaaggaagatcccataaagtacaacgattaccttgaagtccaagaaatgacggatatcacctggttgaattcaccatcgcaagtggcggtggtgccatggggactcagaaaagtgctgaactggcttaagtttaagtacggggaccttcctatgtatatcatttcaaacggaatagacgatggtttgcatgcggaagatgatcagctgagggtctactacatgcaaaactacattaacgaggcgctcaaggcgcatattcttgatgggatcaacctttgtggctactttgcctactcgttcaacgaccgcaccgcccctagatttggactgtacaggtacgcggcagatcaattcgaaccaaaagcatccatgaagcactatcggaagattatcgactcaaacggttttcctgggcctgagactctggaacgtttttgtcctgaggaatttaccgtgtgtacggaatgctccttttttcacacccgcaaatccctgcttgcattcattgcattcctgttttttgcatccattatctccctcagcctcatcttctactactcgaagaagggacgccggtcatacaaa

SEQ ID NO: 15059 - DNA, 3036 bp, synthetic construct; identical to SEQ ID NO: 15058
  misc_feature 1..3036: note = source = /note="Description of Artificial Sequence: Synthetic coding sequence"
  source 1..3036: mol_type = other DNA

SEQ ID NO: 15060 - DNA, 3036 bp, synthetic construct
  misc_feature 1..3036: note = source = /note="Description of Artificial Sequence: Synthetic coding sequence"
  source 1..3036: mol_type = other DNA
atgcctgcttccgccccgccgagacgcccccgcccccctccgccatcactgtccctgcttttggtgctgctgggactcggcgggcggcgcctgcgcgcagaaccaggagacggtgctcagacctgggcccggttctcgcggccccccgctccagaagccgccggcttgttccagggtacttttcccgatggattcctgtgggctgtgggatctgccgcttaccagactgagggagggtggcaacagcacggcaaaggtgcgtccatctgggacactttcacccaccatccattggcgccgcctggcgattcacgcaacgccagcctcccgcttggcgccccgtccccattgcagccagccaccggcgacgtggcctcggactcctacaataacgtctttcgggataccgaagccctgagagaacttggcgtcacgcactaccggttctcgatctcctgggccagagtcctccctaacggatcggcgggagtgcccaaccgggagggcctccgctattaccgtcggcttctggaacgtctccgcgagctgggcgtgcaaccggtggtgacgctctaccactgggacttgccccagcggctgcaagatgcgtacggagggtgggccaaccgcgcgctggctgatcatttccgggactacgctgagctttgttttcgccattttggaggacaggtgaagtactggatcaccatcgataacccgtatgtggtggcctggcatggctacgctactgggagactggctccgggcattcgcggttcaccgcggctgggatacctcgtcgcgcataatctgcttctggcccacgccaaggtgtggcacctgtacaacacctccttccgcccaactcaggggggccaggtcagcatcgcgctctcatcgcactggatcaaccctagacggatgactgatcattcaatcaaggaatgccagaagagcctggacttcgtgctgggctggtttgctaagccggttttcatcgatggggactacccggagtcgatgaagaacaatctctcctcaattctcccggacttcaccgagtccgagaagaagtttatcaagggaacggcagacttcttcgcgctctgcttcgggccgaccctgtcatttcagctgctggacccgcacatgaaattccgccagctggaatccccgaatctgcgccaactgctgtcctggatcgatttggagttcaaccacccgcaaatctttatagtggagaacggatggttcgtgtcaggcacgaccaaacgagatgatgctaaatacatgtactatctcaagaagttcatcatggaaactctcaaagccatcaaactggatggagttgacgtgatcgggtacactgcgtggagcctgatggacggattcgaatggcacaggggatactcgatccgccgaggactcttctacgtcgatttcttgtcgcaggacaaaatgctcctcccaaagtccagcgcgctcttttatcaaaagctgatcgagaagaacggcttccccccactgcctgagaaccagccgctggaagggactttcccgtgcgatttcgcctggggagtggtcgacaactacatccaggtggatacgactctctcacaatttactgacctgaacgtctacctgtgggacgtccatcattccaaaaggctgatcaaagtcgacggcgtcgtcactaaaaagcggaagtcgtactgcgtggactttgccgctattcaacctcagatcgctctgcttcaggaaatgcacgtgacccatttccgattctcactggactgggcgctgattctcccgctcggcaaccaatctcaagtgaaccataccatcctgcagtactaccggtgcatggcctcggagctggtgagggtcaacattaccccagtggtcgccctgtggcaaccgatggcccctaaccaggggctgccacgcctccttgcgagacagggcgcctgggaaaacccatacactgccctggcctttgctgagtatgcacgcctgtgtttccaggagctggggcatcacgtgaagctgtggatcaccatgaacgagccttacactaggaacatgacttactcagccggacataacttgctgaaagcgcacgcactggcgtggcatgtgtacaacgagaaatttcggcatgcccaaaatggcaagatcagtatcgctctgcaggccgactggatcgaaccggcttgtcccttctcacaaaaagacaaggaggtggcagaaagagtgctggagttcgacatcggatggctggcggaacccatctttgggtccggagactacccttgggtcatgcgcgactggctgaaccaaaggaacaacttcctcctcccgtatttcactgaggacgagaagaagctcattcagggaactttcgacttcctcgcactgtcccactatactactatcttggtcgactccgaaaaggaagatccaatcaaatacaatgactacctggaagtgcaagaaatgaccgacatcacctggctcaattcgccttcgcaggtcgccgtggtgccgtggggcctgcggaaggtgctgaattggctgaagtttaagtacggagacttgccgatgtacatcatctcaaacggcattgatgacgggctccacgccgaggacgatcagctgcgcgtctactacatgcaaaactacatcaacgaggccctcaaggcccatatcctcgatggaatcaatctgtgcggttacttcgcctattcgtttaatgatcggactgcaccaagattcggactgtaccggtacgcagctgaccagtttgagcccaaagcaagcatgaagcattaccggaagattatagactcgaatggatttccggggcccgagactctggagcgcttctgtccggaggagttcactgtctgtaccgaatgctcgttcttccataccagaaagtcgctcctggccttcattgcttttcttttcttcgcctcaatcatcagcctgtcgttgatcttttactacagcaagaaggggcggcggtcctacaag

SEQ ID NO: 15061 - DNA, 3036 bp, synthetic construct; identical to SEQ ID NO: 15060
  misc_feature 1..3036: note = source = /note="Description of Artificial Sequence: Synthetic coding sequence"
  source 1..3036: mol_type = other DNA

SEQ ID NO: 15062 - DNA, 3036 bp, synthetic construct
  misc_feature 1..3036: note = source = /note="Description of Artificial Sequence: Synthetic coding sequence"
  source 1..3036: mol_type = other DNA
atgccagcatctgctcccccccgcaggcccagacctcctcctccttccttatctttgttactagtccttctaggtctgggagggagaaggctacgcgctgaacctggcgatggggcacagacctgggcacggttctcccgccccccagcacccgaggctgcagggctcttccagggtactttcccagatggctttctgtgggccgtaggttcagcagcctatcagaccgagggaggttggcagcagcacggaaagggcgccagcatctgggacaccttcactcatcaccccctggcacccccaggggactctaggaacgcaagccttcccctgggcgctccttcaccactgcagccggctaccggagacgtggcttcagacagctataataatgtctttagggatactgaagcactgcgcgagcttggcgtgactcactacagattcagtatctcctgggcacgcgtgctacctaatgggtccgctggcgtgccaaaccgtgaggggctacgatactacaggcggctgctggaacgcctgcgcgaactgggggtgcagcctgtggtgaccctgtatcattgggacctcccccagaggttgcaggacgcatacgggggatgggctaacagagccttggctgatcactttagagattatgccgaactgtgcttcagacactttggtggtcaggtcaagtactggataaccatagataatccatatgtggttgcatggcatggctacgcaactggaagactggcaccagggattaggggctccccccgactgggctacttagtggctcataatctgctgctggctcacgccaaagtttggcatctctataacacatcttttagacctactcagggcgggcaggtgtcaatcgcactgtcttcacattggatcaacccacggcggatgaccgaccacagcattaaagagtgtcagaagtctctggactttgtgttgggatggttcgccaaacctgtgttcatcgatggggattaccctgagagcatgaaaaacaatctcagttctatcctccccgactttacagagagtgagaagaagttcataaaaggaaccgccgactttttcgctttatgcttcgggccaaccctaagctttcagctgctggacccccacatgaaatttcggcagctggagtcccccaatctgcggcaactcctgtcttggatagacctcgagtttaaccacccacagatctttattgtggagaacgggtggtttgtctccggcactaccaaacgggacgatgcaaaatacatgtactatctgaagaaatttatcatggagaccttaaaggctattaagctggatggtgttgatgtgattggttacaccgcttggagcttaatggatggattcgaatggcacaggggctacagcattcggaggggtctgttctatgttgattttctcagccaggataagatgctcctccctaaatctagtgccctgttctaccagaaactgatagaaaagaatggcttcccacccctgccagagaatcagcccttagaaggaacttttccttgcgatttcgcttggggcgtggttgacaattacatccaagtagacaccactctgtctcagttcacagatttaaatgtttatctatgggacgtgcaccattctaagaggctgatcaaagtcgacggcgttgtcacaaaaaagagaaaaagttattgcgtcgacttcgccgcaatccagccacagattgccctgttacaggaaatgcatgtgacacacttccggttctctctagattgggcccttattctcccactgggaaaccaatcccaggtgaaccatacaattttacagtattaccggtgtatggccagcgagctggtccgcgtgaatatcactccagtggtggccctgtggcagccaatggctcccaaccagggccttcctcgcctgctagctaggcagggagcctgggaaaatccttacacagctctggcatttgccgagtatgcccgcctatgctttcaggaactagggcaccacgttaaactgtggattacaatgaatgagccctatacccggaacatgacatactccgctggacacaacctccttaaagctcacgcactcgcctggcatgtgtataatgaaaagttccgccatgctcagaacgggaagatttccatcgccttacaggccgactggattgagccagcctgtccatttagccagaaggataaggaggttgccgagcgggttcttgaattcgatataggatggctggcagagcccatatttgggagcggggactatccctgggtgatgagagattggctcaatcagaggaataatttcctgttaccatattttactgaagatgaaaagaagttgattcaggggacatttgatttcctcgcactcagtcactacacaacaattctggtggatagcgaaaaagaggaccctattaagtacaatgactacctggaggtgcaggagatgaccgatatcacttggctgaattccccaagtcaggtggctgttgtaccatggggactccggaaggtgctgaactggctgaagtttaaatatggcgacctgcctatgtacataatcagcaatggaattgatgatggcctgcatgccgaggacgaccagctgagagtttattatatgcagaactacattaatgaagcactcaaagcacacatcctcgacggcattaacctgtgtggatatttcgcctatagtttcaatgacagaactgccccccgatttggcctgtacaggtatgccgccgatcaattcgaacccaaagcttccatgaaacattatcgcaaaattattgacagcaatggattccccggccccgagaccttagagaggttctgcccagaggaattcaccgtgtgtactgaatgctctttttttcacaccaggaagtccctattggcattcatagccttcttgtttttcgcatccattatctctctaagcttgatcttctactatagtaaaaaaggccggagaagctataaa

SEQ ID NO: 15063 - DNA, 3036 bp, synthetic construct; identical to SEQ ID NO: 15062
  misc_feature 1..3036: note = source = /note="Description of Artificial Sequence: Synthetic coding sequence"
  source 1..3036: mol_type = other DNA

SEQ ID NO: 15064 - DNA, 3036 bp, synthetic construct
  misc_feature 1..3036: note = source = /note="Description of Artificial Sequence: Synthetic coding sequence"
  source 1..3036: mol_type = other DNA
atgccggcgtcggcacctccacgcaggccaagaccaccgcctccctccctctcacttctgctcgtgctgctgggactggggggtcggcgcctgagagcggagccgggcgatggagcacaaacttgggcacgcttctcccggccgccggctccggaagcggccggattgttccaagggaccttccctgatggattcttgtgggccgttggatccgccgcctaccaaactgaaggagggtggcaacagcatggtaagggcgcttccatctgggacacgttcacccaccatccgctggccccaccgggtgactccagaaacgcttctctgcccctgggggctccgagcccgcttcaaccggccaccggggacgtcgcatcggactcatacaataatgtgttccgggacaccgaggcactgagagaactgggtgtgacgcactaccggttctcgatctcgtgggcgcgcgtcctgcccaatgggtccgcgggagtgcctaatcgggaggggctcaggtactacaggcgcctgcttgagagactccgtgagctgggagtccagcctgtcgtgactctctaccactgggacctgccacaaagactccaggacgcttacggaggatgggccaaccgggccctggcggatcacttcagagactacgccgaactgtgctttcggcattttggagggcaagtcaagtactggataactatcgacaacccttacgtggttgcatggcacgggtacgcgaccggcagactggcccctggaatcagaggctcccctcgactcggatacctggtggcgcacaatcttctgctggcccacgctaaggtgtggcatttgtataacaccagcttccggcccactcagggaggacaggtgtctatcgcattgagctcacattggatcaacccgcggagaatgaccgatcactcgattaaggaatgccaaaaatcactggacttcgtcctcggctggtttgctaagcctgtctttatcgatggagactacccggagagcatgaagaacaacctctcatcgatcctccccgactttactgagtccgagaaaaagttcattaagggtactgccgacttttttgccctctgtttcggacctaccctctcatttcaactgctcgacccgcacatgaagttcaggcaacttgagtcgcccaacctgaggcaactcctgtcgtggatcgaccttgaattcaaccacccacaaatcttcatcgtcgaaaacggctggttcgtgtcagggaccactaaacgcgacgatgcgaagtatatgtattacctcaaaaagtttatcatggaaaccctcaaggcgattaagctggacggagtcgacgtgatcggatacaccgcctggtcacttatggatggctttgagtggcacagggggtactcgattagaaggggccttttctacgtcgactttttgtcccaggataagatgcttctcccaaagtcaagcgcactgttctatcagaagctcatcgaaaagaacggattcccgccgctgccggagaatcaaccgctggaaggaacttttccatgcgattttgcctggggagtggtcgacaactacatccaggtggacaccactctgtcgcagttcaccgacctgaacgtgtacttgtgggacgtgcatcactccaagagactcatcaaggtcgacggtgtcgtgactaagaagcggaagagctactgtgttgacttcgccgcaatccaaccacagatcgcactgttgcaggaaatgcacgtcacccacttccgttttagccttgactgggctcttatcctgccgttgggaaatcagtcgcaggtgaaccacacgatcttgcagtactaccgctgcatggcaagcgaactggttcgggtcaacatcacccctgtcgtggccctctggcaaccaatggccccgaaccagggactgccacggctcctcgcaagacaaggcgcttgggagaatccgtacaccgccctggccttcgcggagtacgctagattgtgttttcaggagttgggacaccacgtgaaactttggattacgatgaacgagccgtacactcggaacatgacttactcggcgggccacaacctcctgaaagcacacgcattggcatggcatgtgtacaacgaaaagttcagacatgctcagaacggcaagatctcgatcgcgctgcaggccgattggatcgaaccagcttgcccgttctctcagaaagataaagaagtggcggagagagtgctggagtttgatatcggctggctggccgaacccatcttcggctcgggggattatccatgggtgatgcgcgactggctgaatcaacgcaacaacttcctgctgccatatttcaccgaagatgagaaaaagctcattcaaggaactttcgactttctggctctttcgcattacactactatcctggtggatagcgaaaaagaagatccgatcaagtacaacgattacctggaagtgcaggagatgaccgatatcacctggctgaactccccctcccaggtggccgtcgttccgtggggactgcggaaggtccttaactggctgaaattcaagtacggagatctccccatgtacatcatctcaaacggaatcgatgacggactgcatgccgaggacgaccagctgagagtgtactatatgcagaattacatcaacgaggcgctgaaggcccacattctggacggcatcaatctctgtggttatttcgcttactcgtttaacgacaggaccgcacctagattcggcctgtaccgctacgcagcggaccaatttgagccgaaggcgagcatgaagcattaccggaagatcatcgattccaatggtttcccaggaccggaaacgctcgagagattttgcccggaagagttcacggtctgcaccgagtgctcatttttccatactcgcaaatccctgctcgcctttattgccttcctcttcttcgcatcgatcatcagcctgtccctcatcttttactactctaagaagggtcggagatcgtacaaa

SEQ ID NO: 15065 - DNA, 3036 bp, synthetic construct; identical to SEQ ID NO: 15064
  misc_feature 1..3036: note = source = /note="Description of Artificial Sequence: Synthetic coding sequence"
  source 1..3036: mol_type = other DNA

SEQ ID NO: 15066 - DNA, 3036 bp, synthetic construct
  misc_feature 1..3036: note = source = /note="Description of Artificial Sequence: Synthetic coding sequence"
  source 1..3036: mol_type = other DNA
atgccggctagtgcgcctcctcgtaggccaagacctcctcccccttccttgagtctccttctcgtcctgctggggttgggcggacgccggctcagggcagaaccaggcgacggcgcccaaacctgggcccgtttttcgagacccccagcacctgaagcggccgggcttttccaagggacattcccggacggcttcctgtgggctgtggggagcgctgcttatcagaccgaaggagggtggcagcagcacgggaagggcgcctcaatctgggacacatttacacatcacccgttggcccctcctggcgactctcgaaacgcctccctcccgctcggagctccctccccactgcaacccgcaaccggagatgttgcatctgacagctacaataacgtctttcgggacaccgaggcacttagagaattgggcgtgacacattacagattcagcataagttgggccagagttctcccaaatggctccgccggggtccccaatagggagggactgcggtattatcgcagattgttagagagactgagggagcttggcgtgcagccagtagtgactctgtatcactgggacctaccacagcggctacaggacgcctatgggggatgggcaaatcgagccttggccgaccactttagggattacgctgaactgtgttttcgacacttcggcgggcaagtgaaatactggattacaatagacaacccctacgtagtcgcctggcacggctacgcgactggacggctcgcgccaggcattcgtgggagtcctagactgggatacctcgtggcacacaatctactgctggcacacgccaaggtttggcatttgtacaatacatctttccggccaacacagggcggtcaggtgagcatcgccctgagttctcactggattaacccacgcaggatgacagatcattctattaaggaatgccagaagagcttagacttcgtgttgggctggtttgccaaaccggtgttcattgatggtgactacccggaaagcatgaagaacaatctttcttcaatactgccagatttcacagagtcagagaagaagttcatcaaagggacggcagatttttttgctctttgtttcggcccaacattgtcatttcaactattagacccccacatgaagttccgccagctagaatctcctaacctcagacaactgctgagttggattgacctggagttcaatcatcctcaaattttcatcgtggaaaacggatggttcgtttcaggcaccacgaaaagggacgacgcaaagtacatgtactatctgaaaaagttcatcatggaaaccttgaaagccatcaagctcgacggcgttgacgttattggatacacggcctggtctcttatggatggattcgaatggcatagggggtactctattagacgagggctcttctatgttgactttctaagtcaggataaaatgctcttgccgaagtcaagtgccctgttttaccagaaactgattgagaaaaacggcttccccccactgcccgagaatcagcccctggaaggcacatttccctgtgactttgcctggggggtggtggacaattacattcaggtggatactactctcagccagtttaccgatctgaatgtctatctatgggatgtgcaccatagtaaaaggctcatcaaggtcgacggggtcgtcactaagaagaggaaatcctactgcgtcgattttgcagccatccagccccagatagcactgctgcaggaaatgcacgtgacccactttagattttcgctcgattgggctcttatcttgcctctggggaaccagtcacaggtaaatcacacaatcctgcagtattaccgatgtatggcaagtgagttggtgagggtgaacatcaccccggttgttgccctttggcagcctatggcacctaaccagggcctgcctcgtctattagcccggcagggggcctgggagaacccatataccgccctcgctttcgccgagtacgctagactctgctttcaagagctgggacaccatgtcaagctatggataactatgaatgaaccctacactcgcaacatgacttatagcgccggccataaccttcttaaggcccacgcactggcttggcatgtgtataatgagaaattccgacacgctcaaaatggcaaaataagtatagccttgcaggctgattggatcgagcccgcatgtccgtttagccagaaggataaggaagtcgccgaaagagtgcttgaatttgatatcgggtggcttgctgagcccattttcggctccggcgactacccatgggtgatgcgggactggctaaaccagcgcaacaatttcctcctgccttacttcactgaggacgagaagaagctgatacagggaacgttcgacttcctcgctctgtctcattataccaccattctcgtcgactctgagaaagaggaccccatcaagtataacgattacttagaagttcaagaaatgaccgacattacatggctaaattctccaagccaggttgccgttgttccttggggtctgcgcaaggtcctgaactggttgaagttcaaatatggcgacctccccatgtacataattagcaatggcattgacgatggtttacatgcagaggatgaccagcttcgagtctactacatgcaaaactatatcaatgaagcgttaaaggcgcacattctggacggcataaacctgtgtggatacttcgcctattcattcaacgatcggaccgcaccaagatttgggctgtatcgatacgccgccgaccaattcgagcccaaggccagcatgaagcattatagaaagatcattgactccaacggttttccagggcccgaaactctcgaaagattctgccccgaggagtttacggtgtgcacggagtgtagtttctttcataccagaaagtccctcctggcatttatagccttcctgttctttgcctcaataattagtctgtccctgattttttactacagcaaaaaagggagacgctcatataag

SEQ ID NO: 15067 - DNA, 3036 bp, synthetic construct; identical to SEQ ID NO: 15066
  misc_feature 1..3036: note = source = /note="Description of Artificial Sequence: Synthetic coding sequence"
  source 1..3036: mol_type = other DNA

SEQ ID NO: 15068 - DNA, 3036 bp, synthetic construct; identical to SEQ ID NO: 15022
  misc_feature 1..3036: note = source = /note="Description of Artificial Sequence: Synthetic coding sequence"
  source 1..3036: mol_type = other DNA

SEQ ID NO: 15069 - DNA, 3036 bp, synthetic construct; identical to SEQ ID NO: 15022
  misc_feature 1..3036: note = source = /note="Description of Artificial Sequence: Synthetic coding sequence"
  source 1..3036: mol_type = other DNA

SEQ ID NO: 15070 - DNA, 3036 bp, synthetic construct
  misc_feature 1..3036: note = source = /note="Description of Artificial Sequence: Synthetic coding sequence"
  source 1..3036: mol_type = other DNA
atgccagcatccgcgcccccacgcagacctcgcccccctccaccatccctcagcctccttttggtgcttctgggcctgggtggacgacggctcagggctgagccaggggatggagcgcaaacctgggcacgattttcccgcccgcctgcgccagaagcagcaggactcttccaaggaacgtttccagacggctttctgtgggccgtgggaagcgcagcgtaccagactgaaggtggctggcaacaacatggtaagggagctagcatatgggatacgtttactcatcatccgttggcgcctcccggggactcgaggaacgcatcgctgcctctgggggcgccatcccctcttcaaccggcaactggtgatgtggcatccgattcgtacaataacgtctttagggataccgaagcattgcgtgaattgggagtcactcactacagattctccattagctgggcccgcgtcttgcctaacggctcagcgggtgtgccaaacagggaaggactgagatattaccggcgcctcttggaacggctccgtgagcttggggtccagccagtggtgaccctctaccactgggaccttcctcaacggctgcaagatgcatacgggggctgggctaacagagcactcgcggaccattttagagactatgcggagctgtgctttagacattttggaggacaggtgaagtactggattacgatcgataatccttacgtcgtggcatggcatggctacgcaaccggaaggcttgcccccggcatacgcggatccccaaggcttggttacctggttgcacataatctgctgctcgctcatgcaaaggtgtggcatttgtataacacctcctttcgccctactcagggaggacaagtgtccatagcacttagcagccactggattaatcccaggcgaatgacggatcattccattaaggaatgccaaaagagcttggacttcgtcctgggatggtttgccaaacctgttttcattgatggagattacccagaaagcatgaagaacaatctttcctctatcctgcctgacttcactgagtctgaaaagaagttcataaaaggtaccgccgacttctttgccctgtgtttcggaccgaccctctcctttcaacttctcgaccctcatatgaagtttagacagctggagtcgccaaaccttagacaactgctgtcatggatcgaccttgagttcaaccatccacaaatctttatagtcgaaaacggatggttcgtgtcaggtacgaccaagagagatgatgcaaagtatatgtattacctgaaaaagttcataatggagactttgaaggcgattaaactcgacggagttgacgtcatcggatacacggcctggagccttatggatggtttcgagtggcaccggggttacagcattcggagggggctgttctacgtggactttctctcccaggataagatgctgctgccaaagagctcggccctcttttaccagaagctgatcgaaaagaacggtttcccacccttgcctgaaaaccagcctctggaaggaacttttccttgcgactttgcatggggagtggtggacaactacattcaggtggacactaccctttcgcaattcactgatctgaatgtgtacctttgggacgtgcatcactcgaaacgcctcatcaaggtggacggtgtagtgactaaaaagagaaaatcgtactgcgtggatttcgcagccattcagcctcagatcgctcttttgcaggagatgcacgtgacccattttagattttccctggactgggctctgattcttcccctcggtaatcagagccaagtcaaccacactattcttcagtactatagatgcatggcatcagaactggtccgtgtcaacattacccctgtggtagcactttggcagcccatggccccaaatcaaggacttcccagacttctggcacgacagggtgcctgggaaaatccttacaccgctctggcatttgcggagtacgccaggctttgttttcaggagttgggacatcacgtgaaattgtggattactatgaatgagccttacacccgtaatatgacttacagtgcaggccataacttgcttaaagcacatgccctcgcatggcacgtctacaatgaaaagtttaggcacgcacaaaacgggaagatctccatcgcactccaagcagattggatcgagcccgcatgtccttttagccaaaaggataaggaagtggcagaacgggtactggaattcgatattggttggctcgcagaaccaatattcggaagcggcgactacccgtgggtgatgcgcgattggctgaatcagagaaataactttttgttgccctactttactgaagatgaaaagaaactgatccaaggtaccttcgactttctggcgcttagccattatactactatccttgtggacagcgaaaaagaagatccaattaagtacaacgattacctggaggtgcaagagatgactgatatcacgtggttgaactcgccgtcacaggttgccgtggtcccctggggccttcggaaagtgctgaactggctgaagttcaaatacggtgatcttcctatgtacattatctcgaacggcatcgatgacgggcttcacgctgaggatgaccaacttcgcgtctactacatgcaaaactacatcaacgaagccctgaaggctcatatcctcgatggaattaacctctgtggttactttgcatactcgtttaacgataggaccgccccaaggttcggtctttaccgatacgcagcagatcagtttgaacctaaagcctcaatgaaacattacagaaagattatcgattcaaacgggtttcctggacctgaaaccctggagcgtttttgtccggaagaatttactgtgtgtacggagtgttccttttttcatactagaaagagcctgcttgcattcattgccttcctgtttttcgcctccatcattagcctcagcctgattttctactactcaaagaaaggacggagaagttacaag

SEQ ID NO: 15071 - DNA, 3036 bp, synthetic construct; identical to SEQ ID NO: 15070
  misc_feature 1..3036: note = source = /note="Description of Artificial Sequence: Synthetic coding sequence"
  source 1..3036: mol_type = other DNA

SEQ ID NO: 15072 - DNA, 3036 bp, synthetic construct
  misc_feature 1..3036: note = source = /note="Description of Artificial Sequence: Synthetic coding sequence"
  source 1..3036: mol_type = other DNA
atgcccgcatccgctcccccaaggagaccccgcccacctcctccatccttaagtttgctgttggtgcttctcggattaggtggccgtcgcttgagggccgagccaggtgatggggcccaaacctgggcgcggttctctcgcccgccagctccagaggctgcaggcctgttccaaggcacattccctgacggctttctgtgggctgtcggaagcgctgcatatcagactgaagggggctggcagcagcatgggaagggtgcctccatctgggacacattcacacatcatccactggctcccccgggtgactcccggaatgcgtcgcttccactcggagctccgtcacccttacagccagctaccggcgacgtcgcctccgactcctataacaatgttttcagggacacggaggccctccgcgaactcggcgtgacacattaccgtttttccattagttgggctcgcgtgctgccgaacggctcagccggtgtgccaaacagggaagggctgcggtattatcgcagattgttggaacggctgagggaactgggggtgcaacccgtggtcactctttatcattgggaccttcctcagcgtctccaggacgcctatggtgggtgggctaaccgcgcactagccgaccacttccgggactatgctgaattgtgctttcgtcactttggcggccaggttaaatactggatcacaattgacaacccttatgtcgtcgcgtggcacggttatgcaaccggcaggttggcaccaggtatccgcggtagcccccgactgggctacctggtcgctcacaacctcctcttggctcacgcaaaggtgtggcatctgtacaatacatcatttagaccgacgcagggcggtcaggtgtccattgccttatcaagccactggattaatcccagaaggatgacagatcacagtattaaggagtgtcagaagtcgctcgacttcgtcctgggctggttcgcaaagcctgtttttattgatggagactatcccgaaagtatgaagaataacctttcttcaatccttcctgacttcaccgagtccgaaaaaaaatttatcaaggggaccgcagatttttttgccctgtgcttcggccccactctcagcttccagttactggacccacacatgaagttccggcaactagaatcacctaatctacgacaactgctaagctggatagacctggaattcaatcacccccagattttcatcgtggaaaacggctggttcgtgagtggaaccaccaagagggatgacgccaagtatatgtactaccttaagaaatttattatggaaactctgaaggccattaagctagacggtgtggatgtgatcggctacactgcttggtcacttatggatgggtttgagtggcaccggggatatagtatccgccgcgggcttttttatgtggactttctgtcccaggataaaatgctgctgcccaagagcagcgctctgttttaccaaaagctaattgagaagaacggctttccacctcttcccgaaaatcagccgctcgaaggcacgtttccatgtgacttcgcctggggggttgtggacaattacattcaggttgacactacactgtcccagtttacagatctgaatgtgtatctctgggacgtgcatcattcgaagcgtttgataaaagtcgacggggtggtaactaaaaaaagaaagagctactgtgtggatttcgccgcaattcagcctcagattgccctactgcaggagatgcacgttacacattttcgattctccctggactgggcactgattttaccattaggaaaccagtcacaggtgaatcatactatcctgcagtactaccggtgtatggccagcgaactggtccgagtcaatatcacccccgtggtggcactgtggcaacctatggcccccaatcaaggcctgcctagactgctcgcgagacagggggcctgggaaaacccttacactgcgctggcattcgccgagtacgcccggctgtgcttccaggaactggggcatcatgtgaaactatggatcaccatgaatgaaccctatacccgcaacatgacatattcagccggacataatttattaaaagctcacgctctggcatggcatgtgtacaacgagaaattcagacacgctcagaacggaaagatttcaattgccctgcaggccgactggatcgaaccggcttgcccttttagccaaaaggacaaggaggtggccgaacgtgttctggagttcgacatcggttggctggctgaaccgatatttggatcaggggattacccatgggtgatgagagattggctcaatcagaggaacaatttccttctcccttactttactgaggacgagaagaagctgatccagggtacgttcgatttccttgctcttagccactacacgaccatcttggtggatagtgagaaagaggatccgattaagtataacgattatctagaggtccaggaaatgactgacatcacctggcttaattcaccgagtcaggtcgctgtggtgccttggggtcttagaaaagtgctcaactggctcaaatttaagtatggcgacctgccaatgtacattatttcaaatggcatagacgatgggttgcatgcggaggatgaccaactgcgagtgtactatatgcagaactatataaacgaagcactcaaggcccacatcctcgatggtattaacctctgtgggtacttcgcttactcttttaatgaccgcacagctcctcgattcgggctctatcggtacgcagccgaccaattcgaaccgaaggcgagcatgaaacactaccgcaaaataatcgacagtaacggattccctggcccggagaccctagaacgcttttgcccagaagagttcactgtttgcaccgagtgttcctttttccatacacggaagtcactgctcgctttcattgccttcctgttctttgccagcattatctcgctgagtctgatattctactattccaagaaaggcaggcgtagctacaaa

SEQ ID NO: 15073 - DNA, 3036 bp, synthetic construct; identical to SEQ ID NO: 15072
  misc_feature 1..3036: note = source = /note="Description of Artificial Sequence: Synthetic coding sequence"
  source 1..3036: mol_type = other DNA

SEQ ID NO: 15074 - DNA, 3036 bp, synthetic construct
  misc_feature 1..3036: note = source = /note="Description of Artificial Sequence: Synthetic coding sequence"
  source 1..3036: mol_type = other DNA
atgcctgcaagcgctccacctcggcggcctaggcctcctcctccatctctctctttgttgcttgtgttattagggttggggggtcgccggttgcgggccgagcccggggacggtgcacagacttgggctaggttctctaggccgcccgcgccagaggctgctggattattccaaggcacattccccgacggtttcctttgggctgtcgggtccgctgcctatcagactgaaggtggttggcagcagcacgggaagggggcatcaatctgggatacattcacccatcacccgcttgcaccacctggcgactccagaaatgcctctctgcctctgggggctccctcccccctgcagccagcgacaggggatgtagcttccgactcctataacaacgtgtttagagacactgaggcgctgagagagctaggcgtgacccactaccgatttagcatcagctgggctcgagtcctacccaacggcagtgcgggggtccccaatcgggagggtcttagatactaccgccgcctgctcgagagactccgtgagctcggagtgcagccagtcgtaaccttataccactgggatctgccgcagcgcctacaagacgcatacggaggctgggctaatcgggctctggctgatcactttcgggattatgcagagctttgttttcggcacttcggcggccaggtcaagtactggataactattgacaacccctacgtggtggcctggcatggctacgccacaggtcggttggcacctggcattagggggtctccgcgtctcgggtacctggtggcacacaatctgctgcttgcccacgcaaaagtatggcacctgtacaatacttcattccggcctacacaggggggccaggtctcaatagcgctttctagccattggattaatccgagacgcatgactgatcactccattaaagaatgccaaaagagcctcgacttcgtcttggggtggtttgcaaaacctgtctttatcgatggtgactatccagaaagcatgaaaaataacttgagttccatcctcccagactttacagagtccgagaaaaagttcattaaaggtaccgcagacttttttgcgctctgtttcggcccgacactctcttttcaattactggatccccacatgaagttccgtcaattggaaagtcccaacttgcgtcaactactaagttggattgaccttgaattcaatcaccctcagatattcattgtcgagaatggctggtttgtctccggcaccactaaaagagacgacgccaaatacatgtactacctgaagaaattcattatggagacacttaaggcaattaaactggacggggtggacgtgattgggtatacagcttggagcctgatggatggttttgaatggcaccggggatacagcatcagacgtggtcttttttatgtcgacttccttagtcaagataaaatgttgctcccgaaatcttcggcactcttctaccagaagttaatcgagaagaacggattcccacccctacccgaaaaccagccgttagagggtaccttcccttgtgatttcgcttggggggtcgtagacaactacatccaggtggatactacactcagccagttcactgacctaaatgtgtatctctgggacgtgcaccactcgaagaggctgataaaggtcgatggcgtagtgaccaagaagcgcaagagctattgcgtggactttgcggccatccaacctcagattgcgctgctgcaagaaatgcacgtgacccatttccgtttcagccttgattgggccctgatcctgcccctggggaatcagtctcaggtaaatcatactattcttcagtattatcgatgtatggcttccgaacttgtaagggtcaacattaccccggttgtagctctctggcagcctatggcgcccaatcagggcctccctcgcttactggcccgtcagggcgcttgggagaatccatacactgcacttgccttcgccgaatacgctcgtctatgcttccaggaacttggtcatcatgtaaagttatggatcacaatgaatgaaccgtacaccagaaacatgacatactccgctggccacaatttactgaaagctcatgcgcttgcctggcacgtgtataacgaaaagtttcggcacgcacagaatggcaaaatctccatagccctccaagctgactggatcgagcctgcatgccccttctcacagaaagataaagaggttgccgagcgagtactggagttcgacatcggctggctggccgagcctatttttggtagtggtgactacccatgggtcatgagggactggctgaaccagagaaataatttcctgctgccctacttcacggaggacgagaaaaaattaatacagggcaccttcgatttcctcgcgctgagccattataccacgattttggttgactccgaaaaagaggaccctattaagtacaatgactatctggaggtgcaggagatgacggatatcacttggctcaatagtccatcccaggtagctgtggtgccctggggcctgaggaaagtactcaattggttgaagtttaaatatggggacctcccgatgtatattatcagcaacggaattgacgatggtctccatgctgaagacgatcagctgcgagtgtactatatgcaaaactacattaacgaagccctgaaggctcatattctggatggaataaacttgtgcggctactttgcatatagttttaacgatcgcaccgcccctcggttcggcctgtatcggtatgcagccgatcagtttgagcctaaggccagtatgaaacactaccgcaaaatcatcgactctaatggatttccagggcctgaaactctggagcgcttttgtcccgaggaatttaccgtttgcaccgaatgctctttctttcacaccaggaagagtctgctagcatttattgccttcttattttttgcatctataatttccttatccctgatcttttactattcaaaaaagggtcgcagatcctataag

SEQ ID NO: 15075 - DNA, 3036 bp, synthetic construct; identical to SEQ ID NO: 15074
  misc_feature 1..3036: note = source = /note="Description of Artificial Sequence: Synthetic coding sequence"
  source 1..3036: mol_type = other DNA

SEQ ID NO: 15076 - DNA, 3036 bp, synthetic construct
  misc_feature 1..3036: note = source = /note="Description of Artificial Sequence: Synthetic coding sequence"
  source 1..3036: mol_type = other DNA
atgcctgcctccgctccaccaaggcggcctcgcccgccccctccaagtcttagcctgcttctggtcctgctgggtttgggcggccgaagacttcgagctgagcccggcgacggcgcccagacttgggctcggttttctaggccaccggcccctgaggccgcgggcctgtttcagggcacgttcccggacggcttcctgtgggccgtgggctccgccgcttatcagacggagggaggatggcagcagcacggcaagggtgccagcatttgggatacgtttactcaccacccactggccccgccgggcgattcaaggaatgcaagcctcccattgggggcgccatcccctctccagcccgccaccggggatgtcgcttctgattcttacaacaatgtctttcgcgacactgaggcgctgagagaacttggcgtgacccactaccgctttagcatctcttgggctagggtcctgcccaacgggtctgctggggtgcctaatcgcgagggactgcgctactaccgacgcctcttggagaggctgcgggaattgggcgttcagcccgtggtgacgctgtaccactgggacctcccacagaggctccaagacgcttatggcggttgggccaacagggccctggctgatcattttcgagattacgccgaactgtgtttcaggcactttggggggcaggtcaagtactggattacaatcgataatccctacgtcgtggcctggcacggatacgccactggaaggctggcgcctgggatccgagggagtcctcggctcggttatctggttgcacacaacttgctgttggcccacgctaaggtttggcacctgtacaacacttcatttagaccgactcaagggggccaagtgtctatcgctctgagctcacactggatcaacccccgccggatgaccgatcactcaatcaaggagtgtcagaagagcctggattttgtcctgggatggtttgcaaagcccgtgttcatcgacggagactacccggagtccatgaaaaacaacctgtcttcaattctgcctgattttactgagtcagagaaaaaatttatcaagggcaccgccgacttcttcgccctgtgctttggtccgaccctttccttccagcttctggaccctcacatgaaatttcggcagctggaaagccccaatttgcgacagctgctcagttggatagatctcgagtttaaccatcctcaaatattcatcgttgagaatggctggtttgtgagcggaactaccaagagagacgacgctaagtacatgtactacctgaaaaagtttattatggagacgctgaaggccattaaattggacggggtggatgtcataggctacacggcatggtccctgatggatggtttcgagtggcaccgcgggtacagcattcggaggggcttgttttacgttgattttctctcccaggataaaatgctgctgcccaagtcatcagctctcttctatcagaagctgatcgagaagaacgggttcccaccactgccagagaaccagccattggaagggacctttccctgcgatttcgcctggggtgtcgtggataactatatacaggtggatacaactctgtcccagtttacagatctgaatgtatatttgtgggatgtgcaccactctaaacggttgatcaaggtggatggagtcgtgacgaaaaagaggaagagctactgtgtggactttgcagcaattcagccgcagattgcgcttctgcaagaaatgcacgtcacgcacttccgcttctcactcgactgggcgctcattctgccactgggcaaccaatcacaggtgaaccacacaattctgcagtactaccgatgtatggccagcgaattggttcgcgtcaacatcacgccggtggtcgccctgtggcagccaatggcccccaatcagggtctgcctaggctgctggcccgacagggggcctgggagaacccatacacagccttggcattcgcagagtacgcacgactgtgctttcaggagctgggtcatcacgtcaagctctggatcacgatgaatgagccttacacccgcaatatgacctatagcgcggggcataatttgctgaaagcacatgccttggcctggcacgtctataatgaaaaatttaggcacgcgcagaacggtaagatttctatcgcacttcaggcagactggatagagcctgcttgccccttctctcagaaagacaaggaggtcgctgagagggtgctggaattcgatattggatggcttgccgagcctatcttcggcagtggcgactacccctgggtcatgcgggattggttgaaccagcggaataatttcttgcttccctatttcacagaagacgagaaaaagctgatccagggtacctttgacttccttgccctttcccactatactacaattctcgtggactccgagaaggaggatccgattaagtacaacgactatctggaggtacaggagatgacagatatcacttggctgaactccccctcacaggtagcagtagtaccgtgggggctgcggaaagtgttgaactggctgaaattcaaatacggtgatctgccaatgtacatcatcagcaatggaattgacgatggactgcacgctgaggacgaccagcttagagtttattacatgcaaaactatataaacgaagctctcaaagcccatattttggatggcatcaatctgtgtggatactttgcctacagtttcaacgacagaacggcgcctcgcttcggactgtacaggtacgcagccgaccagtttgagccgaaggcttccatgaaacactatagaaagatcattgactctaacggcttcccagggcctgaaacccttgagagattctgcccagaagaattcaccgtctgcactgaatgcagcttctttcatacgcgcaagtcacttcttgccttcatcgcttttcttttttttgcatctattatctccttgtcactcattttttactattccaagaaaggccgccgcagctacaag

SEQ ID NO: 15077 - DNA, 3036 bp, synthetic construct; identical to SEQ ID NO: 15076
  misc_feature 1..3036: note = source = /note="Description of Artificial Sequence: Synthetic coding sequence"
  source 1..3036: mol_type = other DNA

SEQ ID NO: 15078 - DNA, 3036 bp, synthetic construct
  misc_feature 1..3036: note = source = /note="Description of Artificial Sequence: Synthetic coding sequence"
  source 1..3036: mol_type = other DNA
atgcctgcctccgcaccgccgcggcgccccagacctccaccaccttcgctgtcactgctccttgtgcttctggggctgggaggcagacggctgagagccgaacctggagatggtgcccagacgtgggcacgcttttcccgaccacccgcacccgaagcagcaggtctgtttcaagggacctttccggatggatttttgtgggcggtcggaagcgcagcataccaaaccgaaggaggttggcagcagcatggtaaaggggcctcgatttgggatacctttactcatcaccctctggcacctcctggcgactctcgaaacgcaagcctgcctcttggagccccttcaccgctgcaaccagcaaccggtgatgtggcgtcggactcttacaacaacgtgttccgggacaccgaagcactgagggaactcggtgtgacgcattaccgattttcgatctcgtgggcccgggtcctccctaacggctcggctggcgtgcctaatcgggagggactgagatactacaggaggcttcttgaacgtttgcgtgaacttggagtgcagcctgtggtgactctgtaccattgggacctgccacaacgactgcaagacgcatacggtggatgggcaaatcgcgcactcgcggatcactttagggattacgccgaattgtgtttccgccattttggaggacaggttaagtactggatcaccatcgataatccatacgtggtcgcctggcatggatacgccaccggacgtttggccccaggaattcgcggatcccctcggctcgggtaccttgtggcccataaccttctgctggcacatgcaaaggtgtggcatctgtacaacacttcctttcgtccaacgcaaggtgggcaagtgtcaattgccctgtctagccattggattaatcctcggaggatgacggaccattccattaaagaatgtcaaaagtccttggactttgtccttgggtggtttgcaaagccagtgttcattgatggtgattaccctgaatccatgaagaataacctctcctcaattctccctgacttcaccgagagcgagaagaagttcataaaggggacggcagacttttttgccctttgcttcggcccaacccttagcttccaactgttggatcctcatatgaagttccggcagctggagtcgccaaatctcaggcaattgctcagctggattgaccttgagtttaaccatcctcagattttcatagttgaaaacggctggtttgtcagcgggacgactaagcgagatgatgcaaaatacatgtactatctcaagaagttcattatggagactcttaaagccattaaacttgatggagtggatgtcattgggtacaccgcatggagcctgatggatggttttgagtggcatcgcggttacagcattagaagaggattgttctacgtcgattttctgtcacaggataagatgctgctccccaaatccagcgctcttttctaccagaaactgattgaaaagaatggattccctcctcttccagaaaaccaaccactggagggcacttttccttgcgattttgcttggggtgtggtcgataactacattcaagtggataccactctgtcacaattcaccgaccttaacgtgtacctttgggacgtgcaccattccaaacgcctgatcaaagtggatggcgtggtgaccaagaagcggaaatcgtactgcgtggattttgcggccatccaacctcaaattgcacttctccaggaaatgcatgtgacgcatttccggttttcactggattgggccctcattctgccacttggtaatcagagccaagtcaatcataccatccttcaatactatagatgtatggcttcagaattggtgcgagtcaacattactccggtggtggccctttggcagccaatggcgcccaaccaaggtctgccacgactcctcgcaaggcaaggtgcatgggaaaacccttacaccgctcttgcattcgcagaatacgcaagactttgttttcaggagctgggacaccatgtcaagctctggattaccatgaatgagccttataccagaaacatgacctacagcgcaggacataacctgctgaaagcgcacgcgcttgcatggcatgtgtacaacgaaaagttccgccacgcccaaaatggaaagatcagcatcgcgcttcaagcagattggatcgagcccgcgtgtcccttttcgcagaaggataaggaagtcgcagaacgcgtgcttgaatttgatatcggatggttggccgaacctattttcggatccggagattacccctgggtgatgcgcgattggctgaaccagcgcaacaacttcctccttccatatttcactgaggatgaaaagaagctcatccagggaacttttgattttctcgcgttgtcacattataccaccattctggtggattccgaaaaggaagatcccatcaagtacaacgattacctggaggtccaggaaatgaccgatattacctggttgaactcgcctagccaggtggcagttgtgccatgggggttgaggaaggtcctcaactggctcaagtttaagtacggggaccttcccatgtatatcatttcaaacggtattgacgacggactgcatgcggaggacgatcagcttcgggtgtactatatgcagaactacatcaatgaagcactgaaggcacacattcttgatggtattaacctctgtggctactttgcatactcatttaacgaccgcaccgctcccaggtttggtttgtacaggtatgcggccgatcaatttgagcctaaagcgtccatgaaacattacagaaagattatcgacagcaacggttttcctggtccagaaacccttgagcgattttgtcctgaggaatttactgtctgcactgaatgctccttctttcacactagaaaatccctcctcgcattcattgctttccttttcttcgcatccatcatttcactttcattgatcttttactactcgaagaagggtagaagaagctacaag

SEQ ID NO: 15079 - DNA, 3036 bp, synthetic construct; identical to SEQ ID NO: 15078
  misc_feature 1..3036: note = source = /note="Description of Artificial Sequence: Synthetic coding sequence"
  source 1..3036: mol_type = other DNA

SEQ ID NO: 15080 - DNA, 3036 bp, synthetic construct
  misc_feature 1..3036: note = source = /note="Description of Artificial Sequence: Synthetic coding sequence"
  source 1..3036: mol_type = other DNA
atgccagcatctgcgccgccaagacgcccgcggccgccgccgccttccctgtcactcctgctcgtgctcctcggtctgggtggccgccgcctccgtgctgaacctggggacggtgcgcagacctgggcccgcttcagcagaccaccggccccggaagcggctggattgttccaagggacgtttccagacggcttcctttgggcagtgggttccgcagcttaccagactgagggcgggtggcagcaacatggaaaaggagcctccatttgggacactttcacccatcatccactggcaccacctggggactcccgcaatgcttccctgccgctgggagccccttcacccctgcaacctgccaccggtgatgtggctagcgactcctacaacaatgtgttccgcgacacggaagccttgcgggaactcggagtcacccactatcggttcagcatctcatgggcgagagtcctgccgaacgggtcagctggagtcccaaaccgcgagggactgcgctactacagacggctgctggagagactgcgcgaactcggagtgcagccagtggtgactctgtaccactgggacctgccacagaggcttcaggatgcgtacggaggatgggccaatcgggccctcgccgaccattttcgcgattacgcggagctttgttttcgccatttcggtggacaggtcaaatactggatcaccatcgataatccgtacgttgttgcttggcatggatacgcaactggccggctggcccctggcatccgagggtccccccgcctcggatacctggtggcgcacaatctcctcctcgcccatgctaaagtgtggcatctctacaacacttcgttccgcccgacccagggcggacaggtgagcatcgcgctcagctcgcattggatcaacccgcgacgcatgactgatcacagtatcaaggaatgccagaagagtttggatttcgtcctgggctggttcgccaagcccgtgttcatcgacggagattaccccgaatcgatgaaaaacaatctctcgtcgatcctgccggatttcactgaaagcgagaaaaagttcattaagggaaccgcggactttttcgccctgtgctttggccctaccctctcattccaactgttggacccgcacatgaagttccggcagctggaatcacccaacctgagacagctgctctcctggatcgacctcgaattcaaccatccccaaatcttcatcgtggagaacggatggtttgtctcagggaccactaagcgcgatgacgcgaagtatatgtattacctgaagaaattcattatggaaactctgaaggccattaaactcgacggtgtcgatgtgatcggatacaccgcgtggtcactcatggacgggttcgagtggcaccgcggttacagcatccgtaggggcttgttctacgtggatttcttgagccaggataagatgttgttgccaaagtccagcgctttgttctaccaaaagctgatcgaaaagaacggctttccaccgcttccggagaaccagccattggagggtacgttcccctgcgatttcgcttggggtgtggtggacaattacatccaagtggacactactctgtcgcagttcaccgatctgaatgtgtatttgtgggacgtgcaccattcaaagcgcttgattaaggtggacggcgtggtgaccaagaagcgcaagtcctactgcgtggattttgccgcaatacagcctcaaatcgcgctgctgcaagagatgcatgtgacgcactttcggttttcactggattgggcacttatcctgccgctcggaaaccagtcccaggtcaatcacactatcctgcagtactatcggtgtatggcttccgaactggtcagagtcaacataacgcctgtggtcgccctttggcagccgatggcgccgaaccaaggtttgccgcggcttcttgccagacaaggggcatgggaaaacccgtacaccgcactcgccttcgccgaatacgcgaggctgtgctttcaagagctgggacatcatgtcaagctctggatcacgatgaacgagccgtacactcgcaacatgacctacagcgccggtcataacctgcttaaggcccacgccctggcctggcacgtgtacaacgagaagttccgccatgcccagaacggtaagatctcgatcgcccttcaggcagactggatcgaacctgcctgcccattctcccagaaggataaagaagtcgctgaacgggtgttggaattcgatatcggctggctcgccgagccgatcttcggctcgggggactacccctgggtcatgcgggactggctcaatcaacgtaataacttcttgttgccttacttcacggaggacgagaagaaactgatccaaggtaccttcgacttcctggctctgtcacactataccaccatcctcgtggattccgagaaggaggaccccatcaagtacaatgactacctggaggtgcaggaaatgaccgatatcacctggctgaactctccaagccaggtggcagtggttccgtgggggttgagaaaagtgctgaactggctcaagttcaaatacggcgatctgcccatgtacatcatcagcaacggaatcgatgacggcctccatgcggaggacgatcaacttcgggtctattacatgcagaactacatcaacgaggccctgaaggctcacatcctggatggcatcaatctgtgcggttacttcgcctactcgtttaacgaccggactgccccacgtttcggcttgtaccggtacgccgccgaccaattcgagcctaaagcatcgatgaaacactaccgcaagatcatcgactcgaacggattccctggcccagaaacccttgaacgattttgcccggaggaatttactgtctgtaccgaatgctccttcttccatacccggaagtcactgctggcatttatcgcgttcctcttcttcgcaagcatcatttcactctccctgattttctactactcgaagaagggccgacggagctacaag

SEQ ID NO: 15081 - DNA, 3036 bp, synthetic construct; identical to SEQ ID NO: 15080
  misc_feature 1..3036: note = source = /note="Description of Artificial Sequence: Synthetic coding sequence"
  source 1..3036: mol_type = other DNA

SEQ ID NO: 15082 - DNA, 3036 bp, synthetic construct
  misc_feature 1..3036: note = source = /note="Description of Artificial Sequence: Synthetic coding sequence"
  source 1..3036: mol_type = other DNA
atgcctgctagcgccccgccacgtcgccccagacctccccccccctccctgagcctgctgttagtcctcttgggcttggggggtcgtagactgagagctgaaccaggagacggcgcacagacctgggccaggttcagccgcccaccagcccctgaggcagccgggttgttccagggaacattccccgacggtttcctttgggcagtcggttcagcagcctatcagactgagggtggctggcagcagcatggaaagggggcctctatatgggatacattcacgcaccaccccttggcccccccgggtgacagcaggaacgcatctctacctcttggtgccccctctcctctgcaacccgcgactggggacgtggccagcgacagttataataacgtgtttagagacaccgaagcactgcgtgagctgggggtcacgcactaccgcttcagcatctcatgggcccgtgtgcttcccaacgggtctgctggagtgcctaaccgagaagggctccgttactataggaggctcttagagcgactgagggagctcggcgtccagcccgtggtgaccttataccactgggacctgccccagagactccaggatgcttatggaggttgggcaaacagagctctggccgatcatttccgggattacgcagagctgtgctttcgccattttggagggcaggtgaaatattggataacgatcgacaacccgtacgtggtcgcttggcacggatacgctacaggtcgcctggctcccggaatcaggggctccccaagactggggtatcttgtggcacacaacctgcttctggcccatgcgaaggtgtggcatctgtacaacacatcattccgccctacacaagggggacaagtgagtatcgcattaagctcccattggatcaacccacggaggatgacagatcattccattaaagagtgtcagaagagtctggacttcgtgttaggttggtttgccaaaccagtgtttatcgatggcgactaccccgagagcatgaaaaacaacctgtcttccattctgcctgattttacagagtcagaaaagaaatttataaagggaactgcggacttcttcgctctgtgttttggacctacactgtcttttcagttgttggatcctcatatgaaatttaggcaattggaaagtcctaatctccgacaactgctgtcatggattgacttagaattcaatcatccccagatattcatagtcgagaatggttggtttgtctcgggcacaacaaaaagggatgacgctaagtatatgtactatctcaaaaagttcattatggagacattgaaggccatcaaactggacggagtggatgtcatcggatacactgcctggtcactcatggacgggtttgagtggcatagagggtactctatacggcgtggccttttctacgtcgatttcctgtcccaggacaagatgctgctgcctaagtcctccgctcttttttaccaaaagcttatcgaaaaaaatggcttcccgcctcttccggaaaatcagcctctcgaggggacgttcccttgtgacttcgcttggggagttgtggataattatatacaagtggacactacactgtcacaatttacagacctgaatgtatacctgtgggacgtacatcactccaaaaggctcatcaaggttgatggggtcgtgacaaagaagagaaagtcctattgtgtagacttcgccgccatacagccccagattgcacttctgcaggaaatgcacgtgacccacttccggttctctctggactgggcattaattctgcccttggggaaccagagtcaggtcaaccataccatcctccagtattatcggtgcatggcctccgaattggtcagagttaacattacaccagtggttgcactctggcaacccatggcaccgaatcagggcctgccacggctacttgcccgccaaggggcatgggagaacccatatacagctctcgcctttgccgaatatgcccgcttgtgttttcaggaactgggacaccatgtcaagctctggatcactatgaacgagccgtacacgagaaacatgacttactcagcaggacacaacctccttaaagcacacgctctggcgtggcacgtgtataacgaaaagttcaggcacgcccaaaacgggaagatatcaatcgctctgcaggctgattggattgaacctgcctgtcccttctctcagaaggacaaagaggtcgctgaacgggtgctggagttcgacatcgggtggctggccgaacctatttttggctctggcgattacccatgggtgatgcgggattggttaaatcagagaaataattttctcctcccttacttcactgaggacgagaaaaagctaatccagggaacctttgatttcttggcactcagccactacaccactattctagtggacagcgaaaaagaggatccaattaagtacaatgattacctggaggtgcaggagatgacagacattacatggcttaattctcccagccaggtggccgtcgtgccatggggattacgaaaggtcctcaattggctgaaattcaagtacggagatttacccatgtatatcatcagcaatgggattgatgatggtctccatgccgaggacgatcagcttcgagtgtattatatgcagaactacatcaacgaagcactaaaggcccacatattagatggcatcaacctgtgcgggtattttgcttattctttcaatgatcggacagctccccgttttggtctgtataggtacgcagctgaccagtttgaacctaaggcttctatgaaacactataggaaaatcattgacagtaatgggttcccaggtccggaaacactcgagcgattttgccctgaagagtttacagtgtgtactgagtgcagcttctttcacaccagaaagtcactgcttgccttcatcgccttcttatttttcgcaagcatcattagcctctcgctgatcttttattatagtaagaagggaaggcgttcctataag

SEQ ID NO: 15083 - DNA, 3036 bp, synthetic construct; identical to SEQ ID NO: 15082
  misc_feature 1..3036: note = source = /note="Description of Artificial Sequence: Synthetic coding sequence"
  source 1..3036: mol_type = other DNA

SEQ ID NO: 15084 - DNA, 3036 bp, synthetic construct
  misc_feature 1..3036: note = source = /note="Description of Artificial Sequence: Synthetic coding sequence"
  source 1..3036: mol_type = other DNA
atgccagcatccgcgccgccaaggcggccccggcccccacctccctcactttcgctgctgttggttctgctgggcctaggcggtcgtaggctgagagctgagcctggggacggagcgcagacctgggcccgattcagcagaccgcctgcacctgaggccgccgggctgttccaggggacattccccgacggtttcctctgggctgtcggcagcgctgcataccagacagaaggtggctggcagcagcatggaaagggtgcaagtatatgggacaccttcactcaccacccgctggccccgccaggcgattcacggaatgcctctttaccactgggggccccatccccattacaacccgctactggtgacgtcgcatccgacagttacaataatgtgttccgagatacggaggcgctccgggagcttggggtcacacattacagattcagtatctcatgggctagagtgcttcctaatggcagcgctggtgttcccaatcgcgaaggtttacgctattataggcgcctgttggagcggctccgcgaattgggcgttcagcccgttgtgacgctgtatcattgggatctaccgcagcgcttacaggatgcctacggcggatgggccaatcgggccttagcagaccacttcagagattacgccgagctgtgtttccggcattttgggggccaggtgaagtactggattaccatcgataacccctacgtagtcgcctggcatggctacgctactggccggctcgctcccgggatccgcggcagtccacggctcggatatctggttgctcacaatcttctcctcgcacatgctaaagtgtggcacctgtataatacaagcttcagaccaacccagggaggacaggtgtccattgcactgtcgtcccactggattaaccctcgacggatgacagatcattcgattaaggaatgccagaagtctcttgattttgtcctcggatggttcgctaaacctgtcttcatcgacggtgattatccagaatccatgaagaataatttaagttctattctcccagacttcacggaatctgaaaagaagtttattaaaggcaccgcagacttttttgctctttgttttggtcccacacttagttttcagctgctggatccgcacatgaagttcagacagctggagtctccaaacctgcggcagttactgagctggatcgacctagagttcaatcatccacagatctttattgtcgagaacggctggttcgtcagcgggactacgaagagggacgatgctaagtacatgtattatctcaaaaagttcatcatggaaactttgaaggcaatcaaactcgatggcgttgacgtgatcgggtatacggcctggtcattaatggatggttttgagtggcatcgtggttactccattcggcggggtctgttttatgtcgattttttgtcccaagataagatgttgttgcccaaatccagcgctctcttctatcagaagctaatcgagaaaaacgggttccccccattgccagaaaatcaaccgttggagggcacattcccttgtgactttgcatggggtgtagtggataactacattcaggtggacacaaccctctcccaattcaccgatctgaacgtgtacttatgggacgtacaccactcaaaaaggctgattaaagttgatggggtagtgacaaaaaagcgaaaatcatattgcgtagacttcgctgcaattcagccccagattgcactcctgcaggaaatgcacgtgacccactttcggttttcactggattgggccctgattctaccactggggaatcagagccaggtgaatcacacgatcctgcagtattatcggtgtatggcttcagagttggttcgtgtaaacatcacacctgttgttgcattatggcagcccatggcaccgaaccaaggattgccccgcctgctggcccgccagggggcgtgggagaacccgtacacagctctggcctttgctgaatacgcaaggctctgttttcaagagctgggccatcatgtaaagctgtggattacaatgaacgagccctacactagaaacatgacttattcagcaggtcataaccttctgaaggcgcacgccctcgcatggcacgtgtataatgaaaaattccgccatgcacagaatgggaagattagcatcgccctgcaggctgactggatagagcctgcatgccccttcagccagaaggataaagaagtcgcagaacgcgtcctcgagttcgacattgggtggctggcggagccaattttcgggtccggagactacccatgggtgatgagggattggctgaaccagagaaacaacttcctgttgccatactttactgaggatgaaaaaaaactgatacaagggacattcgactttcttgccctgtcacattacactacgattttggtggactctgagaaggaagatcccatcaagtacaatgactatttagaggtacaagagatgacagatataacatggttaaactctccaagccaggtggccgtagtgccttgggggcttaggaaagtgctgaattggctgaagtttaaatacggggacctcccaatgtatataatctcgaatgggatcgacgatggtctgcacgccgaagatgatcaactgcgggtgtattatatgcagaactatatcaatgaagccctgaaggcccacatccttgacggcatcaatctgtgcggttattttgcctacagctttaatgatcgtaccgcacccaggttcggtttatatagatacgctgccgaccagtttgagcccaaggcaagcatgaaacattatcggaaaataattgactccaacggcttcccaggcccagagacccttgagaggttttgtccagaagaatttactgtctgcaccgagtgtagctttttccatacaaggaagtccctgcttgcctttatagcctttctcttttttgcctcaatcatttcattgtccctcattttctactactccaaaaaaggtcgccgctcttataaa

SEQ ID NO: 15085 - DNA, 3036 bp, synthetic construct; identical to SEQ ID NO: 15084
  misc_feature 1..3036: note = source = /note="Description of Artificial Sequence: Synthetic coding sequence"
  source 1..3036: mol_type = other DNA

SEQ ID NO: 15086 - DNA, 3036 bp, synthetic construct
  misc_feature 1..3036: note = source = /note="Description of Artificial Sequence: Synthetic coding sequence"
  source 1..3036: mol_type = other DNA
atgcccgcatccgcccccccccggagaccccgtccccccccaccttctttgagtcttcttttggtgctgctcggcttgggtggaagaaggctccgggccgagcctggggacggcgcccagacttgggcccgctttagccggcctccagcccccgaagcagctggcttgttccagggcacctttccagacgggttcctgtgggccgtgggctccgctgcctaccagacagagggcgggtggcagcagcatggtaagggcgcgagtatctgggacacgttcacacaccaccccctggcccctccaggtgactcaaggaacgcatccctccctctgggggccccttcaccgctccagccggcaaccggcgacgtcgcctcggactcttacaataacgtgttcagggacaccgaagcacttagggagcttggcgtcacgcattaccgcttctctatctcttgggcccgggttctgccaaacggcagcgcaggcgtccctaacagggagggcctgaggtactatcgcaggctccttgaacgtcttcgagaactgggagtccagccagtggtgactctgtaccattgggatctcccacagagattgcaggatgcatatgggggatgggccaatcgggctctcgcagaccatttccgagattatgccgaactgtgctttcggcactttggcggacaggtgaagtattggatcactattgacaacccctatgtggtggcctggcacggatacgccacaggccgcctggcacctgggattcgaggctccccccggctggggtacctggtggcccacaacctgctgcttgcacacgctaaagtgtggcacctgtataacaccagctttagacctacccagggaggccaagtttccatcgcactctcctctcactggattaatccccgccggatgactgaccacagcatcaaggagtgtcagaagagtctcgacttcgtgttgggttggtttgccaagcccgtgttcatcgatggggactatcctgaatcaatgaagaacaatctgtctagcattctcccagactttactgagtctgaaaaaaagttcattaaaggcacagcggacttcttcgcactgtgtttcggccccactctttccttccagctattggacccgcacatgaagttccgacagctggaaagccctaatctgcggcagctgctgagctggatagacctggagttcaatcaccctcaaattttcatcgtggagaatggctggtttgttagtggcaccaccaaaagggatgatgccaagtatatgtactacctgaagaagttcattatggaaacgctgaaggctattaagctggacggcgtagatgtgatcggctataccgcctggtccctaatggacggctttgaatggcacagaggttacagtattagacggggactgttttacgtcgacttcctgtctcaggataagatgctccttcccaagtcctcggccctgttctaccagaaactcattgaaaaaaacggattcccccctctgccagagaatcagcccttagaaggcaccttcccgtgcgactttgcgtggggagtcgtcgacaactacatacaggtggataccactctttctcagttcacagacttgaatgtttacctctgggatgtgcaccattccaaaaggttgatcaaagttgatggcgtggtcacgaagaagcggaagtcctattgtgtggatttcgcagcaattcaacctcaaattgcactccttcaagagatgcatgttacacattttcgcttttcccttgactgggccctgatcctgccgctcgggaaccagagtcaagtaaatcataccatactccagtactatagatgtatggcttctgagttggtgagggtcaatatcacaccggtcgtggccctatggcagccaatggcgcccaatcagggcctgccaagactgcttgcgaggcagggcgcctgggagaatccctatacggcgctggcatttgcggagtatgccagactttgctttcaagaattaggtcatcatgtaaaactgtggatcacaatgaacgagccatacacccgtaacatgacatactcggccggacataatctgttgaaagcgcacgcgttagcatggcacgtttacaacgaaaagtttcgtcacgctcagaacggcaaaatcagcatcgcacttcaagcagactggattgaaccggcatgccctttttcccagaaggacaaggaggtcgccgagcgggtactcgaattcgacattggatggcttgccgaacctatttttggaagtggagactacccctgggttatgcgtgactggctaaatcagcggaataacttcctcctgccttactttacagaagacgaaaagaaactgatccaaggtacatttgattttctggctctgagccattacactacaatcctggtcgacagcgagaaagaagatcccatcaagtacaacgactaccttgaagtacaggaaatgacagacatcacctggctcaattccccaagccaggtggctgtggtgccctggggacttagaaaagttctaaactggttgaaatttaaatacggcgacctgccgatgtacatcattagcaacggcatcgatgacggtcttcatgccgaggacgatcagcttagggtctactacatgcaaaactacattaacgaggctctgaaagcccacatactcgacggtattaatctctgcggctactttgcctattccttcaacgaccgcaccgctcctcgattcggattgtaccgctatgcggctgaccagttcgaacccaaggccagtatgaagcactaccgtaagatcatcgatagcaatggattccccggaccagagaccttggaacggttttgcccggaggaattcaccgtgtgcacggagtgttcttttttccatacccgaaaaagcctcctggcattcattgcctttctgtttttcgcctcgatcattagcctaagtctcattttttattatagcaaaaaagggagacggtcttataaa

SEQ ID NO: 15087 - DNA, 3036 bp, synthetic construct; identical to SEQ ID NO: 15086
  misc_feature 1..3036: note = source = /note="Description of Artificial Sequence: Synthetic coding sequence"
  source 1..3036: mol_type = other DNA

SEQ ID NO: 15088 - DNA, 3036 bp, synthetic construct
  misc_feature 1..3036: note = source = /note="Description of Artificial Sequence: Synthetic coding sequence"
  source 1..3036: mol_type = other DNA
atgccagcaagcgcgcctccccgcaggcctcgaccgcctccgccaagcctgagtctactcctcgtcctactgggcctgggtggccggaggttgcgcgcagagcccggcgatggtgcccaaacgtgggcacgtttttcacgcccgcccgcacctgaggcggccggtctatttcaaggtacgtttccggacggctttctgtgggcagtgggtagcgcggcctatcaaaccgaaggtggctggcagcagcatggtaaaggtgcaagcatctgggacactttcactcaccacccacttgctccgccaggtgactctcgcaatgcgagcctcccgttgggggcaccgagcccgttgcaacctgctacaggcgacgtcgcttccgatagctataacaatgtgtttcgcgacactgaggctttgcgtgaactgggtgttactcactaccgcttctcgatctcttgggcgcgtgttctgcctaatgggagcgccggtgtgccaaaccgcgagggacttcgctactataggcgcttgctcgaacggcttagagaacttggtgtgcaacctgtggtgactctgtatcactgggatctcccacagcgcctgcaagacgcatacggcggctgggccaaccgcgcgttggcggaccattttagagattatgccgagctctgttttcgacacttcggaggtcaggtgaagtattggattaccatcgacaatccatacgtggttgcctggcatggctatgcaacgggtagactggccccaggtattcgtggcagccctcgcttgggctatttagttgcccataatctgctcttagcccacgctaaggtctggcacctctacaacaccagcttccgcccgacgcaagggggtcaggttagcatcgcgcttagctctcactggatcaatccacggaggatgaccgaccacagcattaaagagtgccaaaaaagcctggattttgtcctgggttggtttgcgaaacccgtatttatcgacggggactatccggaaagcatgaaaaacaatctgtcaagtatcctgcctgatttcaccgaaagcgagaagaaatttattaagggcaccgcggacttttttgccctctgcttcgggccgaccctgagcttccagctgctggacccacacatgaagtttcgccaattggaaagccctaacctccgtcagctgttgagctggatcgatctcgagttcaatcacccacagattttcatcgtggaaaatggttggtttgtttccggcactacgaagcgtgatgacgccaaatatatgtactacctgaaaaagttcattatggagactctgaaagctattaaactggatggcgttgatgtcatcggctacactgcctggtccttgatggatggttttgagtggcatcgtgggtactcgatccgccgcggtctattttatgttgattttctgtcacaagataaaatgttgctgccgaaatccagcgccctgttttaccaaaagctaatcgaaaaaaacggttttcctccgttgccagagaatcagccactggagggcactttcccttgcgattttgcatggggtgtggtcgacaattatattcaggttgataccaccttgagccagtttaccgacctcaacgtctacttgtgggatgttcaccactccaaacgcctgattaaggttgacggtgtcgtcacaaagaagagaaaaagctactgtgtggattttgcagccatccagcctcaaatagctctgttacaggagatgcatgttacccatttccgcttctctctcgattgggctctgatcctccctcttggcaatcagagtcaggtgaaccataccatcctgcaatattaccgctgtatggcatccgaactggtacgcgttaacatcaccccagtggttgcgttgtggcagcctatggcgcctaaccagggacttccacggttgctggcccgacaaggtgcttgggaaaacccttacaccgccttggcattcgctgagtacgcccggttatgcttccaggagcttggtcatcacgtgaaactttggatcaccatgaacgagccgtatacccgcaacatgacatattcagccgggcacaatctgctgaaggcacatgccctggcttggcacgtctacaatgagaagtttcgccatgctcaaaacggcaaaataagcattgctctgcaggcagattggatcgaaccggcctgcccgtttagccaaaaggacaaagaagtggccgagagagtgctggagttcgatattggctggttagcggaaccaatatttggcagcggcgattacccatgggtcatgcgtgattggcttaatcagaggaataatttcctcctgccttatttcactgaagatgaaaagaagctgattcagggtaccttcgactttctggcactgtcccattacacgaccatcctggtggatagcgagaaggaggatccaatcaaatataacgattacctggaagttcaggaaatgactgacattacctggctcaacagcccaagccaggtggccgttgtcccatggggtctgaggaaggtcctgaactggttgaagttcaagtatggcgacctgccgatgtacattatcagcaatgggatcgacgatggcttgcatgccgaagacgatcagttacgtgtgtactatatgcagaattatattaacgaggccctcaaggcgcacattctggatggcatcaacttgtgtggctactttgcgtacagcttcaatgacagaacagcaccccgcttcggcctgtatcgctacgcagcggaccaatttgaacccaaggcatcaatgaaacattaccgtaaaatcatcgatagcaatggtttcccgggcccggagactctggagcgcttttgtcccgaggagtttaccgtgtgcactgagtgtagtttttttcacaccagaaagagcctgctggcgttcatcgcattcctcttttttgccagtatcatttcgctgtccctgatattctactactccaagaaaggtcggaggagctacaaa

SEQ ID NO: 15089 - DNA, 3036 bp, synthetic construct; identical to SEQ ID NO: 15088
  misc_feature 1..3036: note = source = /note="Description of Artificial Sequence: Synthetic coding sequence"
  source 1..3036: mol_type = other DNA

SEQ ID NO: 15090 - DNA, 3036 bp, synthetic construct
  misc_feature 1..3036: note = source = /note="Description of Artificial Sequence: Synthetic coding sequence"
  source 1..3036: mol_type = other DNA
atgccggcttcggcaccccctcggcgcccgcgtcccccgccgccgagcctgtcgctgctgctggtgctcctcggactcggcggtcgcagactgcgtgctgaaccaggggacggcgcgcagacctgggcacgcttcagcaggccccccgcacctgaggctgcgggacttttccagggtacctttcctgacggcttcctctgggcagtgggctccgctgcgtaccagactgagggagggtggcagcagcatggaaagggagcatccatctgggataccttcactcatcatccgctggcccctccgggagattcccgcaacgcttccttgccgctcggggccccatcccctctgcagccggcgactggcgatgtggcgtctgactcctacaataatgtgttccgggataccgaagccctgcgcgagctcggagtgacccactaccgcttttcgattagctgggctcgcgtccttccaaacggatcagccggcgtgccaaatagggaaggcctgcgctactaccgccgcctgcttgagcgcctgcgcgaactgggagtgcagcctgtggtgactctctaccattgggatctgccacagcggctgcaagatgcctacgggggatgggccaaccgggccctcgctgatcactttcgcgattatgcagagctgtgcttccggcactttggaggtcaggtgaaatactggatcaccatcgacaacccatacgtcgtggcttggcatgggtacgcaactggacgcctggcgcctggaatcaggggctccccgagattgggatacctcgtcgctcacaatttgctcctcgctcacgccaaggtctggcacctttacaatacctccttcagaccgacgcagggtggccaggtgagcatcgctctgtccagccactggatcaaccctcgccggatgaccgatcattcgatcaaggagtgtcaaaagtccctcgacttcgtgctgggttggttcgccaagcctgtgttcatcgacggggactacccagaatcaatgaagaataacctctcgtcaatcctccctgacttcactgaaagcgagaagaaattcattaagggaactgctgatttctttgccctgtgtttcggtccgacgctgtccttccaactgctggacccccacatgaaattccgacaactcgaatccccgaatctccgccaacttctgtcatggattgatctggagttcaaccatccacagatcttcatcgtggaaaacggatggttcgtcagcggcactaccaagcgcgacgacgctaagtatatgtactatttgaaaaagttcattatggagacgttgaaagcgatcaaactcgatggagtggatgtgatcggctacactgcttggtcgctcatggacggattcgagtggcatcgcggttactccatcagacggggacttttctacgtcgacttcttgtcgcaggataagatgttgctgccgaaatcgtctgccctcttttaccagaagctgatcgagaagaatggattccctccgctgcccgagaatcaacctttggaaggcacttttccctgtgacttcgcctggggagtggtggacaactacatccaggtcgacaccactctgtcccagtttaccgacttgaatgtctacctttgggacgtgcaccattctaaacggctgatcaaggtggacggcgtggtcactaagaagcgaaagagctattgcgtggatttcgccgcgatccagccgcagatcgcgctgctgcaggagatgcacgtcactcatttccgcttctccttggattgggcgctcatccttccgctcgggaatcaaagccaagtgaatcacaccatcctgcagtactaccgctgtatggcttccgaactggtgagagtgaacatcactcccgtggtggcgctctggcagccaatggcacctaatcaggggcttccgaggctgcttgcacggcaaggagcgtgggaaaatccgtacaccgcgctggcgttcgcggaatacgcgagactctgcttccaagagttggggcatcacgtcaaactgtggattactatgaacgaaccttacacccggaacatgacttactcggctggacacaatcttctgaaggctcatgccctggcttggcacgtttacaatgaaaagttcagacacgcgcaaaacgggaaaatctcgattgcgctgcaggcagactggatcgagccagcctgccctttctcacaaaaggataaggaggtggccgaacgcgtcctggaatttgacatcggatggctggcggagccaattttcggatccggagattacccgtgggtgatgcgtgactggttgaatcagcgcaacaacttcctcctcccgtacttcactgaggacgaaaagaaacttatccaaggaacttttgacttcctcgcactgtcgcattatactaccatactcgtcgattcggaaaaagaggacccgattaagtacaatgactacctggaagtgcaagagatgaccgacattacctggctgaattccccgtcgcaggtggcagtggtgccgtggggactgcgcaaggtcctcaactggctgaagtttaagtacggtgacctgccgatgtacatcatatcgaatggcatcgatgatggtttgcacgcggaagatgaccaattgcgggtgtactacatgcaaaactacattaacgaagcgctcaaggctcacatcctcgatggcatcaacctgtgcggttacttcgcttactcatttaacgaccgcactgcccccagatttggactctaccgctatgccgccgaccaatttgaaccgaaggccagcatgaagcattaccgcaagatcatcgactcgaacggattccctggacccgaaaccctggagcggttttgccctgaggagttcaccgtttgcaccgaatgttcgttcttccatactcgcaaatcacttctggccttcatcgcctttctgttctttgcgtcgatcatctcgctgagcctgatcttctattactccaaaaagggccggcgctcctacaag

SEQ ID NO: 15091 - DNA, 3036 bp, synthetic construct; identical to SEQ ID NO: 15090
  misc_feature 1..3036: note = source = /note="Description of Artificial Sequence: Synthetic coding sequence"
  source 1..3036: mol_type = other DNA

SEQ ID NO: 15092 - DNA, 3036 bp, synthetic construct
  misc_feature 1..3036: note = source = /note="Description of Artificial Sequence: Synthetic coding sequence"
  source 1..3036: mol_type = other DNA
atgccagcaagcgcacctcctcggagaccgcggcccccccctccatcgctgtcattactcctcgtgctgctgggacttggaggtcggagactgcgcgcagaacccggagatggagcccagacgtgggcgcgtttctctcggccaccagcccccgaggctgcaggactcttccagggcacattccccgatggattcctctgggccgtaggctcagcggcttaccagactgagggcgggtggcagcagcatggaaagggcgcttccatttgggatacgtttactcatcacccgctggctccaccaggagacagcagaaatgcctctctgccactgggggcaccctctccccttcaaccagctaccggcgatgtggcgtccgacagttacaacaacgtcttcagagacactgaggctctgcgggaactgggcgtgacacactatcgctttagcatctcttgggcccgagtgctgcccaatggatctgcgggagtgccaaaccgagaggggctcaggtactaccgcagactactggagcggctcagggagctcggggtacagcccgtggtgacattgtatcattgggatctgccccagcgattgcaggacgcttatggcgggtgggccaatagagctctggctgaccacttcagggactacgcagagttgtgtttccggcattttggcggccaggtgaaatattggattacaatcgacaatccgtacgtagtggcatggcacgggtacgctactgggagactggcccccgggattcgaggctcaccgcgtctcggatatcttgtggcacacaacctattgttggcgcacgcgaaagtgtggcacctctacaatacctcattcagacccacgcagggcgggcaagtatccattgccctttcgtctcattggataaacccccgtcggatgaccgaccactcaatcaaggagtgtcagaaaagcctggattttgttttaggctggttcgctaaacccgtgttcatcgatggggattacccagagagtatgaagaacaaccttagttcaattcttcctgacttcacggagtccgaaaagaagttcataaaagggaccgcagacttcttcgccctatgcttcggaccaaccctttcttttcaacttctggatcctcatatgaaattccggcaattagagagccccaacctgcgacagttgctcagctggatcgacctcgaattcaatcatccgcagatctttatcgttgagaacggctggtttgtgtcaggcacaacaaaaagggacgatgctaagtatatgtactacctgaaaaagtttatcatggagaccctgaaagcaatcaagctcgatggagtggacgtgattggctacacggcgtggtcgctcatggacggctttgagtggcacaggggctacagcatcaggaggggtctattttatgtggattttctgtctcaggataagatgttgctgcctaaatccagcgccttattttatcagaagctgatcgagaagaacggattccctcccctcccagagaatcagcctcttgaggggaccttcccctgtgattttgcttggggcgtggtcgacaattatattcaggttgatacaacactgagtcagtttactgacttaaatgtgtacttgtgggatgtgcatcactcaaaaagactcatcaaagtggatggggtcgtaactaagaagagaaagtcttattgcgtcgattttgccgctattcagccccagatagcgctgctccaagagatgcacgtgacacactttcggttcagtctggattgggctctgattttgccgctcggcaatcagtctcaagtcaatcatacgatcctgcagtattatcgctgtatggccagcgagttggtgagggtaaatatcacacctgtcgtggcattatggcagcccatggctccgaaccaagggttaccccgactgctggcccgccagggagcatgggaaaatccttacactgcactagctttcgccgagtatgccaggctctgtttccaagaacttggtcaccacgtgaaattgtggataacaatgaatgaaccctacacccgcaatatgacctacagcgcggggcataacttgctgaaagctcatgcccttgcctggcacgtatataatgagaaattccggcacgctcagaacggaaaaatctctattgccctccaggccgattggatcgagcctgcatgtccttttagccagaaagataaggaggtcgctgagcgagtcctagaatttgacatcgggtggctggcagaaccaatctttggatccggggactacccctgggtgatgcgggattggctgaatcagcggaataatttcctgctgccgtattttaccgaggacgaaaaaaaactaattcagggtacattcgacttcctcgccttaagccactacacaacgattcttgtcgattctgagaaagaagaccccatcaaatataatgactacttggaggtgcaggaaatgacagacataacctggctcaactcaccgagccaggtagcggtggtcccgtgggggctcagaaaagttctcaattggctcaaatttaaatatggggacttacccatgtacatcatttctaacggcattgacgacggactgcacgctgaagacgaccaactccgtgtgtattacatgcaaaattacatcaacgaggctttaaaagcccacatccttgacggcataaatctgtgtggctactttgcatactcctttaacgatcgtacagcccccagattcggcctgtatagatatgccgcggaccagttcgagcccaaagcctctatgaagcattataggaagattattgatagcaatggatttcccgggcctgagacgctggaaaggttttgcccagaggaattcactgtgtgcactgagtgtagcttctttcacaccagaaagtctctcttagccttcattgctttcctatttttcgcttccatcatcagtctaagccttatattttactattcaaaaaaaggtcggaggtcatataag

SEQ ID NO: 15093 - DNA, 3036 bp, synthetic construct; identical to SEQ ID NO: 15092
  misc_feature 1..3036: note = source = /note="Description of Artificial Sequence: Synthetic coding sequence"
  source 1..3036: mol_type = other DNA

SEQ ID NO: 15094 - DNA, 3036 bp, synthetic construct
  misc_feature 1..3036: note = source = /note="Description of Artificial Sequence: Synthetic coding sequence"
  source 1..3036: mol_type = other DNA
atgccggcgtcagcccctccacgccgccctagaccgcctcctccgtcgctctcgctgcttctggtgctgctcggactgggcggacgccggctgcgggcggaaccgggggacggcgcccagacctgggcgcgcttcagcagaccgccagcacccgaagcggcagggctcttccaagggacttttccagacggctttctgtgggccgtcggatctgcagcctaccagactgagggaggctggcagcaacacggcaagggagcatcgatctgggatacctttactcatcacccactcgcgccgcccggtgactccaggaatgcgagcctgccactgggagctccatcgcctttgcagccggcaaccggggatgtggcctccgattcctacaacaacgtgttcagagataccgaggccctgcgggagctgggcgtgacgcactaccgcttcagcatctcatgggcgcgcgtgcttccgaacggtagcgccggagtgccgaatagagagggattgagatactacagacggcttctcgagcggctgagagagctgggcgtccaacctgtggtaactctctatcactgggatcttcctcaacggctgcaggatgcctacggaggatgggccaacagagcactcgccgatcacttccgagattacgccgaactgtgcttccggcatttcggaggacaggtgaagtactggatcactatcgataatccgtacgtggtggcatggcacggatacgccacgggaaggctggctcccggaattcgggggtccccgaggctcggctacctggtcgcacacaacctcctcctcgcccacgcgaaagtttggcatctttacaatacttccttccgccctacccagggtggacaggtgtccatcgctctgtccagccactggataaatcctcgccggatgactgatcattcaatcaaggaatgccagaagagtctggacttcgttttgggctggttcgccaaaccagtctttattgacggagattacccagagtccatgaagaacaacctgtcgtcaattttgccggacttcaccgagtcagaaaagaagttcatcaaagggaccgccgacttctttgcactgtgtttcggcccgactctgagtttccaactgcttgatccgcacatgaagtttcgacagctcgaatcccccaatctgagacagctgctgtcgtggatcgacctcgaattcaatcacccgcagatcttcatcgttgagaatggatggtttgtgtcaggaaccactaaacgtgatgatgcaaagtatatgtactatctgaagaagttcataatggagactctcaaggcaattaagctcgatggtgtcgacgtcatagggtacacggcctggagcctgatggacggtttcgaatggcatcggggatatagcatccgcaggggcctcttttacgtggactttctctcgcaggataagatgctgctgccgaagtcgagtgcgctgttctaccaaaaactgatcgaaaagaacggatttccaccactgcccgagaaccagccgctggagggaactttcccgtgcgacttcgcctggggtgtggtggataactacattcaagtggacaccaccttgtcccagttcacggacctgaacgtgtacttgtgggacgtgcatcactctaagcgcctgatcaaggtcgacggcgtcgttaccaaaaaacggaagtcctattgcgtggacttcgccgctatccaaccccagattgcactgcttcaagagatgcacgtgacccatttcagattcagccttgactgggcgctgatcctgccgcttgggaaccagtcacaagtgaatcataccatcttgcaatactacagatgtatggcctcggagttggtgcgggtgaacatcactcccgtcgtggcactgtggcaaccaatggcccccaaccaaggactgccacgcctcctggccagacagggagcttgggaaaatccttacaccgccctggctttcgcggaatatgcgagactgtgttttcaggaactgggtcaccacgtgaagctctggatcaccatgaacgaaccctatacccggaacatgacctacagcgctggccataacctcttgaaagcccatgccctcgcctggcatgtgtacaacgagaagtttcgtcatgcgcagaacggaaagatctccatcgccctgcaggcggactggattgaaccggcttgccccttctcgcaaaaggataaggaggtcgcggaacgggtgttggaattcgacattggatggcttgccgaaccaatcttcggctcaggagactacccctgggtaatgagagactggcttaatcagcgcaataactttctcctgccttacttcaccgaggatgagaagaaactgatccagggtacctttgactttctcgcactgtcccactatacgactatccttgtcgactcagaaaaagaggaccccatcaaatacaatgattacctggaagtccaggaaatgactgacatcacttggctcaactcgccgagtcaggtcgcggtggtgccatggggtctgcgcaaggttctgaactggctcaagtttaagtatggagatctgccgatgtacatcatctcgaacgggatcgacgatgggctgcacgcagaggacgaccagctcagagtgtactatatgcagaactacatcaatgaagccctcaaagcccatatcctggacgggatcaacctgtgcggatacttcgcttactccttcaatgaccgcactgcaccacgcttcggactgtaccgttacgctgcggaccaattcgagcctaaagcgtcaatgaagcactaccgcaagatcatcgactcgaacggctttccgggaccagaaaccctggaacgcttttgcccggaggaatttactgtgtgtactgaatgcagctttttccacaccaggaagtcgctcctggcgttcatcgctttccttttcttcgcatctattatctccctctcactgatcttctactacagcaagaaaggtaggcgcagctacaag

SEQ ID NO: 15095 - DNA, 3036 bp, synthetic construct; identical to SEQ ID NO: 15094
  misc_feature 1..3036: note = source = /note="Description of Artificial Sequence: Synthetic coding sequence"
  source 1..3036: mol_type = other DNA

SEQ ID NO: 15096 - DNA, 3036 bp, synthetic construct
  misc_feature 1..3036: note = source = /note="Description of Artificial Sequence: Synthetic coding sequence"
  source 1..3036: mol_type = other DNA
atgcccgcatcagctccaccccgacggccccgtcctcctccaccaagcttgtcactcctgctcgtgttattggggttgggcggacggcggcttagggctgagcccggtgatggggcccaaacatgggcaagattctcacgccctcccgctcccgaagccgcgggtctgttccagggaacctttcccgatggcttcttgtgggctgtgggctccgccgcctaccagacggagggaggctggcagcagcatggtaagggcgcatctatatgggacacattcactcatcatcccttagcaccccccggggatagcagaaatgccagccttccgcttggagcaccgagtccacttcagccagccactggagatgttgcatcggacagctacaataatgtgttcagggatacagaggccctccgcgaattaggcgtgactcactatcgcttttccatttcatgggccagggttttgcccaacggcagtgccggagtacccaacagggaggggcttcgctactacagaaggttgctcgaacggctgagggaattgggcgtgcagccggttgtgacactctatcactgggatctgcctcagaggctccaggatgcctacgggggctgggcaaatcgggctctcgcagaccattttagagattacgcagagctgtgttttagacacttcggtggacaagtgaagtactggataactattgataacccctatgtcgttgcctggcatgggtacgccacaggccgactcgctcccggcattcgcggctccccacgccttggctatcttgtggcacataacttgctgctagcacacgccaaagtgtggcacctctacaacacctctttcagaccgacacagggcgggcaggtctccatagcactatctagtcattggattaacccccgacgcatgacagaccactccataaaggagtgccagaagtcactagacttcgtcctgggttggttcgctaaacccgtcttcatcgacggcgactatcctgagtcaatgaagaataacctgagttctatcctacctgattttactgagtctgaaaaaaagtttatcaagggtaccgcagattttttcgctctctgctttgggcctaccttgtcgttccagctgctggatccccacatgaagttccgtcagctagagtcgcccaaccttcgtcagctgctgagctggattgatttggagtttaatcacccccagatcttcattgtggaaaatggatggtttgtgagcggtacaacaaaacgggatgatgccaagtatatgtattacctgaaaaaatttataatggagaccctcaaggctatcaagttagacggggtcgacgtgatcggatacaccgcgtggtccctaatggacggtttcgaatggcacagaggctatagtattaggagaggacttttttacgtggactttcttagccaggataaaatgctcttgcccaaatctagtgctttgttttatcagaagttaatcgagaagaacgggttcccaccactccccgaaaaccaacctctggagggcaccttcccatgcgacttcgcatggggagtggtcgataactatatccaggttgacactacactcagccagtttacagatttgaacgtttatctgtgggatgtacaccatagtaaaagactgatcaaagtggacggcgtggtgaccaaaaaaaggaaatcttattgtgtggacttcgcagcaattcaaccacaaattgctctccttcaggaaatgcacgttactcacttccgattttcactggactgggcactgatcctcccactggggaaccagtcccaggtgaaccacaccatccttcagtactaccgatgtatggcgagcgagttggttagggtgaatatcacccccgttgtggctttatggcagcctatggcccctaaccaaggcctgcctagactcctcgctcgccaaggcgcttgggaaaacccttacaccgcattggcctttgccgagtacgctcggctgtgcttccaagagctgggacaccacgtgaagctctggataacaatgaatgaaccttatacacgaaacatgacatatagcgccggccataatttgttgaaagcccacgccctggcgtggcacgtctataacgagaaattccggcacgcacagaatggtaagattagcatcgcactgcaggccgattggatcgagccagcttgtcccttcagtcagaaggacaaggaggtggcagagagggttctggaatttgacatagggtggcttgctgaaccgattttcggatcaggggactacccatgggtgatgagagactggctgaatcagcgcaataactttttgctcccctacttcacagaagatgaaaagaagctgatccaaggaacgtttgattttttggcactgagtcattacacgacgatcctagtcgactcagagaaggaagatcctataaagtataacgactacttggaagtacaggagatgacagatatcacatggttaaactcccccagccaagtcgctgtggttccttgggggttgcggaaagtgctcaactggctgaaattcaaatatggcgacttgcccatgtacattatcagtaatgggatcgacgacggcctccacgcagaggatgaccagcttcgggtctactacatgcaaaactatattaatgaagctctcaaggctcacattctcgacggtattaacctttgtggatattttgcctactccttcaatgataggacagctcccaggttcggtttgtatcgatacgcagcggaccagttcgagccaaaagcaagtatgaaacattatcggaagattatcgactccaatggcttcccgggccccgagaccttggaacgtttctgccccgaggagttcactgtgtgtacagagtgttctttttttcacacacgcaagtcgctgctcgcattcattgccttccttttcttcgcctcaataataagcttgagtctgatcttctattattcaaagaaaggacgtcgctcttacaaa

SEQ ID NO: 15097 - DNA, 3036 bp, synthetic construct; identical to SEQ ID NO: 15096
  misc_feature 1..3036: note = source = /note="Description of Artificial Sequence: Synthetic coding sequence"
  source 1..3036: mol_type = other DNA

SEQ ID NO: 15098 - DNA, 3036 bp, synthetic construct
  misc_feature 1..3036: note = source = /note="Description of Artificial Sequence: Synthetic coding sequence"
  source 1..3036: mol_type = other DNA
atgccagccagcgcccccccgcggagacctcgcccccctcctccctccctgagtctactcttggtcctgttaggtttgggaggccggcgactgcgagcagagccaggcgatggtgctcagacctgggcacgctttagcaggccccccgccccagaggccgccggcttgttccaggggacctttccggatggttttctttgggctgtgggttcggccgcctatcaaacagaaggcgggtggcagcaacatggaaagggcgcatccatttgggatacatttacccaccatcccttagccccacccggcgattccagaaatgcaagccttcctctgggcgcgccgtcacctctgcagcctgcaaccggcgatgtcgctagcgattcttataataatgtgttccgagataccgaggccctaagggaactcggcgtgacacattatcgattcagtatttcatgggccagagtcctcccaaatgggagcgcaggtgtgccgaatcgagagggactgcggtactatcgaagactattagagaggctacgggaactgggcgttcagcccgtggttacgctgtatcactgggatttgccacagagactgcaggatgcctacgggggttgggctaatcgagcgctggccgaccatttccgggattacgctgagctctgctttagacactttgggggacaagttaaatactggattacaatcgacaacccttacgtcgtagcttggcatggatatgccaccggaagactggccccaggaatcaggggatcccccagactaggctacctggtggcccacaacttgttactggcgcatgccaaagtgtggcatctttataacacaagcttccgtcctacacaggggggacaggtctcaattgctctgagctcccactggatcaacccccgccgcatgaccgaccatagcataaaagagtgccaaaagtccctggatttcgtactgggatggtttgccaagccagtattcattgatggcgattatccggaatcgatgaaaaacaacctgagttcaattctgcctgatttcaccgaatccgaaaagaagttcatcaagggcacagcagacttttttgcactgtgcttcggccctacactgtctttccagctcttagacccacatatgaagttcaggcagcttgagtcacctaacttgcggcagttactttcctggatcgaccttgaattcaatcacccccagatttttatagtcgaaaatgggtggtttgttagcggtaccaccaagagggacgacgcaaaatacatgtactacctcaaaaagttcatcatggaaacactgaaagccataaaactggacggagtagacgtaataggatacaccgcttggtctctcatggacgggttcgagtggcacaggggctattcaattcgtaggggactattttacgtcgacttcttaagtcaggataaaatgctactgcccaagtcatcagcgctgttctaccaaaaactcattgagaagaatggatttccaccgctgccggaaaaccagcctttggagggaactttcccttgcgactttgcctggggcgtggtcgataactatatacaagtggacacgacactctcccagttcacagacctcaatgtttatctatgggacgttcaccacagcaagagattaataaaggtggatggcgtggttactaagaaacgcaagtcctattgcgtggacttcgcggcgattcagccacagatcgccctacttcaggagatgcatgtgacccactttcgattttcactggactgggcgcttatcctccctctgggcaatcagagccaggtcaatcataccattcttcagtattatcggtgtatggcctccgagcttgtcagagtgaatatcacgcccgtcgtggcgctctggcagccaatggcgccaaatcaggggctacctcgccttctcgctagacagggtgcatgggaaaatccatatacagcgttggccttcgctgaatacgcacgtctatgcttccaagagctggggcatcatgtgaagctatggatcacaatgaacgagccatataccaggaatatgacttacagtgccgggcacaatctccttaaggcccatgctttagcctggcacgtgtacaatgaaaaatttcggcacgcccaaaatggcaagatctccatcgcactccaggccgactggatcgagcctgcgtgccccttttcacagaaggacaaggaagtcgctgagagggtgctcgagtttgacataggctggctggccgaacccatattcggatccggcgattatccatgggtgatgcgagactggctgaatcaaaggaacaattttttattgccctacttcaccgaggacgaaaaaaaactgattcaggggacgttcgactttcttgcactgtcacattatacgaccatcctggtggactccgagaaggaggatccaatcaaatacaacgactacctagaggtccaggaaatgactgacattacctggcttaattccccaagtcaggtcgcggtggtgccttggggactgcgcaaagtgctgaattggttgaaattcaaatacggcgacctgccaatgtacatcatctcaaacggcattgacgacggcctgcatgctgaggatgaccaactgagagtgtattacatgcaaaactatattaatgaggcactcaaagcccacatcctggacggcattaacctgtgcggctacttcgcatacagttttaatgaccgaactgcacctcggttcggcctgtaccgctatgccgccgaccagttcgagcccaaggcttccatgaagcattataggaaaattatcgacagtaacggtttccctggccccgagaccctggagcgtttctgtccagaggagtttaccgtgtgcaccgagtgttcatttttccatacccgcaaatccttactcgccttcatcgcgttcctcttctttgcttctataatctctttgtcacttatcttctattatagtaagaaaggccgccggtcatataaa

SEQ ID NO: 15099 - DNA, 3036 bp, synthetic construct; identical to SEQ ID NO: 15098
  misc_feature 1..3036: note = source = /note="Description of Artificial Sequence: Synthetic coding sequence"
  source 1..3036: mol_type = other DNA

SEQ ID NO: 15100 - DNA, 3036 bp, synthetic construct
  misc_feature 1..3036: note = source = /note="Description of Artificial Sequence: Synthetic coding sequence"
  source 1..3036: mol_type = other DNA
atgcctgcgtccgcgccaccgcgcaggcctcgcccgccgcccccttccctgtccctgctattggtgttactgggcctaggcgggaggcggctgagggctgagcctggtgacggggcccagacatgggccaggttcagcaggcccccagctcccgaggcggctgggctttttcaaggtacctttcctgatggattcttgtgggcggtcgggagtgcagcctaccagactgagggcggctggcagcagcacggaaaaggcgccagcatctgggacacattcacgcaccatcctctagcgccccccggtgactcaagaaacgcgagcctgcctttgggcgcccccagccctttacagccagcaaccggcgatgtggccagtgacagttacaacaacgtattccgggatacggaagcccttcgtgaactgggcgtgacccattatcgctttagtatcagttgggcacgggtactgcctaatggctctgctggcgttccaaatcgggagggccttaggtactatcggaggctcctggaacgactccgggaactcggcgtgcagccggtggtgactctataccactgggatctcccccagaggctgcaagatgcttacggagggtgggcgaacagggccctggccgatcactttcgagattatgccgaactgtgtttccgccacttcggggggcaagtgaaatactggatcaccattgataacccttacgtcgtggcttggcacggctatgcaacgggcaggttggcccccggaattcggggatctccccgcctgggctatttggtggcacacaacctgctcttggctcatgcaaaggtgtggcatctctataacacatccttcaggccaacccaggggggccaggtgagtatcgctttgtctagtcattggataaacccacgccgtatgactgatcacagcataaaagagtgccagaaaagccttgatttcgtgttaggttggttcgccaagcctgtgttcattgatggcgattatcctgaaagcatgaagaacaatttatcctcaatcctgcctgacttcaccgagagtgagaagaagttcatcaaaggcactgccgatttcttcgcactgtgtttcggacctaccttatcatttcaactcttggaccctcacatgaaattcaggcagctggagtcccccaacctgcggcaacttctaagctggattgacctcgaattcaatcatccccagattttcatagtcgagaatggatggttcgtgagcggcactactaagcgggacgacgctaagtatatgtactacctgaagaagttcataatggagaccctaaaagccataaagcttgatggcgtggacgtcatcggttacaccgcctggtctcttatggacggattcgaatggcatagaggttacagcatcagaaggggcctattctacgtagactttctgtcccaggacaaaatgctgctccctaagtccagcgcgttattctaccagaagttaattgaaaagaatgggttcccacctttgcctgaaaaccagcctctggagggaacttttccatgtgactttgcttggggagtggtggacaactacatacaggtggatacgactctgtctcaatttaccgatcttaatgtgtatttgtgggacgtgcaccatagtaaaagattaataaaggttgatggggtcgtaactaagaagcgcaaatcatattgtgtggacttcgccgccatccaaccacagattgccctcctacaagagatgcatgtgacccacttcaggtttagtctggactgggcgctgatactccctctcggcaatcaaagccaggtgaatcatacaatcctgcagtactatcgctgcatggcaagcgagctggtaagggtgaatatcacccctgttgtggcgctctggcagcccatggctccaaaccagggactcccccgattgctcgctcgacagggagcatgggaaaacccctatactgctctagcattcgccgaatacgcgaggttgtgtttccaggagctgggacatcacgtgaagctgtggatcacaatgaatgaaccctacacccggaatatgacatattcagccgggcacaatctcttgaaagctcatgccctggcatggcatgtatacaacgagaagtttcggcatgcccagaatggtaaaattagtatcgcgctgcaagccgactggattgagcccgcctgcccattcagtcaaaaggacaaagaagtggcggaaagagtgcttgaattcgacattggatggttggcggagcccatcttcggtagtggagactatccttgggtaatgagagactggcttaatcagcgaaataactttctcctgccatacttcactgaggacgaaaaaaaactgatccagggaacatttgactttcttgcactgagccattacactaccatattagtcgactccgagaaagaggaccccattaaatataacgattatctcgaagttcaggagatgaccgatatcacctggctgaactccccgtctcaggtggcagtggtgccttggggtctccgaaaggtcctaaattggctgaagttcaagtacggggacttacccatgtatatcataagtaatggaatcgatgatggactgcacgcagaagacgatcaacttcgggtatactatatgcagaactacatcaatgaggctctcaaagcacatattttagatggtattaacctgtgtggctacttcgcttattcctttaacgacaggacagccccccggttcgggttgtataggtacgccgcggatcagttcgagcccaaagctagtatgaagcactatagaaagataatcgacagcaatggctttcctggtcctgagacgctggagcgattttgtccagaggaattcacagtttgcactgaatgtagcttttttcatactcggaaatcgcttctagcgttcatcgcgttcctcttcttcgcaagcattatttctttgtctttgatcttctactatagcaagaagggtaggcgcagctacaaa

SEQ ID NO: 15101 - DNA, 3036 bp, synthetic construct; identical to SEQ ID NO: 15100
  misc_feature 1..3036: note = source = /note="Description of Artificial Sequence: Synthetic coding sequence"
  source 1..3036: mol_type = other DNA

SEQ ID NO: 15102 - DNA, 3036 bp, synthetic construct
  misc_feature 1..3036: note = source = /note="Description of Artificial Sequence: Synthetic coding sequence"
  source 1..3036: mol_type = other DNA
atgcccgcgtctgctcccccgagacgtcccaggcctcctccacctagtttgagtctgcttctggtccttctgggccttggtggtcgaaggctgagggctgaaccaggtgacggagctcagacgtgggcccgattttccaggcctccggcgcccgaagcagctggactctttcagggcacttttcccgacggatttctgtgggccgtgggctctgccgcataccaaactgaaggtggctggcagcagcacggcaaaggtgcttccatctgggatacgtttactcaccatccactggccccccccggtgactcacggaacgcttccttaccattgggggctccctcacccttgcagcctgcaacaggagatgtggcgtcggatagttacaacaacgtgttcagagacacggaggccctgcgggagcttggcgttacgcactatcgtttcagcatctcttgggcaagggtgctgcccaacggcagcgcgggcgtacccaatcgtgaaggtcttcgttattaccgtcgcctcctcgagcggttgagggagcttggtgtgcagcccgtggttacactttatcactgggacctccctcaacggctgcaggacgcttacggaggatgggctaaccgagccttagccgatcacttccgggactacgcagagctgtgctttcgccatttcggaggacaagtgaaatattggatcaccatagacaacccgtacgtggtagcatggcacgggtacgccactgggcggttggctccggggatccggggaagtcctagactagggtacctggtggcgcataacttgctgttggcacatgcgaaagtctggcacctgtacaacaccagctttcgccccactcaagggggccaggtttccatcgctctgtccagccactggattaacccgaggcgcatgacagaccactcaattaaagagtgccaaaagtcattagactttgtactcggatggttcgctaagcccgtgtttatagacggggactaccccgagagcatgaagaataatttaagcagtatcctacctgactttacagagagcgagaaaaaatttataaagggaacagccgactttttcgccctgtgcttcgggcctactctaagctttcagctgctcgatccacatatgaagtttaggcagctggagtcacccaatctgagacagctgctgtcctggattgatttggagtttaaccacccccaaatctttatcgtggaaaatggttggttcgtgagtggcactaccaaacgagacgatgctaagtacatgtattatctaaagaaatttatcatggagactttgaaggcaatcaagctcgacggcgtggatgtcattggctacaccgcctggagtctgatggacgggtttgaatggcataggggttacagcattcgcagaggcttgttttatgtggatttcctgtcacaggacaaaatgctcttgcccaagagctctgcactgttttaccaaaaactgatcgagaaaaacgggtttccccccttacccgagaatcagccactcgaaggaacatttccttgtgacttcgcctggggcgtggtcgataactacatacaagtggatactactctctcacagttcaccgatctgaacgtttatctgtgggatgttcatcattccaagagactaatcaaagtagatggcgtggtgacaaagaaacgcaagagctattgcgtcgatttcgcggccattcagccccagatcgccctgctccaggaaatgcacgttacccactttcgcttctcccttgattgggctctgatacttccccttggaaaccaatctcaggtgaaccacactatcctgcagtactacagatgtatggccagcgagctggtgcgtgtaaacattacacccgttgtggccctatggcagcctatggcccctaaccagggactgccacgcctgctggccaggcagggggcgtgggagaatccatataccgcattagctttcgccgaatatgctaggctgtgcttccaggagctgggacatcacgtcaagctctggataacaatgaatgagccgtacacccgaaacatgacctatagcgcaggccacaacctgctgaaagcacacgcgctcgcctggcatgtgtacaatgagaagtttcgccatgcccagaatgggaagattagtattgccctgcaagccgattggatagagccagcgtgccccttctctcaaaaggacaaagaggtggctgagcgcgtgcttgagttcgatatcggttggctcgccgagcctatattcgggtcaggggactatccatgggtgatgcgtgattggttgaatcagcggaacaactttttacttccttactttacagaggacgagaaaaagctgattcagggtacctttgacttccttgcattgtctcattacacgactatccttgtggattccgagaaagaggatccgatcaaatataatgattacctggaggtccaggagatgacagacataacatggctgaattcccccagccaggtggccgttgtgccctgggggctaaggaaagtgctgaactggttgaaattcaaatacggtgacctgccaatgtatataatctccaatggtattgacgacggcctccatgccgaggatgaccagctgcgggtgtactacatgcagaattacataaatgaagcgctcaaggctcatatcctggatggaataaacctctgcgggtactttgcttactccttcaatgatagaaccgcacctcggttcgggctctatcggtatgcagctgaccagttcgagcccaaagcaagcatgaagcactatcgcaagatcatcgatagcaatgggtttccgggtccagagactttggagcggttttgtccggaggaatttaccgtgtgtaccgagtgctcctttttccacacgcgcaagtctcttctggctttcatagcgttcttgtttttcgcgagcatcatttctctctcgcttattttctactattcgaagaagggccggaggagctacaaa

SEQ ID NO: 15103 - DNA, 3036 bp, synthetic construct; identical to SEQ ID NO: 15102
  misc_feature 1..3036: note = source = /note="Description of Artificial Sequence: Synthetic coding sequence"
  source 1..3036: mol_type = other DNA

SEQ ID NO: 15104 - DNA, 3036 bp, synthetic construct
  misc_feature 1..3036: note = source = /note="Description of Artificial Sequence: Synthetic coding sequence"
  source 1..3036: mol_type = other DNA
atgccagcctccgcgccccctcgccgaccacgacctccgccgccctccctgtctttattgctcgtcttactgggacttggtgggagacgactgcgagcggagcccggtgatggagcccagacttgggcccgattcagccgcccccccgctcccgaagcagccggcctgttccaaggcactttccccgacggattcctgtgggccgttggttcggcagcttatcagactgagggtggatggcagcaacatgggaagggggcttcaatttgggacacattcacccatcatcctctcgcgccaccaggtgatagcagaaacgccagtttgccgttgggggctccatctccgctgcaaccagcgactggcgatgttgcgagcgactcgtacaacaatgtattcagggacaccgaggcacttcgcgagctaggtgtcactcactatcgattctcaatctcatgggctagggtactgcctaacggcagcgccggggtgcccaacagggaaggcctccgatactacagacgtctgcttgaaaggctacgtgaactgggcgtgcagccagttgtgacattgtaccactgggatcttccgcagaggctgcaagatgcgtatggtggctgggccaatcgggctttagccgatcacttccgagattacgcagaattgtgtttccgacactttggtggtcaggtcaagtattggattactatcgacaatccctatgttgttgcgtggcatggatacgccaccgggcgtttggcacctgggatccggggcagtccgcggcttggctacctggtggcgcacaatttgttgttggcacacgcaaaggtttggcacctgtacaacacgtcatttcgaccaacacaggggggtcaggtatccattgccttgtcaagccattggattaatccacgccggatgacggatcattccataaaggaatgtcagaagagcttggattttgttctcggctggttcgccaagcccgttttcatagacggtgattaccccgagtccatgaagaataacctatcaagcatactccctgatttcactgaatcggaaaagaagttcatcaagggcacggcggatttctttgcgctttgtttcggaccgaccttatcatttcaactgctggatcctcacatgaaattcagacagctggagtctcccaatctccggcaactcctttcctggattgacctagagtttaaccatcctcaaatctttatcgtggaaaacggctggttcgtgtctggaaccaccaaacgggatgatgctaaatacatgtactacctgaagaaattcatcatggagacgctgaaggccatcaagcttgatggcgtcgatgtgatcggctatacagcttggtctctcatggatggctttgagtggcatcgcggctattcaattcgtcggggtcttttctacgtggactttctttcacaagacaaaatgctgcttcctaaatcctctgccttgttttatcaaaaactgatcgagaagaacggctttccaccccttcccgaaaatcaacctctcgaaggaacgtttccatgcgacttcgcatggggggtcgttgacaattatattcaagtcgacaccacactctcgcaattcaccgatctcaatgtttatctttgggatgtccatcactctaagcggctcatcaaagttgacggagtggttaccaagaaacgcaagagttactgtgttgatttcgctgccatccaaccgcagatcgcactcttacaggaaatgcacgtcactcactttagattcagcttggattgggcattgattttgccgcttgggaatcagtcccaggtcaaccataccattcttcaatattaccgttgcatggcgtccgaattggtccgggtgaacatcactccggtggtcgctctgtggcagcccatggcgcccaatcaaggcctcccaagactactagcccgacaaggcgcctgggagaacccgtacacggctcttgccttcgctgagtacgccaggttgtgcttccaggaactcggacatcacgtgaaactgtggattactatgaatgagccttacacccggaacatgacgtattctgccggccataatctgctcaaagcccatgctctggcgtggcatgtctacaacgaaaagttccgccatgcacaaaatggaaagatctccattgctctgcaggctgattggattgaacccgcatgcccatttagtcagaaagataaggaggttgcggaaagggtcctggaattcgatattggttggttggcagagccgatcttcggttccggagattatccgtgggtgatgcgggattggctgaaccaacgtaacaatttcctgttaccatatttcacggaagatgaaaagaagctaattcaaggcacgtttgattttcttgcgttgtcacactatacaaccattctggtggattcagaaaaggaagaccctatcaagtacaacgactatctggaggttcaagagatgaccgatattacgtggttgaatagtccaagccaagtcgcagttgtgccttgggggctccgaaaggtccttaattggctcaaattcaagtatggggatctgcctatgtacattatttcgaacggtattgatgacggtctgcatgccgaagatgaccagcttcgggtctactacatgcagaactatataaatgaggcccttaaagcacatatcttagatggcataaacctttgcggatacttcgcctatagctttaacgaccgaaccgctccacggttcgggctgtacaggtacgccgcagaccaatttgaacctaaggcttccatgaagcactataggaagatcatcgattctaacggctttccgggacctgaaaccctcgagaggttctgccccgaggaattcaccgtgtgcaccgagtgttccttctttcatactaggaagtcccttctcgcattcatcgcttttctttttttcgcgagtatcatctccctgtcactgatcttctactactcgaaaaaggggcgccgcagctataag

SEQ ID NO: 15105 - DNA, 3036 bp, synthetic construct; identical to SEQ ID NO: 15104
  misc_feature 1..3036: note = source = /note="Description of Artificial Sequence: Synthetic coding sequence"
  source 1..3036: mol_type = other DNA

SEQ ID NO: 15106 - DNA, 3036 bp, synthetic construct
  misc_feature 1..3036: note = source = /note="Description of Artificial Sequence: Synthetic coding sequence"
  source 1..3036: mol_type = other DNA
atgccggcctcggcgccgccaagacgcccgcgccctccgccgccttcactttccctgctcttggtgctgttgggactgggaggccggcgattgcgcgccgaaccgggagacggtgcacagacctgggctcgcttcagcagacctcccgccccggaagcagcaggactctttcaaggaactttccccgacggctttctgtgggctgtgggatcggccgcgtaccagaccgagggcggctggcaacagcacgggaaaggagcctcaatctgggacacctttacccatcatcccctggcgccaccgggtgatagccgcaacgcgtcgctgccactcggagccccctcgccactgcagcctgccactggagatgtagcaagtgattcctacaacaacgtgttccgagacaccgaggctctccgcgagctgggcgtcactcattatagattctccatctcgtgggcccgtgttctcccgaacggctcggccggtgtgccaaacagagaaggactgagatactaccggagactcctggaaaggctgcgggagctgggagtgcagccagtggtgaccctctaccactgggatcttccccagcggctccaggacgcatacggtggatgggcgaaccgcgccctggcagaccacttcagggactacgctgaattgtgcttccggcatttcggagggcaagtgaagtattggatcaccattgacaatccctacgtggtcgcttggcacgggtacgcaaccggacggctggcgccggggatccgtggctcaccaaggcttgggtacctggtcgcccacaatctgctgctcgcccacgccaaggtctggcatctttacaacacctcctttcggccgacccagggtggacaggtgtctatcgctctctcgtcgcactggatcaaccctcggcgcatgacggatcattcaatcaaggagtgccagaagtcccttgatttcgtgctgggatggttcgccaaacctgtgttcatcgacggtgattacccagaatcgatgaagaataacctgtcctcgatcctgccagacttcacggagtcggagaagaagtttattaaggggaccgcagacttttttgccttgtgcttcggacccactctcagcttccaactcctggacccgcacatgaagttccgccaactggaaagcccgaacctccggcagctgttgtcctggatcgatctcgaattcaatcatccgcaaatcttcatcgtggaaaacggttggttcgtgtcaggtactactaaacgcgacgatgccaaatacatgtactatctgaaaaagttcatcatggaaactctcaaggcaatcaagctggacggcgtcgacgtgatcgggtacactgcgtggagccttatggacggattcgagtggcatagaggctatagcatccgcaggggtctgttctacgtcgactttctgtcccaggacaagatgctgctccctaaaagctcagcactcttttaccaaaaactcatcgagaagaatggcttcccgccgcttcctgagaatcagccactcgagggaaccttcccgtgcgattttgcttggggagtcgtcgacaattacatacaagtggacactactctctcccaatttaccgaccttaatgtgtacttgtgggatgtgcatcacagcaagcggctgatcaaggtcgacggcgttgtgactaagaagagaaagtcctactgtgtggatttcgccgccatccaaccgcagatcgcgctgctgcaagagatgcatgtgacccacttccggttctcgctggattgggcgctcatcttgcctctcggaaaccagagccaggtcaatcacactatcctgcaatactacaggtgcatggcctccgagttggtgcgggtcaacatcacgccagtggtcgcactctggcagccaatggccccgaatcagggcctgccgcgcctgctggctagacagggcgcctgggagaatccatacactgctctggcttttgccgagtacgcccgcctctgtttccaggaactgggccaccacgtgaaactgtggattactatgaacgaaccttacaccagaaacatgacgtacagcgctgggcacaacctgctgaaggcccacgcccttgcatggcacgtctacaatgagaagttccggcatgcccagaacgggaaaatctctattgcgctgcaagcggactggatcgaaccagcgtgccccttcagccaaaaagataaggaagttgccgaacgagttctggaattcgatatcggatggctcgcggaaccaatcttcggcagcggagactacccttgggtgatgagagactggctgaatcagagaaacaacttcctgctgccgtacttcactgaggacgagaaaaaacttattcagggaacgtttgactttctcgccttgtcccattacaccaccatcctcgtggattcagaaaaggaggacccgatcaagtacaacgactacctggaagtgcaagaaatgactgatatcacctggctcaatagcccttcacaggtggcagtcgtcccgtggggactgcgcaaagtgctgaactggctcaaattcaagtacggagatctgccgatgtacataatctcgaacggaattgacgacggactgcacgcggaagatgaccagctccgggtgtattacatgcagaactacatcaatgaggccctgaaggcacatatcttggatggcattaacctttgtggatacttcgcgtactcattcaacgatcgcaccgcgccgcggttcggactctacaggtacgctgctgaccagttcgaacccaaggcctccatgaagcactaccgcaaaattatcgattccaacgggttcccgggaccggaaactctggagcgcttctgcccagaagaattcaccgtgtgcaccgaatgctcattcttccacactcggaagtcgctgctggcatttatcgcgtttttgttcttcgcgtccattatctccctttcgctgatcttttactactcaaagaagggacgcaggtcgtataag

SEQ ID NO: 15107 - DNA, 3036 bp, synthetic construct; identical to SEQ ID NO: 15106
  misc_feature 1..3036: note = source = /note="Description of Artificial Sequence: Synthetic coding sequence"
  source 1..3036: mol_type = other DNA

SEQ ID NO: 15108 - DNA, 3036 bp, synthetic construct
  misc_feature 1..3036: note = source = /note="Description of Artificial Sequence: Synthetic coding sequence"
  source 1..3036: mol_type = other DNA
atgccggcttccgcaccaccgcggcggccgcggcctcccccgccatcactgtcgcttcttctggtgctgctggggcttggaggacggagactgcgggctgagccaggcgacggagcacaaacctgggcgagattttccagacccccagctccggaggctgccgggctgtttcaggggactttccccgacggcttcctctgggctgtggggagcgcggcgtaccagacggaaggaggatggcagcagcatggaaaaggcgcgtccatctgggacaccttcacccaccaccccctcgccccgccgggagattcccgcaacgccagcctgccactcggggcgccgtcaccgctgcagcctgcaaccggagatgttgccagcgattcatacaacaatgtgttccgggacactgaagcactgagagaacttggcgtgacgcactatcgattctccatctcttgggcccgcgtgctcccgaacgggtcggcgggcgtgccaaaccgggaaggcctgcgctactacaggaggctgttggaacggctcagggagctgggtgtgcagccggttgtcacgctgtaccactgggacctgcctcaacgccttcaagatgcatacggaggctgggctaatcgggccctggccgaccatttccgagactatgctgaactttgtttccgccacttcggaggtcaagttaagtactggattaccattgacaacccgtatgtcgtggcctggcacggatacgccaccggacgtctggctccaggcatccgaggaagcccaagactgggatacctggtggcgcacaacttgctcctggcgcacgcgaaggtctggcacctgtacaatacttcgttccgccctactcagggtggccaggtgtcgattgctctctcctcccattggatcaaccctcgccgcatgactgaccattccatcaaggaatgccaaaagtccctcgatttcgtgctgggatggttcgccaaacccgtgttcatcgatggagattacccggaatcgatgaagaataacctttcttccattctcccggactttactgagagcgaaaagaaattcataaagggtaccgcggatttcttcgccctgtgtttcgggcccactctctcctttcagctgctggatcctcacatgaaattccggcagctcgagtcacctaatttgcgccaactgctgagctggatcgacttggagtttaaccacccccagatcttcatcgtcgaaaacggctggtttgtttcaggtactacgaagagggacgatgcaaaatacatgtactaccttaagaaattcatcatggaaaccctcaaggcaatcaagctggacggtgtggacgtcatcggatatactgcctggtcgcttatggatggcttcgagtggcatcgcggatactcaatccggcggggactgttttacgtcgacttcctgtcgcaggacaagatgctcttgcctaagtcctccgccttgttctaccaaaagctgatcgagaagaatgggttcccgccactcccggagaaccagccactcgaaggaactttcccgtgcgacttcgcttggggagtggttgataactacatacaagtggacaccactttgagccaattcaccgacctgaatgtgtacctctgggacgtgcaccatagcaagagactgatcaaggtggacggcgtcgtgaccaagaaacgcaagtcgtactgcgtcgacttcgctgccattcaaccccaaatcgcactcctccaagagatgcacgtgacccatttcaggttctccctggactgggcgcttattctgccgttggggaaccaaagccaagttaaccatactatcctccagtattacaggtgcatggcgtcggagctggtccgggtgaacatcactcctgtcgtggccctgtggcagccaatggccccgaaccagggactgcctaggcttctggctagacagggcgcgtgggaaaatccatacaccgccctggcttttgcggagtacgcgcgtctttgctttcaagaactcggacaccacgtcaaactgtggataaccatgaacgaaccatacacccgaaacatgacctactcagccggacacaacctcctcaaggcacacgcgcttgcatggcacgtctacaatgagaaatttcgccatgcccaaaatggaaagatttctatcgcgttgcaggcagattggattgaacccgcttgtcccttttctcagaaagacaaggaggtggcggagcgagtgctggaattcgatattggctggctggcggagcccatcttcggtagcggtgactacccttgggtgatgcgcgactggctgaatcagcgcaataacttcctgctgccttacttcaccgaagatgaaaagaaactgatccagggtacttttgacttccttgccctcagccattacacgactatcctcgtggactccgagaaagaagatccgatcaagtacaatgattatcttgaagtccaggaaatgaccgatatcacctggctcaattcaccgtcgcaggtggccgtggtgccttggggactgcggaaagtgctgaactggctcaagttcaagtacggggatctgccgatgtacattatcagcaacggaatcgacgatgggctgcatgcagaggacgatcagctgcgggtttactacatgcagaactacatcaatgaggcgctgaaggcccacatcctggacggtatcaacctctgcggctacttcgcatactcgtttaatgaccgcaccgcaccacggtttgggctctacagatacgcagccgatcaattcgagcctaaggccagcatgaaacattacagaaagatcatcgattcgaacgggtttcctggcccggaaaccttggaaaggttttgcccggaggaattcactgtctgcacggaatgctcattcttccatacccgaaagtccctgttggcattcatcgcgttcctcttttttgccagcatcatctctttgtcactgattttctactactcaaaaaagggccggcggtcgtacaag

SEQ ID NO: 15109 - DNA, 3036 bp, synthetic construct; identical to SEQ ID NO: 15108
  misc_feature 1..3036: note = source = /note="Description of Artificial Sequence: Synthetic coding sequence"
  source 1..3036: mol_type = other DNA

SEQ ID NO: 15110 - DNA, 3036 bp, synthetic construct
  misc_feature 1..3036: note = source = /note="Description of Artificial Sequence: Synthetic coding sequence"
  source 1..3036: mol_type = other DNA
atgcccgcatccgcaccccccagacggcccagaccaccacctccaagtctttctcttctgctggtcctgcttggcctcggagggcgcagacttcgcgcagagcctggggatggggcacagacttgggctagattctctcgaccaccggctcccgaggctgccgggctgttccagggtacgttccccgatggcttcctgtgggccgtaggatcagcggcctatcagacagagggggggtggcagcagcacggcaagggagcctccatatgggataccttcacacaccaccccctggctccgcccggggattcacgaaatgcttcgctacctttgggcgccccctcgccactgcagcctgccaccggcgatgtggcttcagattcctataacaatgtgttcagagataccgaggccctgcgggagctcggagtcacccactaccgcttttccatcagttgggccagagttctgcctaatgggagcgcaggcgtgccgaatagagaaggcttgaggtattaccgtcggctgctcgagcgcctccgcgagctgggagtgcagccagttgtgaccctctaccattgggatctgcctcagcgcctgcaggatgcttacggcgggtgggcgaacagggccttggccgatcacttccgcgactacgctgagctgtgttttagacacttcggcggccaagtgaagtactggatcacaatcgataacccatacgtagtagcctggcatggttacgcaacgggtaggctggcacccggaatccgcggcagtcctcgcctggggtacctggtggcccacaaccttctcttagcccacgccaaagtctggcatctgtataacaccagcttccggcctacacaggggggccaggtgtccattgctctgagtagtcactggataaaccctagacggatgaccgatcactctattaaagagtgtcaaaaatctttagatttcgtgctaggatggttcgcaaagccggtctttatcgatggggattatcctgaaagtatgaagaataatctgagctcaatcctgcctgactttacggagagcgagaagaagttcatcaagggcactgctgacttcttcgctctgtgtttcggcccgaccttatcatttcagcttttagatcctcacatgaagttcagacaattggagtcacccaatctccgacagcttttgagctggatcgatctggagttcaatcacccccagatcttcattgtagaaaatggctggtttgtgtctgggactactaagcgtgatgacgctaagtacatgtactacctcaaaaagttcatcatggagacgctcaaagccatcaagctggatggcgtagacgtgattggctacaccgcctggagcctcatggatggatttgaatggcatcggggctactctattcgcagaggactgttttacgtggatttccttagccaggataaaatgctactaccaaagtctagcgccttattctaccagaaactgatcgagaaaaacgggttcccgcccctgcccgagaaccagcccctggaaggaacatttccttgtgatttcgcgtggggagttgtggataactacattcaagttgatacaacactgtcgcaattcacggatctcaacgtgtacctatgggatgtgcaccacagtaagcgcctgattaaggtggatggcgtagtgactaaaaagagaaagtcttactgcgtggactttgccgcgattcaacctcagattgccttgctgcaggaaatgcacgtcacccattttcgctttagcttagattgggctctcatactgcctcttgggaaccagtcccaagtgaaccacacaatattacagtactataggtgcatggcgtctgaacttgtgagggtcaacatcacacccgtggtggccctgtggcaacctatggctcctaaccaggggctcccaaggctgctggcgcgccagggcgcttgggaaaatccatacaccgcccttgcctttgcagagtacgctagattgtgcttccaggaactgggtcaccacgtaaagctctggatcacaatgaacgagccttatactcgcaatatgacgtactctgctggacacaacctgttaaaggcacatgccctggcgtggcatgtgtacaacgagaagttccgacacgcccagaatggaaaaatttccatcgccctacaggctgactggatcgagcctgcatgtccttttagccagaaagataaggaggtggcggagagagtgttagagttcgacatcgggtggctcgcggagcctattttcgggagcggcgattacccatgggtcatgcgggattggttgaatcagcggaacaatttcctgctaccttacttcacagaagatgagaaaaagttaatccaaggtacatttgactttctggccctgagccactatactaccattcttgtggatagcgaaaaggaggacccaataaagtacaatgactatctcgaagttcaagagatgaccgacatcacttggctcaactctcctagccaggtggccgtggttccgtgggggttgcgcaaagtcctgaattggctcaagttcaaatacggagacctcccaatgtacattatttctaacgggatcgatgatggattgcacgccgaggacgaccagctgcgtgtatactacatgcagaactacatcaatgaggccctcaaggcacacatcctggatggcatcaacctgtgcggatattttgcttactcctttaacgaccgcacagccccaagatttgggctgtacagatatgctgcagatcaatttgaaccaaaggccagcatgaaacattatagaaaaatcattgattcaaatggatttcctggcccagagactctagagcgcttttgtccggaggaattcacagtgtgtaccgagtgttccttcttccacacccgaaaatctttattggcattcatagcttttctattcttcgcctcgatcatctcattgtcactgatcttttactactcaaagaagggtcgtaggtcctacaaa

SEQ ID NO: 15111 - DNA, 3036 bp, synthetic construct; identical to SEQ ID NO: 15110
  misc_feature 1..3036: note = source = /note="Description of Artificial Sequence: Synthetic coding sequence"
  source 1..3036: mol_type = other DNA

SEQ ID NO: 15112 - DNA, 3036 bp, synthetic construct
  misc_feature 1..3036: note = source = /note="Description of Artificial Sequence: Synthetic coding sequence"
  source 1..3036: mol_type = other DNA
atgccggcatcagcgccgccacgccgcccgcggcctcccccgccctcgctctccctcctgctcgtcctgctcggactgggagggcgcagattgcgcgcggaaccaggagacggagctcaaacttgggctcggttctcgcgcccaccagccccggaggcagctggacttttccagggtactttcccggacggtttcctgtgggccgtggggagcgccgcctaccaaactgaaggaggatggcaacagcacggaaaaggcgcgtcgatctgggatactttcacccatcaccccctggcaccaccaggcgactcccgaaatgctagcctgccgctgggtgcaccctcccctcttcaaccagctactggagacgtggcaagcgactcctacaacaacgtgttcagggacaccgaagccctgagagagctgggtgtgactcattaccgcttttctatctcatgggcgcgcgtcctgcctaatggctcagcaggagtacctaaccgggaaggactgcggtactaccgcaggctcctggaacgtctgcgggagctcggagtgcagccagtggtgactctgtaccactgggatctgccgcaacggctccaggatgcttacggaggatgggctaaccgggccctggcggatcacttccgcgactatgccgaactctgcttcaggcacttcgggggtcaggtgaagtactggatcacgatcgataacccgtacgtggtggcctggcatggttacgccaccgggcgcctcgcccctggaattcggggatcgccacggctgggttacctcgtggcccataacttgttgttggcgcatgcaaaggtgtggcatttgtacaacacgtccttccgcccaacccagggaggacaagtatccatcgccctcagctcacattggatcaacccaagacgaatgactgaccattcgatcaaggagtgccaaaagagcttggactttgtgttgggatggtttgccaagccagtgttcatagacggcgactacccagaatctatgaaaaacaatctgtcatccatcttgccagacttcaccgagtctgaaaagaagtttatcaaaggaactgctgacttctttgcgttgtgttttggcccgactttgagcttccagctgcttgatcctcatatgaagttcagacagttggaatcacccaacctgagacagctgctcagctggattgacctggagtttaaccacccgcagatcttcatcgtggaaaatggatggttcgtgtcggggaccaccaagcgcgacgacgcaaagtatatgtattacctgaagaagttcatcatggagactctcaaagccatcaagctggatggcgtggacgtcatcggatataccgcgtggtcgctcatggatggattcgaatggcatagaggatactccatccggcgcggcctgttctacgtcgattttctgtcgcaagataagatgcttcttcctaaatcgagcgcactgttctaccaaaagctgatcgagaaaaacggattcccgccgctgcctgagaaccagccgctcgagggaaccttcccgtgcgattttgcctggggagtggtcgacaactatatccaagtcgacaccactctctcccagttcacggatttgaatgtttacctgtgggacgtgcaccacagcaagcgtctcatcaaggtcgacggtgtcgtcacgaagaaacgcaagtcatactgcgtggacttcgcggccatccaaccgcaaatcgccttgctgcaggaaatgcacgtcactcattttcggtttagcttggattgggccttgatcctgccgttggggaaccagtcacaggtgaaccacaccatcttgcagtattaccggtgtatggcctcagagctcgtcagagtgaacattaccccggttgtggccctctggcaaccgatggctcctaaccaaggcctgcctcggctcctcgctagacagggtgcctgggagaatccctacaccgctttggcattcgcagagtacgccagactctgtttccaggaattgggacaccacgtgaagctctggataactatgaacgagccttacactaggaacatgacctactcggcggggcataatctgcttaaggcccacgcgctggcgtggcacgtctacaatgaaaagttcagacacgcccagaatggcaagatctcgattgcactgcaggcggattggatcgaaccggcttgcccattctcccagaaggacaaggaagtggcggaacgagtgctggagtttgacatcggctggctcgccgaaccgatcttcggcagcggggactacccatgggttatgcgggattggcttaatcagcgcaacaacttccttctgccctacttcactgaggatgagaaaaaactcatccaggggaccttcgactttctggccttgtcccactacactaccatcttggtcgacagtgaaaaagaagatccgatcaagtacaatgactacttggaggtgcaggaaatgaccgacatcacctggcttaactcgccttcccaagtggctgtagtgccttggggcctgaggaaagtgctgaattggctcaagttcaagtacggagacttgccgatgtacatcatctcaaacggcattgacgatggactgcacgctgaagatgaccagctccgcgtctactacatgcagaactacattaatgaggcgttgaaggcccatatcctggacggaatcaatctgtgcggttacttcgcctactcatttaacgacaggacggcgcctagattcggactctaccgttacgcggccgatcaattcgaacccaaggcgtcaatgaaacactaccgcaaaatcatcgattcgaatggtttccccggcccggaaaccctggagcgcttttgcccggaagaattcaccgtgtgcaccgaatgttcgttcttccacacgcggaagagcctcctcgcgttcattgcattcctgtttttcgccagcatcatctcgctgtctctgatcttttactattccaagaaggggcgccgatcatacaaa

SEQ ID NO: 15113 - DNA, 3036 bp, synthetic construct; identical to SEQ ID NO: 15112
  misc_feature 1..3036: note = source = /note="Description of Artificial Sequence: Synthetic coding sequence"
  source 1..3036: mol_type = other DNA

SEQ ID NO: 15114 - DNA, 3036 bp, synthetic construct
  misc_feature 1..3036: note = source = /note="Description of Artificial Sequence: Synthetic coding sequence"
  source 1..3036: mol_type = other DNA
atgccagcgtccgcaccgccaagaaggccacgacctccacctccgtctctgtcactgctcctggtgctcctgggactggggggcaggaggctgagagcagaaccaggggacggcgcccaaacctgggccaggttctcccgacctcctgctccggaagctgccggcctctttcaggggacctttcccgatggtttcttgtgggcagtggggtcagcagcctaccagacagaaggggggtggcagcagcatggcaagggtgcttccatctgggacacttttacacatcatcctctcgcccctccgggggacagcaggaacgcctctctcccgctgggcgctccctctcctctgcagcccgcgacaggggacgtggcatccgactcttacaacaatgtgtttcgtgatacggaggctctgcgcgagctgggagtgactcactacaggttcagcatatcctgggcacgggttctacctaacggatctgccggtgttcccaatagagaggggcttaggtactatcggaggctcctggaacgcctaagggagcttggagtgcagcccgttgtaaccctgtatcattgggatctgccccaaaggctccaggatgcatatgggggctgggcgaatcgcgccctcgccgaccatttcagggactatgctgagctctgtttcagacattttggagggcaagtaaagtactggatcaccatcgataacccgtacgttgtggcatggcacggatatgccacgggacgactggcccctgggattcgcgggagccctaggctgggttatctggtcgcgcataaccttctgctggcccatgcaaaggtgtggcatctctacaacactagtttcaggccgacacagggggggcaggttagtatcgctctatcttcccactggattaatcctcgaagaatgacggatcactccattaaggaatgccaaaagtctctggacttcgtcctcgggtggtttgctaagcctgtctttatagatggcgattaccccgagagtatgaagaataatcttagttctatactgccggattttaccgaatcggagaaaaagttcatcaaaggaactgcagacttctttgccctgtgttttgggcccacgctgtcttttcagctgctggatccccatatgaaatttagacagctcgagagccctaatcttcggcagctgctctcttggatcgatctggagttcaatcatccacagatcttcatcgtggaaaatggctggtttgtctctggcaccaccaagcgcgacgacgctaaatacatgtactacctcaagaaatttattatggaaacactcaaggctattaagctcgatggagtcgacgtgatcgggtacacagcctggtccctgatggatggattcgaatggcatagagggtattcaattcggagaggcttgttttatgtcgacttcctgagccaagataagatgttacttcccaagtctagcgccctgttctaccaaaaactcatcgagaagaacggttttcctcctctgccagaaaatcagcccctggaaggaacatttccttgtgactttgcctggggagtggtagataattatatccaggtcgataccacactctcccagttcaccgacctcaacgtgtacctttgggacgtacatcactctaaaaggctcattaaggtagatggtgtggtgacgaagaaaagaaaaagctactgtgtcgattttgcagcaatccagccacagatagcacttctgcaagaaatgcacgtcactcactttcgattttctcttgactgggccctcattctgcccctgggcaatcagtcccaggtcaatcataccattctacagtactaccgatgcatggcatctgagctggtgcgcgttaacataacaccagtggtggcactgtggcagcctatggcaccaaatcaagggctgccacggctcttggccagacaaggcgcgtgggagaatccttatacagctcttgcctttgcggagtatgcgcgactgtgtttccaggaactaggacaccacgtgaaattgtggatcacaatgaacgaaccttataccagaaatatgacatacagcgccgggcacaatttgctgaaggcgcacgcactggcttggcacgtctataatgaaaagtttaggcacgcccaaaacggaaagataagtatcgctctccaggcagactggatagaacctgcttgcccattttcacagaaagacaaagaagtggccgaaagggttttggagttcgacataggctggctagccgagccaatctttggctcgggggattacccatgggtcatgcgtgattggcttaatcagcggaacaactttctgctgccttatttcacagaagatgaaaaaaagttaatccaaggaacgtttgattttttagcactctcccactatacaacgattcttgtggatagcgaaaaagaggatccaatcaaatataacgactacctggaggtgcaggaaatgacagatatcacttggctgaactcgccctcccaagtagccgtggttccatggggactgcgcaaagtgctgaactggctcaaattcaaatacggcgacttgccaatgtacattatatcaaatggcatcgacgacggactccatgcagaggacgaccagctgagagtgtattatatgcagaattacattaacgaggcactgaaggcacatatcctcgatggaatcaatctttgtggttactttgcgtacagcttcaacgacagaacagctcctaggtttggtctttaccgttatgccgccgatcagtttgaacctaaggcctccatgaaacattaccgaaagatcatcgattcgaatggattcccaggccccgaaacccttgagcggttctgtccggaagagttcacagtgtgcaccgagtgctccttcttccacaccaggaaaagcctgctagccttcattgcctttttattctttgcttcaataatatccctctcgttaatcttctattactctaagaagggcagaaggtcctacaag

SEQ ID NO: 15115 - DNA, 3036 bp, synthetic construct; identical to SEQ ID NO: 15114
  misc_feature 1..3036: note = source = /note="Description of Artificial Sequence: Synthetic coding sequence"
  source 1..3036: mol_type = other DNA

SEQ ID NO: 15116 - DNA, 3036 bp, synthetic construct
  misc_feature 1..3036: note = source = /note="Description of Artificial Sequence: Synthetic coding sequence"
  source 1..3036: mol_type = other DNA
atgccagcttcagctcctccaagacgaccaagacccccgccaccatctctatcactgttgttggtcttgctaggcttaggaggacgaagattacgtgccgaaccaggtgatggagcccagacatgggctagattttcacgccccccagcacccgaagcagctggactgtttcaaggaacgttccctgatggtttcctatgggctgttggttctgctgcatatcaaactgagggaggatggcaacaacacggaaaaggtgcatcaatttgggatacgtttactcatcatccactcgctccaccaggagattcccgtaatgcaagcttacccttgggtgccccttcgccactccagccagcaaccggggacgttgcttccgattcttataataatgtctttcgtgatacggaagcgcttagagaacttggagttactcattacagattcagcataagctgggctagagttttgccgaacggtagtgctggagtgcctaatcgggagggtctaagatactaccgcagacttcttgaacgtcttcgtgagctaggagtccaacctgtggttactctctaccattgggatttgccacaacgtttgcaagatgcctacggaggatgggccaatcgcgctcttgctgatcactttagagattatgccgagctgtgcttccgccactttggagggcaagtaaaatactggatcacaattgataatccatatgtagttgcatggcacggttacgccactggacgtcttgccccgggaatccggggcagtccgcgtctcggctaccttgttgcgcataacctgctgctcgcccatgcgaaggtttggcacctttataacacttcgtttcgtccaactcaggggggacaagtcagtattgccctcagcagtcattggatcaatccacggcgcatgacagaccatagtatcaaggagtgtcaaaaatcacttgactttgttttgggctggtttgcgaagcccgtatttattgatggcgattatccagagtccatgaagaataatctatctagcatcctcccagatttcactgaatctgaaaaaaaatttattaaaggaactgcagactttttcgccctttgttttggaccgactctatcttttcaactgcttgatccacatatgaaatttcgacaactcgaatctccgaacttgaggcagcttctatcttggattgatctggaattcaatcatccacaaattttcatcgtcgagaatggatggtttgtcagcgggacaacgaagcgggatgatgccaagtatatgtattacctaaagaagttcattatggagacactgaaggcgatcaaactggacggagtcgacgtgataggatacacagcttggtcactaatggatggatttgaatggcacagaggttacagtatcagacgtggtctcttctatgttgacttcctttcccaagataagatgttgttgccaaagtcaagtgctcttttttaccaaaagcttattgaaaaaaacggcttcccaccacttccagagaaccaaccactggaggggacattcccttgcgattttgcctggggagttgttgataactacattcaagttgatacgaccctatcacagttcactgatttgaatgtgtatctttgggatgtgcatcactccaaacggcttattaaagtagacggcgttgttaccaagaaacgaaagagctattgtgtagactttgcagccattcagccacagattgccctgctgcaagagatgcacgttacgcacttccgtttctcgctcgactgggctctaatcctccctcttggaaaccagtcacaagttaatcatacaattttgcagtactatcgctgtatggccagtgaactggttcgcgtgaacattactcccgtggttgcattatggcaaccgatggctccgaaccaaggattaccaagactacttgcgagacagggagcgtgggaaaatccgtataccgcactcgctttcgctgagtatgctagattgtgtttccaagagttaggacatcatgttaaattatggattacaatgaatgaaccgtatactaggaacatgacttattctgctggccacaaccttttgaaggctcatgctttggcttggcatgtttacaatgaaaagttccgccacgctcaaaatggcaaaatttcaattgccctccaagccgattggattgaaccagcctgtccatttagtcaaaaagacaaggaagtagctgagagagtccttgagttcgacattggatggctcgcggaacctatctttggtagcggagattatccatgggttatgagagactggttgaatcaacggaacaatttcctccttccatattttacagaagatgaaaaaaaattgattcaaggaaccttcgattttcttgcgttgtcacactatactacaatattagtcgattctgaaaaagaagaccctattaagtacaacgattaccttgaagtccaagagatgaccgacattacctggcttaactcgccatcccaagtggctgttgttccatggggacttcgaaaggtgttaaattggcttaagttcaaatatggagatcttccaatgtatatcatcagcaacggtatagatgacggactacatgcagaagatgaccaattgagggtctattacatgcaaaactatatcaatgaggcgttgaaggcacatattcttgacggtatcaacctctgcggatattttgcttacagttttaatgatagaacagcgccaagattcggactgtacagatacgcagctgatcaattcgaaccgaaagcttcgatgaaacattatagaaaaattattgattcgaatggatttccaggacctgaaacgttagaaagattctgcccagaagagtttacagtttgtacagagtgttccttttttcatacacgcaaaagtttgttggcttttatcgcatttctttttttcgcttcaataatatctctatcgctcattttttactattctaaaaagggtcgtaggtcttacaaa

SEQ ID NO: 15117 - DNA, 3036 bp, synthetic construct; identical to SEQ ID NO: 15116
  misc_feature 1..3036: note = source = /note="Description of Artificial Sequence: Synthetic coding sequence"
  source 1..3036: mol_type = other DNA

SEQ ID NO: 15118 - DNA, 3036 bp, synthetic construct
  misc_feature 1..3036: note = source = /note="Description of Artificial Sequence: Synthetic coding sequence"
  source 1..3036: mol_type = other DNA
atgccagcgtccgctccgcctcgcagaccgcggccgccgccgccttccctgtcgctgctgctcgtcctgctgggcctcggaggaagaaggctgcgggccgagcccggtgatggagcgcaaacttgggcacgcttttccaggccgccggccccggaggccgcaggcttgttccaaggaaccttcccggatggcttcctctgggccgtggggtccgctgcctaccaaactgaaggaggctggcagcagcatggaaagggtgctagcatctgggacaccttcacccaccatccgctcgctcccccgggtgactcaaggaacgcctcgctgccgctgggagcaccctcaccactgcaaccggccactggagacgttgcgtcggactcgtacaacaacgtgttccgggatacggaggcgctcagggagctcggagtgacccactaccggttctcgatctcctgggcacgggtgctcccgaacggatcagcgggggtgccaaacagagagggactcaggtactacagacgccttctcgaaaggctgcgcgaacttggtgtccaaccggtcgtgactctgtaccactgggatctgccgcaacgcctccaggatgcctatggggggtgggcgaatcgggccctggccgatcatttccgggactatgccgagctctgtttccgtcacttcggagggcaggtgaagtactggatcaccattgacaacccgtacgtggtggcatggcacggctacgccactggacgcctggcacctggcatccgcggctcgcccagattgggatacctcgtggcacacaatctcttgctggcgcatgccaaggtgtggcacctctacaatactagctttcggcctacccagggtggccaggtcagcatcgcgctgagctcacactggatcaatccgagacgcatgaccgatcactcaatcaaggaatgccagaagagcctggatttcgtcctgggatggttcgccaagcctgtgtttatcgacggagactatccggaatcaatgaagaacaacctgagtagcattcttccggattttactgaaagcgaaaagaagttcatcaaagggactgccgacttctttgccctgtgcttcggtcctactctgagctttcagctgctcgaccctcatatgaaattccgccagctcgaaagccctaacctgcggcagctgttgagctggatcgatctcgagtttaaccatcctcagatctttatcgtcgagaacggttggtttgtgtccggtactactaagcgggacgatgctaagtacatgtattacctgaagaagtttatcatggagactctcaaagccatcaaactcgatggcgtcgatgtcatcggatacacggcgtggagcttgatggacggattcgaatggcatagaggctacagcatcagaaggggtcttttctacgtggacttcctgtcccaagacaagatgctgctgccgaagtcctcagcgttgttctaccagaaactcatcgaaaagaacggattcccaccattgccggaaaaccaacctctggaaggtactttcccatgcgattttgcgtggggagtggtggacaattacattcaggtggatactaccctctcacagttcactgatctgaatgtgtacctctgggatgtgcaccacagcaaacggctgatcaaggttgatggagtggtgaccaagaaacggaaatcctactgcgtggattttgcagcgatccaacctcagatcgccctgctgcaagaaatgcacgtcactcatttccgcttcagcctggactgggcactgatcctgccactgggtaaccagtcgcaggtcaatcataccatcctccaatactaccggtgcatggcctcagagctggtgcgcgtgaacattaccccggtggtggccctctggcagccgatggcccctaaccagggtttgccgcggttgttggcacgccaaggggcctgggagaacccatataccgcccttgcgtttgccgaatacgctagactctgctttcaggaactcggacaccatgtgaaactgtggatcaccatgaacgaaccctacacccgcaatatgacttactcagccggacataacctcctcaaggcccacgccctggcctggcatgtgtacaacgagaaattccgtcacgcccaaaacggaaagattagcatcgccctgcaggcggactggatcgagcccgcttgccctttcagccaaaaagataaggaagtggctgagagggtcctcgaattcgacatcggatggctggctgagcctattttcggatcgggcgactacccgtgggtgatgcgcgattggctcaaccaacggaataacttcctcctgccatacttcaccgaagatgaaaagaagctgatccagggtactttcgactttctggcactgtcccactacactaccatcctggtggactccgagaaggaagatccaatcaagtacaatgactacctcgaagtccaggagatgaccgatatcacttggctgaactcaccgtcccaagtggccgtggtgccgtggggactccggaaggtgctcaactggttgaagttcaagtacggtgacctgccaatgtacatcatctccaatggaattgatgatggactccatgccgaggacgaccagctgcgcgtgtactacatgcaaaactacatcaatgaagccctgaaggcacacatattggatggaatcaacttgtgcggatacttcgcatactcgttcaatgaccggactgcgccgcgctttggcctgtacagatacgctgcggaccaatttgaaccaaaggcctcgatgaaacactaccgcaagattatcgacagcaatggattcccaggcccagagactttggaacgcttctgcccggaggaattcaccgtgtgtaccgagtgtagcttcttccacacgcggaagagcttgctcgcgttcatcgccttcctctttttcgcctcaataatctcactttctctgatcttttactactcgaagaagggccgtagatcgtacaag

SEQ ID NO: 15119 - DNA, 3036 bp, synthetic construct; identical to SEQ ID NO: 15118
  misc_feature 1..3036: note = source = /note="Description of Artificial Sequence: Synthetic coding sequence"
  source 1..3036: mol_type = other DNA

SEQ ID NO: 15120 - DNA, 3036 bp, synthetic construct
  misc_feature 1..3036: note = source = /note="Description of Artificial Sequence: Synthetic coding sequence"
  source 1..3036: mol_type = other DNA
atgccagcatcagcacctcctagacggccccgcccccctccccctagcctctctttgttactcgtattgcttggtctaggaggacggcgactgagggcagaaccaggggatggcgcccagacttgggccagattctcccgcccacccgcaccagaagcggccgggctgttccaagggacattccccgacgggtttctgtgggctgtagggagcgccgcgtaccagactgagggaggttggcagcagcacggaaagggcgcctccatttgggacacttttactcatcatcccctcgccccacctggggatagccgaaacgcttcgttgccgctgggagctccaagtcccctgcagcctgccacaggggatgtggcgtcagacagctacaacaatgtattccgggacacagaggccctccgtgaactcggagtcacccactaccgcttctctatctcttgggccagggtgctgcctaatggatccgccggggtgcctaatcgcgaggggcttcgttactataggaggttattagagagactgcgggaacttggcgtccagcccgtagtgactctgtatcattgggatcttccacaacgattgcaggacgcctacggagggtgggccaacagagctctggccgaccatttcagggattacgctgaactgtgctttcgacacttcggcggacaggtgaagtactggatcacgatcgataacccctatgttgtggcttggcacgggtacgctacgggccggctggcgcctggcattagaggcagtccccgtttgggatacctggtcgctcataacctgctcctggcacacgcgaaggtgtggcacctgtataacacatcatttcgtccgacgcagggaggtcaggtcagtatcgccctgtcttcacattggatcaatccaaggcggatgacggaccactcaatcaaggaatgccagaaaagcctggattttgtacttggctggtttgctaagccagtatttatcgatggtgactatccagagtcaatgaaaaataacctgtcatctatcctcccagactttacagagtcagaaaagaaatttataaagggcactgctgatttctttgccctgtgttttgggcccacactcagttttcagttgttggaccctcatatgaaattccgccagctcgagtcccctaatctgcggcagctgctttcatggattgatctagaatttaatcacccacagatttttatagtggagaatggatggttcgtttcggggaccaccaaaagagatgatgctaaatacatgtactatctcaaaaagttcatcatggagacactgaaggcaataaagcttgatggcgtcgatgtgatcgggtataccgcgtggtcacttatggatggcttcgagtggcacagaggctacagtattcgcagaggattgttttacgtagactttcttagccaggacaagatgctacttcccaagagtagtgccttgttttatcagaagcttatagaaaagaatggattcccacccctgcccgagaaccagccactggaggggactttcccctgcgactttgcgtggggcgtcgtggataactacattcaggtggacacaactctctcgcagttcactgacctgaatgtctatctatgggacgttcaccattccaaaaggctaatcaaagtcgacggagtggtaacaaagaagaggaaatcctactgtgtcgacttcgcagccatccagccccagatcgcccttttgcaggagatgcatgtgacccactttaggttttcattagactgggcactgatcctgcccttggggaaccagagccaggtgaatcacactattctacagtattaccggtgcatggcctcagagctcgtccgtgtgaacataacacccgtggtcgccctctggcagccgatggccccaaaccagggcctaccacgactgctcgcgaggcagggagcctgggaaaatccatacaccgcactggcctttgctgaatatgctcgactttgctttcaggaattgggccaccatgtcaagctgtggatcactatgaacgagccttacaccaggaatatgacgtattcagctggtcacaaccttctgaaggcccatgccctggcttggcacgtttataatgagaaatttcggcatgctcagaacggaaaaatttcaatcgcactccaggctgattggatcgagcctgcttgtcccttttcgcagaaggataaggaagtggcagaacgggtcctggagttcgacatcggctggctggccgagcccatcttcggcagcggcgattacccttgggtgatgagagactggctaaaccagcggaacaatttcttgttaccatattttacagaggacgagaagaagctaatccagggtacttttgattttctcgcactttcccactacaccaccatattggtcgactcagagaaggaggatccaatcaagtataatgattacctggaagtgcaagagatgacggatattacttggctgaacagtcctagtcaagtcgccgtagtgccctggggcctgcgcaaggtcctgaactggctgaagttcaagtacggggatctgccaatgtacattattagcaatgggatcgacgatggcctgcacgcagaggacgatcagctcagagtatattacatgcagaactatataaatgaggccctcaaggcacacattcttgacggcatcaatttgtgcggttatttcgcctacagttttaacgatagaaccgctccgcggtttggcttgtataggtacgccgccgatcagtttgagcctaaggcttctatgaaacattaccgcaagataattgacagtaacggatttcccggcccagagacactagagcgcttttgtccagaggaattcactgtgtgcacggaatgcagtttcttccacacaagaaagtcactcctggcctttatcgctttccttttcttcgcatccatcatttcactgtcattaatcttctactacagcaaaaaagggagaagaagttataag

SEQ ID NO: 15121 - DNA, 3036 bp, synthetic construct; identical to SEQ ID NO: 15120
  misc_feature 1..3036: note = source = /note="Description of Artificial Sequence: Synthetic coding sequence"
  source 1..3036: mol_type = other DNA

SEQ ID NO: 15122 - DNA, 1647 bp, synthetic construct
  misc_feature 1..1647: note = source = /note="Description of Artificial Sequence: Synthetic coding sequence"
  source 1..1647: mol_type = other DNA
atgcctgcatcagctcctccccgcaggcctagacctccaccccctagtctctcactgttgctcgtcctcctgggactgggtggaaggcgcctgcgcgctgaacctggagacggcgctcagacttgggctcgcttctctaggccaccagccccagaagcagccggcctgttccagggcacttttcccgatggtttcctgtgggccgtaggtagtgccgcttatcagacagagggcggttggcaacagcacggcaaaggcgctagcatttgggatacctttactcatcacccacttgcaccaccaggcgattcacgtaacgcctccctgccactcggcgctccatcacctcttcaacctgccaccggagatgttgctagcgactcttacaacaatgtgttccgtgatacagaagctttgagagagctgggagttacccactaccgctttagtattagttgggctcgtgtgctgcccaacggaagtgcaggcgtgccaaacagggagggactccgttactacaggagactgctcgagagacttcgtgaattgggcgtgcaacccgtcgtgactctgtaccactgggatctgccccagagactccaggacgcctacggtggttgggcaaatcgtgcactggctgaccactttagagactatgcagagctttgttttagacacttcggtggacaggtgaagtattggatcaccatcgacaacccctacgtggtggcatggcatggctatgctaccggccgccttgcccctggaatccgcggctctccccgcctgggatatctcgtcgctcacaacctgctcttggcccatgccaaagtttggcatctctataatacatccttccgccccactcaaggtggtcaggtctctatcgccctgtcttcacactggattaaccctaggcgtatgactgaccatagcatcaaagagtgccagaagtcccttgattttgtgttgggatggtttgctaaacccgttttcatagatggcgattatccagaatctatgaagaacaacttgagttctattctgccagacttcactgaaagcgaaaagaaattcattaagggtactgccgacttctttgctctgtgcttcggtcctaccctgtccttccaactgctggatccacatatgaaattcaggcagctcgagtcccctaacttgcgccagctgctcagttggatcgacctggaatttaaccatccacagatcttcatcgtcgagaacggttggttcgtatctggaactactaagcgcgatgatgctaagtacatgtactacttgaagaagtttatcatggagaccctcaaagctattaagcttgacggagttgatgtcattggctatactgcttggtccctgatggatggtttcgagtggcataggggttacagtatacgccgtggtctgttttacgtcgacttcctctctcaggataagatgctgctccctaagtcatcagccctgttctaccagaagttgatcgaaaagaatggattccctccactgcctgaaaaccaaccactggagggtaccttcccctgtgacttcgcctggggcgtggtggacaattacatccaggtcagtcagcttaccaaacctatttcctctctgaccaaaccataccac

SEQ ID NO: 15123 - DNA, 1647 bp, synthetic construct; identical to SEQ ID NO: 15122
  misc_feature 1..1647: note = source = /note="Description of Artificial Sequence: Synthetic coding sequence"
  source 1..1647: mol_type = other DNA

SEQ ID NO: 15124 - DNA, 1647 bp, synthetic construct
  misc_feature 1..1647: note = source = /note="Description of Artificial Sequence: Synthetic coding sequence"
  source 1..1647: mol_type = other DNA
atgccagcaagtgcaccaccacgtagaccacgtccacctccaccaagtttatcacttcttttagttttattaggacttggtggacgtcgattaagagctgaaccaggagatggagctcaaacttgggcaaggttttctagacctcctgcacctgaagctgctggtctttttcaaggaacatttccagatggtttcctttgggcagttggatctgcagcttatcaaactgaaggaggatggcaacaacatggaaaaggagcttctatttgggatacttttactcatcatccattagcaccaccaggtgattctagaaatgcttcattacctttaggtgcaccatcaccattacaaccagcaactggagatgttgctagtgattcatataataatgtttttagagatactgaagcacttagagaacttggagtaactcattatagatttagtatttcttgggcacgtgttttaccaaatggtagtgccggagtaccaaatagagaagggttaagatattatagaagattacttgaaagattaagagaattaggagttcaacctgttgttactctttatcattgggatttaccacaacgtcttcaagatgcatatggaggatgggctaatagagctttagcagatcacttcagagattatgctgaattatgttttagacattttggtggtcaagttaagtattggataacaattgataatccatatgtcgtagcttggcatggttatgcaactggaagattagcacctggaattaggggttcaccaagattaggttatcttgtcgcacataatttgttattagcacatgctaaagtatggcatttatataatacttcatttagaccaacacaagggggacaagtttcaattgcattatcaagtcattggataaacccaaggagaatgactgaccattctattaaggaatgtcaaaaaagcttagactttgttttgggttggtttgctaaacctgtttttattgatggagattatccagaatctatgaaaaataatttaagtagtatattaccagatttcaccgaaagtgaaaaaaaattcataaaaggaacagctgatttttttgctttatgttttggtccaactttatctttccaattattagatccacatatgaagtttagacaacttgaaagtccaaatcttagacaattattatcctggatagacttagaatttaaccatccacaaatatttatcgttgaaaatggatggtttgtttcaggtactactaaaagagatgatgctaaatatatgtattatttaaaaaaatttattatggagactttaaaagcaattaaattagacggtgtagatgttattggatatactgcttggtcattaatggatggatttgaatggcatagaggatattcaataaggaggggattattttatgttgattttttaagtcaagataagatgttacttcctaaaagttctgccttattttatcaaaaacttattgaaaaaaacggatttcctccacttccagaaaatcaaccacttgaaggaacatttccatgtgactttgcatggggtgttgttgataattatatacaagtttctcaattaactaaaccaatcagttcattgacaaaaccatatcat

SEQ ID NO: 15125 - DNA, 1647 bp, synthetic construct; identical to SEQ ID NO: 15124
  misc_feature 1..1647: note = source = /note="Description of Artificial Sequence: Synthetic coding sequence"
  source 1..1647: mol_type = other DNA

SEQ ID NO: 15126 - DNA, 1647 bp, synthetic construct
  misc_feature 1..1647: note = source = /note="Description of Artificial Sequence: Synthetic coding sequence"
  source 1..1647: mol_type = other DNA
atgccagcatcagccccgcctcgacggccacgaccaccacctcctagcctctcccttctccttgtgctgctgggacttggagggcggcgactccgggcagaacctggtgacggtgcccagacctgggccaggttttccaggcccccagcccctgaagcagcagggcttttccagggtactttccctgacggctttctctgggcggtgggatccgctgcataccaaactgaaggcgggtggcaacagcatggaaagggagcctccatttgggacacgtttactcatcaccccttggcccctcccggagattcgcggaacgcgtcacttccactgggcgcaccttcgcccctccaacctgccaccggagatgtcgcctccgactcttataacaatgtgttcagagacaccgaggcacttagagagttgggggtgactcactaccggtttagcatctcgtgggcgagggtgctgcccaacggtagcgcaggagtgcccaacagagaaggtttgaggtactaccggcgcctcctcgagcgcctccgagagctgggcgtccaaccagtcgtgacgttgtatcattgggacctgcctcaacgccttcaagacgcatacggtggctgggcaaatcgtgcactggcagatcacttcagagattatgccgagctgtgtttccgccattttggggggcaagtcaagtactggattaccattgataacccatatgtcgtcgcatggcatggttacgcaactggcagacttgcacctggtattcggggtagcccaaggctgggatacctcgtggcacataacctgctgctcgcacatgcgaaagtttggcatctctacaatacctcgttcaggcctacccagggcggtcaggtgtcgattgccttgtcctcacattggattaaccctagaaggatgacggatcatagcattaaggaatgtcaaaagtcgctggactttgtgctcggatggtttgcaaaacctgttttcattgacggagactaccccgagtcgatgaagaataatctttcgagcatactgccagacttcactgaatccgagaagaagtttatcaagggcaccgcggatttctttgcactttgcttcggaccaacgctttcattccaactgctcgatccccatatgaaattccggcagctcgagtcgccaaacctgaggcaactcctgagctggatcgatctcgaattcaaccacccgcagattttcattgtggaaaatggttggttcgtgtcgggaaccacgaaaagagatgatgcgaaatacatgtactacctcaagaagttcattatggaaacccttaaggccattaagctcgatggtgtggatgtgattggttacactgcatggtccctgatggatggatttgaatggcatagagggtactcaattcgaagagggctgttttacgtggatttcctgtcgcaggataagatgctgctgcctaagtcctcggcactgttttaccaaaagctgattgagaagaacgggtttccgccgctgcccgaaaaccagcccctcgaaggtacctttccatgcgactttgcatggggagtggtcgacaattacattcaagtgtcgcagcttaccaagccaatctcatcgctcactaagccttatcac

SEQ ID NO: 15127 - DNA, 1647 bp, synthetic construct; identical to SEQ ID NO: 15126
  misc_feature 1..1647: note = source = /note="Description of Artificial Sequence: Synthetic coding sequence"
  source 1..1647: mol_type = other DNA

SEQ ID NO: 15128 - DNA, 1647 bp, synthetic construct
  misc_feature 1..1647: note = source = /note="Description of Artificial Sequence: Synthetic coding sequence"
  source 1..1647: mol_type = other DNA
atgccggcaagcgcccccccacggcgaccccggccgcctcctccaagcctgagcctgctgctcgttctattaggccttggcgggaggcggctcagagctgaacccggagacggcgcacagacatgggcccggttctcccgacctccagctccagaggcggctggtctgtttcagggaactttccccgatggtttcctctgggccgtgggcagtgcagcttaccagacagagggcggctggcagcaacacggcaagggtgcctccatctgggataccttcacgcatcatcctttggcaccgcccggggattcacggaatgcctccttacctctaggcgctccctctcccctgcagccagctactggagacgtggccagcgattcatacaacaatgtgttcagagatactgaagccttaagagagcttggggttactcactatcgcttttctatttcctgggctcgggtcctgccgaacggcagtgcaggggtccctaacagggaaggactgcggtattaccggcgactcctggaacggctcagagagttgggagtgcagccggtcgtaactctttaccactgggacttgccacagcgactgcaggatgcctatggtggctgggctaatcgggcactggctgatcacttccgcgattacgcagaactgtgcttccgccacttcggaggtcaggtaaaatattggataacaatcgataacccctacgtggtggcctggcatggctacgccacaggtcggttggcaccaggcatcagggggagtccccgattgggatatcttgtggcacataacctgctgctggcgcacgctaaagtctggcacctgtacaacacgagtttcagacctacacagggcggccaggtgtcaatagcccttagtagccattggatcaatcctcgcaggatgaccgaccatagtattaaagagtgtcagaaatcactggacttcgtgttgggctggttcgcgaagcccgtattcatcgacggcgattaccctgagagcatgaaaaacaatctgtcttccatcctgcctgattttaccgagtctgagaagaagttcattaagggcacagccgacttcttcgccctgtgtttcggccctacgttgtcctttcagttgctcgaccctcacatgaagttccgtcaattggagtcacccaacttacggcaactgctaagctggatcgacctggagttcaatcacccccagatcttcatcgttgagaacggctggtttgtatcaggtacgaccaagcgggacgatgcaaagtatatgtactatcttaaaaaattcattatggaaaccctcaaggccattaagcttgacggggtggacgtgataggatatacagcctggtctctgatggatggctttgaatggcacagagggtattctattagaagggggttgttctacgttgattttctcagccaggataagatgcttctgcccaagtcttctgcccttttctaccagaagttgatcgaaaagaatggcttcccacctctgccggagaaccagccactggagggtacgttcccttgcgatttcgcctggggagtagtggataactatatccaggtgagccaactaacaaaaccaattagctccctgacaaaaccttatcac

SEQ ID NO: 15129 - DNA, 1647 bp, synthetic construct; identical to SEQ ID NO: 15128
  misc_feature 1..1647: note = source = /note="Description of Artificial Sequence: Synthetic coding sequence"
  source 1..1647: mol_type = other DNA

SEQ ID NO: 15130 - DNA, 1647 bp, synthetic construct
  misc_feature 1..1647: note = source = /note="Description of Artificial Sequence: Synthetic coding sequence"
  source 1..1647: mol_type = other DNA
atgccggcatcagcaccgccccggaggccacgcccgccgccacctagtttgtctcttttgttggtgctccttggccttggcggcagacgcctgcgggccgaaccaggtgatggggcccagacttgggctcgcttcagccgcccaccagccccggaagccgccggactgttccaggggactttccctgacggtttcctgtgggcggtggggtccgcggcttaccagactgaaggggggtggcagcagcacggaaagggagcttcgatttgggacaccttcactcatcacccattggcccctcccggagacagccgaaatgcttcgctgccgctcggagctccatccccattgcaacctgctacgggcgacgtggcctccgacagctacaacaatgtgtttagagacaccgaggcgctgcgcgagctgggtgtgacccattaccgcttctcgatttcatgggctcgggtgctccctaacggatcagcgggagtgccaaaccgcgagggactcagatactacaggagattgctggagagactgagggaactgggagtgcagccagtggtgactctctaccactgggacctgccgcaacgcctgcaggatgcgtacggaggatgggctaatcgggcgctcgcagaccactttcgcgattacgctgaactgtgcttccggcacttcggcggtcaggtcaaatactggatcactatcgataacccgtacgtggtggcctggcacggatacgcaaccggccgcctggcgcctggaatccgcggaagcccgcgcctcggatacctcgtcgcgcacaacctgctcctcgctcacgcaaaagtctggcacctgtataacacttcattccgcccgacccagggcggacaggtgtcgatcgccctctcttcgcattggatcaaccctcgcagaatgaccgatcactcgatcaaggaatgccaaaagtcgctggactttgtcctgggctggttcgccaagccagtgttcattgatggagactacccggagtcgatgaagaacaacctgagctccatcctgccagatttcactgaatccgagaagaagttcatcaagggcaccgctgacttcttcgcgctgtgcttcgggcccactctctctttccaattgttggacccccacatgaagttccggcagttggagtcccctaacctccgccagctcctctcatggatcgacctcgagttcaatcacccacaaatcttcatcgtggaaaatgggtggttcgtctcgggaaccactaaacgcgacgatgccaagtatatgtactacctcaagaaattcattatggaaaccctgaaagcgatcaagctggacggtgtggatgtgatcggatacactgcctggagcctgatggatggatttgaatggcacagaggctactcgatccggcgcggactgttctatgtcgacttcttgtcccaagataagatgctgttgccgaagtcatcggctctgttttatcagaagctgattgagaaaaatggatttccaccgctgccggaaaatcagccactggagggcacgttcccgtgcgacttcgcgtggggcgtcgtcgataactacatccaagtctcacaactgaccaagccgatctcgtcgctgaccaagccataccat

SEQ ID NO: 15131 - DNA, 1647 bp, synthetic construct; identical to SEQ ID NO: 15130
  misc_feature 1..1647: note = source = /note="Description of Artificial Sequence: Synthetic coding sequence"
  source 1..1647: mol_type = other DNA

SEQ ID NO: 15132 - DNA, 1647 bp, synthetic construct
  misc_feature 1..1647: note = source = /note="Description of Artificial Sequence: Synthetic coding sequence"
  source 1..1647: mol_type = other DNA
atgcctgcctccgccccaccacgtcggccacgacctccacccccttccctttccttgctgctggtcttactgggattaggaggtagaaggttgagggccgagccaggcgacggtgcacaaacctgggcccgattttccagaccacctgcaccagaagccgcgggcctcttccagggaaccttcccagacggcttcctgtgggctgtggggtctgccgcatatcaaacagaggggggctggcagcagcacgggaaaggggcctccatatgggatactttcacccaccacccgttggcacctccaggtgatagtcgcaacgcctctctgcccttaggggcccccagcccattgcagcctgccacaggggacgtcgcctccgactcttacaacaacgtgtttagagacaccgaggctttaagagagttaggagtgacccattatcgcttttccattagctgggccagagtgcttccaaacggaagtgcgggtgtgccgaacagggagggactgagatattacagacgattgctggaaagactccgggaactcggagtccaacccgtagtcacgctttaccactgggatctgcctcagcggctccaggacgcctacgggggctgggcaaatcgtgcgctggccgaccacttcagagattacgctgagctgtgttttcggcactttgggggacaggtaaagtattggatcacgatcgataacccatatgtggtggcatggcatggctatgccaccggaagactcgcccccggtatacggggatcccctagattgggatacctcgttgcccacaatttgttgttggctcatgccaaggtgtggcacctttacaacacgagctttaggccaactcaaggaggacaggtgtccatcgcactgtcatcacattggattaatcccagacggatgacggatcactctatcaaggaatgtcagaagtctctggacttcgtgctaggttggttcgccaagcctgtgttcattgacggagactaccctgaatccatgaagaataacttgagcagcatccttcctgacttcacagagagcgaaaaaaaattcattaagggaactgccgactttttcgccttatgtttcggtccaacactgagctttcaactgctggacccccatatgaagttccgccagctggaatctcccaatctgcgacagctcctctcctggattgacctggagttcaatcatccacagatctttatcgtggaaaatggatggttcgtaagcggcacaacaaagagggatgatgccaagtacatgtactacctgaagaaattcataatggagaccttgaaggccataaaactggacggcgtggatgtcattggatacactgcttggagccttatggatggcttcgaatggcaccgcggctattccatcagaagaggtctattctacgtggactttctctctcaggacaagatgctcttacccaagtcttccgccctgttctatcagaaactgatcgagaagaatggctttccacccctgcccgagaaccagccacttgagggcacttttccctgcgatttcgcctggggagtggtggacaattatattcaggtgagccagctcaccaaacctatctcctcgcttactaaaccatatcac

SEQ ID NO: 15133 - DNA, 1647 bp, synthetic construct; identical to SEQ ID NO: 15132
  misc_feature 1..1647: note = source = /note="Description of Artificial Sequence: Synthetic coding sequence"
  source 1..1647: mol_type = other DNA

SEQ ID NO: 15134 - DNA, 1647 bp, synthetic construct
  misc_feature 1..1647: note = source = /note="Description of Artificial Sequence: Synthetic coding sequence"
  source 1..1647: mol_type = other DNA
atgccagcctccgcccctcctcgccgtccacgacctcctccgcctagtttgtccctgctgcttgtgctgctgggcctgggtggcaggcgtcttcgagcagaaccgggcgacggtgcacagacctgggctcgttttagccgcccacctgcacctgaggcagcggggctgtttcagggcacgttcccagacggcttcttgtgggcagtgggtagcgccgcctaccagactgaaggtggttggcagcaacacggtaaaggcgcgtcaatctgggacacttttacccatcacccgctggcaccgccaggtgacagccgcaacgccagtctgccgcttggtgccccttcgccactccaaccagctaccggtgacgttgcatctgatagctataataacgtatttagggataccgaggctctgcgtgaactgggtgttactcactaccgtttttctattagctgggctcgtgttctgccaaatgggagcgcgggcgtaccaaatcgcgagggcctccgctattacaggcgtctgctggaacgtttgcgcgaactgggcgtccagccggtggtgacactgtaccactgggacctgccacaacgcctccaggacgcgtatggtggttgggcaaaccgcgcactggcggaccacttccgggattacgcggaactgtgcttccggcattttgggggccaggtaaaatactggattacaattgataacccatatgtggtggcatggcacggctatgcaacgggccggctagcaccgggtattcggggctctcctcgcctgggttaccttgtcgcccacaatctcctgttggcacacgctaaagtctggcatctgtacaacaccagcttccgcccaactcagggcggtcaggttagcatcgccctcagctcccattggattaacccaaggaggatgacggatcacagcattaaagaatgccagaagtcgctggatttcgtgctgggctggttcgccaagcctgtgttcattgacggcgattaccctgagtccatgaaaaacaacttgagttccattttgcccgatttcaccgaaagcgagaagaaatttattaaaggcactgcagacttcttcgctctctgctttggccctaccctgagcttccagctcctggatccacacatgaagttccgacagttggagtccccaaatctgcgccagctcctgtcatggatcgacctggaattcaatcatcctcagatctttatcgtagagaatggatggttcgtttccggtaccaccaaacgcgacgacgctaagtatatgtactacctgaagaagtttatcatggaaacactaaaagcaataaagcttgatggtgttgatgtgattggctataccgcctggtctcttatggatggtttcgagtggcaccgtggttactcaatccgccggggactgttttacgtagatttcctgtctcaggacaagatgctgctgccaaaatccagcgcgctgttctaccagaagttgatcgagaaaaacggttttccgcctctgccggaaaaccagcctctggaggggaccttcccgtgtgatttcgcatggggtgttgttgataactatattcaagtgagccagctgacaaagccaatctcttctctgacgaagccttaccat

SEQ ID NO: 15135 - DNA, 1647 bp, synthetic construct; identical to SEQ ID NO: 15134
  misc_feature 1..1647: note = source = /note="Description of Artificial Sequence: Synthetic coding sequence"
  source 1..1647: mol_type = other DNA

SEQ ID NO: 15136 - DNA, 1647 bp, synthetic construct
  misc_feature 1..1647: note = source = /note="Description of Artificial Sequence: Synthetic coding sequence"
  source 1..1647: mol_type = other DNA
atgccagcgagcgccccgccgagacggcccagaccgcctccgcctagcctgtcgctcttgctggtcctgttgggcctcggcggacgccggctgcgagccgagccaggtgatggcgcgcagacctgggctagattctccagaccgcccgcgcccgaagctgcgggactgtttcaaggtactttccctgacggattcctgtgggccgttgggtccgcggcctaccagaccgaaggcgggtggcagcagcatgggaaaggagccagcatctgggataccttcactcatcatccgctggcgccacctggagattcccgaaacgcaagcctccccttgggagccccctcgcctctgcaaccggccaccggggatgtggcaagtgattcatacaacaacgtgttcagggatactgaggctctccgtgagttgggcgtgacccattaccggttctccatctcgtgggcgcgcgtcctgccgaacggctccgctggagtgccgaatcgggagggcctcaggtactaccggagactcctggagcgccttcgggaactgggagtgcagccggtggtgacgctctatcactgggaccttccacagaggctccaagatgcctacggaggatgggccaaccgcgcactcgcggaccactttagagactacgcggaactgtgctttaggcactttgggggacaggttaagtactggatcaccattgataacccgtacgtggtggcatggcacggatatgccactggacgcctggctccagggatcagggggagcccgagattgggatacctggttgcacataatctgctgctcgcccatgcgaaagtgtggcatctgtataacacttctttccggccgactcagggaggacaagtgtccatcgccctctcaagccactggatcaacccaagacgcatgactgatcactcgatcaaggaatgccagaagtcgcttgatttcgttcttggttggttcgcaaagcctgtattcatcgatggagattacccggagagcatgaagaacaacctgtcctccattctcccggactttacggaaagtgagaagaagttcattaaaggaactgcggactttttcgcattgtgcttcgggccgaccctgtcctttcagctcctggatccccacatgaagtttcggcaactcgagtcgccgaatctgaggcaactgctgtcctggatcgacctcgagtttaaccacccccagatctttattgtcgaaaacggatggtttgtgagcggaacgaccaagcgggacgatgctaaatacatgtactacctcaagaagttcatcatggagactctcaaagccatcaagctggacggagtggacgtgatcggatacactgcgtggtcattgatggacggattcgagtggcacaggggatactcgataagacgcggactgttctacgtggacttcctgtcgcaggataagatgctgttgcccaagtcgagcgcccttttctaccaaaagctgatcgagaaaaacggcttcccacctctgcctgaaaatcagcccttggaaggcacctttccgtgcgatttcgcctggggcgtggtcgacaattacatccaagtgtcgcaactgaccaagccgatcagctcgctgaccaagccataccac

SEQ ID NO: 15137 - DNA, 1647 bp, synthetic construct; identical to SEQ ID NO: 15136
  misc_feature 1..1647: note = source = /note="Description of Artificial Sequence: Synthetic coding sequence"
  source 1..1647: mol_type = other DNA

SEQ ID NO: 15138 - DNA, 1647 bp, synthetic construct
  misc_feature 1..1647: note = source = /note="Description of Artificial Sequence: Synthetic coding sequence"
  source 1..1647: mol_type = other DNA
atgccggcttcagcgccgccacgccgtccgcgtcctccgccgccctcgttgtcactgctcttggtcctgcttgggcttggagggcgccgcctgagagctgaacccggtgacggggcccagacctgggccagattttcaaggccgccagccccggaagccgctggattgttccaaggaaccttcccagacggattcctttgggccgttgggtcggctgcctaccaaaccgaaggcggatggcagcaacacggcaagggcgcatcgatttgggatactttcacccaccatcccctggcaccccctggcgactcccgcaatgcgtctctcccactcggagccccttcgcctctgcagccagctaccggagacgtggcctcggactcctataacaacgtgttcagggataccgaggccctccgcgagttgggcgtgactcactacagattttctataagctgggcgcgcgtgctgccgaatgggagcgccggtgtgcctaaccgggagggactgcggtactaccgacgcctgctggaacgcctgcgggaattgggagtccagccggtggtcacgctgtaccactgggatctgccacagcggctgcaggatgcatacggcggctgggcgaacagagcactggctgatcactttcgcgactacgcggagctttgcttccggcatttcggcggacaggtcaagtactggatcactatcgacaatccgtacgtggtggcctggcatggttacgcgactggtaggctcgcgccagggatacgcggcagtcctcggctgggatatctggttgcacacaatctcctcctggcacacgcgaaggtctggcatctctacaatacgtcatttaggccgacccaaggaggccaggtgtcgattgcgctgtcctctcattggatcaaccctcgacggatgactgatcattcaatcaaagaatgccagaagagcctggacttcgtcctgggatggttcgctaaacccgtgtttatcgacggtgactacccagaatcgatgaaaaacaatctgtcgtccatcttgccggacttcacggaatcagagaagaagtttatcaagggtaccgcagatttcttcgctctctgctttggaccgactctgtcattccagctgctggacccgcacatgaagttccggcagctcgaatctccgaatcttcggcaactcctcagttggatcgacctcgagttcaaccacccgcagatattcattgtggaaaacggatggtttgtgtccggaactactaagcgggatgacgccaaatacatgtactacctcaagaagttcatcatggaaaccctcaaagccattaagctggatggagtcgatgtgatcggatacaccgcctggtcgttgatggatggcttcgagtggcatcgcggatacagcatcaggagaggattgttctacgtcgacttcttgtctcaagacaagatgctgcttccgaagtcaagcgccctgttctaccaaaagttgatcgagaagaacggcttccccccactcccggagaaccagccactggaaggtacctttccatgtgacttcgcatggggagtggtagacaactacatccaagtgagccagctcactaaacctatctcctcgctcaccaaaccatatcac

SEQ ID NO: 15139 - DNA, 1647 bp, synthetic construct; identical to SEQ ID NO: 15138
  misc_feature 1..1647: note = source = /note="Description of Artificial Sequence: Synthetic coding sequence"
  source 1..1647: mol_type = other DNA

SEQ ID NO: 15140 - DNA, 1647 bp, synthetic construct
  misc_feature 1..1647: note = source = /note="Description of Artificial Sequence: Synthetic coding sequence"
  source 1..1647: mol_type = other DNA
atgcctgcatcggcccctcctcgccggccaagacctccaccaccctcacttagccttcttctggtcctgcttggacttggaggtagacggcttagagcagaaccgggtgacggcgcgcaaacctgggctcgcttttcccgtcctcctgcacctgaagcagccgggcttttccagggtacgtttccagacggtttcctgtgggcagtgggtagcgcagcctaccaaactgagggcggttggcaacagcatgggaagggcgcatccatttgggatactttcacgcaccaccctctggcaccgcctggtgattcaagaaacgcatcgctccctctgggcgcaccttcgccactccagccagccacgggggatgtggcaagcgattcctataacaacgtgttccgtgacactgaagcactgagggaactgggggtcacccattacagattcagcatctcgtgggctagggtccttcccaatggctcggcgggggtgccgaatagagagggtctgaggtactatagaagattgctggagagactgcgggagctgggagtgcagcccgttgtcactctgtaccattgggacctccctcaacgactgcaggatgcgtacgggggctgggcgaatagggcgctggcagaccattttagagactacgcggagctttgttttcggcacttcggaggtcaggtgaagtattggataactatcgacaacccttacgttgtcgcatggcacggatacgcaaccgggcgacttgctcctgggatccgcggttcgcctagattgggttacctggtggcgcataatctgcttcttgcgcatgccaaggtgtggcatttgtacaatacctcatttcgacctacccagggtggccaagtctctattgcactgtccagccattggatcaatccaaggagaatgacggatcactcaattaaggagtgtcagaaatccctcgatttcgtgctcggttggttcgccaagcctgtctttatcgacggagattacccggagagcatgaagaacaacctctcctcgattctgccagattttaccgagtcggaaaagaagttcattaagggaaccgcggatttctttgctctctgtttcgggcctaccctctcctttcagctgctggatcctcatatgaaatttcggcagctggaatcgcctaacctgcgccaactgctctcctggattgatctggaattcaaccatccccagatctttattgtggagaatggttggtttgtctcaggcaccaccaagagagacgacgccaagtatatgtattacctgaaaaagtttatcatggaaacccttaaggccatcaaactcgatggagtggacgtgattggatacacggcgtggtcgctgatggacggattcgaatggcaccggggctacagtattaggagaggtctgttttacgtggatttcttgtcacaagataagatgctgcttccaaagtcctccgcacttttctaccaaaagctcattgagaaaaacgggtttccgccactgcctgagaaccaaccactcgaaggaacgttcccctgtgactttgcatggggagttgtggataactacattcaagtgagccagctgaccaaacctatttcgtcgctcaccaaaccataccat

SEQ ID NO: 15141 - DNA, 1647 bp, synthetic construct; identical to SEQ ID NO: 15140
  misc_feature 1..1647: note = source = /note="Description of Artificial Sequence: Synthetic coding sequence"
  source 1..1647: mol_type = other DNA

SEQ ID NO: 15142 - DNA, 1647 bp, synthetic construct
  misc_feature 1..1647: note = source = /note="Description of Artificial Sequence: Synthetic coding sequence"
  source 1..1647: mol_type = other DNA
atgcccgcttctgcgcctccccggcgtcctcgccctcctcctccgtcactgagtttactgctggtattactgggcctgggaggtaggcggctgcgagccgagccaggagatggcgctcagacttgggccagattctctcgcccacccgccccagaagctgcaggactgtttcagggtaccttcccagacggctttttgtgggccgtagggagcgccgcgtaccagaccgaaggaggatggcagcagcatggaaagggcgcgtccatttgggacaccttcacacaccatcccttggctcctccaggggatagtaggaatgccagtctgcccttgggtgcccccagccctctgcaacccgcgaccggagatgtggcgtcagactcatataacaacgtcttcagagataccgaagcgctgcgggagctcggggtcactcattaccggtttagcattagttgggcgcgggtgttacctaatggcagtgccggcgtgccaaatcgggaggggctgaggtactaccgacgactgctagaaagacttcgggagttaggcgtgcagcccgtggtcaccctatatcattgggacctgccacagcggcttcaggatgcctacggcgggtgggccaatagagctctggcagatcatttccgggactacgccgaactgtgtttcagacattttggaggtcaagtgaaatactggatcaccattgataatccctatgttgtggcctggcatgggtacgccactggaagattggcccccggcatcagaggctctccaagattaggatatttggttgcccacaacttactgctggcccacgccaaggtgtggcacctgtataatacctctttccgacccacccagggaggccaagtttcaattgccctgtctagtcattggataaacccaaggaggatgacagatcattcaatcaaggagtgtcaaaaatcgctggattttgtgctagggtggttcgcaaagcccgtgtttatagacggcgattaccctgaatcaatgaaaaataatctgtctagcattttgccagatttcaccgaatcggaaaaaaagttcattaagggcacggcagactttttcgcgctgtgctttgggccgacattgagcttccagctcctcgatccacatatgaaatttcgccagttggagagtcccaatctgcggcagctgctctcctggatagacctggaattcaaccaccctcagatctttatagtggagaatggttggttcgtgtcagggaccacgaaaagggatgacgctaagtacatgtattacctgaagaagtttatcatggagacactgaaggccataaagctggatggggtagacgtgattggatacaccgcctggtcactaatggacggtttcgagtggcatcgcggatatagcataaggagggggctgttctacgtggattttctgagccaggacaagatgctgttacctaagtcatctgccctgttctatcagaagctgatagagaagaacgggtttcccccccttccggaaaaccagcctctggagggtaccttcccctgtgatttcgcctggggtgtggtagacaattacatccaagtgagccagctcactaaacctattagctcccttacaaagccataccat

SEQ ID NO: 15143 - DNA, 1647 bp, synthetic construct; identical to SEQ ID NO: 15142
  misc_feature 1..1647: note = source = /note="Description of Artificial Sequence: Synthetic coding sequence"
  source 1..1647: mol_type = other DNA

SEQ ID NO: 15144 - DNA, 1647 bp, synthetic construct
  misc_feature 1..1647: note = source = /note="Description of Artificial Sequence: Synthetic coding sequence"
  source 1..1647: mol_type = other DNA
atgccagcgtcagcaccacctagacggcccaggcccccccccccgtccctctcactgcttttggttctgttaggcctgggcggccgtcgtttgcgagccgagccaggcgacggcgctcagacttgggcacgtttttcacgaccgccagctccggaggcggccgggctgttccagggcacgtttcctgacggtttcctgtgggcggtcgggagcgccgcataccaaacagagggcggttggcagcagcatggaaagggtgccagcatatgggatactttcacccatcaccctttggctccgcccggagactctcggaatgcttccctgcctctaggcgcaccctcaccactccaacccgctacgggtgatgtggcctccgactcttataataacgtgttccgtgatactgaggcccttagagaattgggcgtgacacattaccggttttctatctcttgggcaagggtgctcccaaatggatcggccggcgtgccaaatcgggagggcttacgctattatagacgactcctcgaaaggttgagggaactaggggttcagccagtcgtaaccctgtatcactgggatctgccacagcggcttcaggacgcatatggaggttgggctaatagagcgcttgcagaccattttagagattacgcagaactttgcttccgtcactttggcggtcaagttaagtattggatcaccattgacaacccttacgtggtcgcctggcatggttatgctacaggccggctcgcaccgggaatccgggggtcccctcggctgggttatttagtagcccacaacctgctcctagctcacgccaaggtgtggcatctatacaacacctccttcagacccacccaaggagggcaggttagcattgccctctccagtcactggatcaacccccggcgcatgacggatcactctatcaaggagtgccagaaaagcttggacttcgtgttgggctggttcgcgaagcctgtttttattgatggagactacccagaatccatgaaaaataacctcagcagtatactccccgactttactgagagcgagaagaaatttatcaagggtaccgccgattttttcgccctgtgttttggccctaccctcagcttccaactgcttgatccccatatgaagttcagacaactcgagtcaccgaacctgaggcagttgctttcctggatcgacctggagtttaatcacccccagatctttattgtggagaacgggtggttcgtgtccgggaccacaaaacgcgatgatgctaagtacatgtattacctcaagaaattcattatggaaacgctgaaagccatcaagctggatggggttgacgtcattggctatactgcatggtcattgatggacggatttgagtggcacaggggatactcgatccgccgcggcctcttctatgtcgattttctgtcccaggacaaaatgctgctgccaaaatcttccgcactgttctaccagaagttgatcgaaaagaatggcttcccccccttgcctgaaaatcaaccattggagggaacgtttccttgtgatttcgcttggggcgtggttgataattacattcaggtgagccagctaaccaagcctattagctcgctaaccaagccctaccat

SEQ ID NO: 15145 - DNA, 1647 bp, synthetic construct; identical to SEQ ID NO: 15144
  misc_feature 1..1647: note = source = /note="Description of Artificial Sequence: Synthetic coding sequence"
  source 1..1647: mol_type = other DNA

SEQ ID NO: 15146 - DNA, 1647 bp, synthetic construct
  misc_feature 1..1647: note = source = /note="Description of Artificial Sequence: Synthetic coding sequence"
  source 1..1647: mol_type = other DNA
atgcccgcctcggcccctcctcggcgaccgcgtcccccacctccctctctgtctctgctgctggtgctgcttggactcgggggacgtagattgagagccgaaccaggagatggagcccaaacgtgggcacgcttttcgcggcctccggcgcctgaagcagctggactcttccaaggcacgtttcctgatggctttctttgggcagtgggctcagccgcgtaccaaaccgaaggaggctggcaacaacatgggaagggtgcctcgatttgggatacttttactcaccatccactggcgcccccaggcgatagccgcaacgcttcattgcctctgggtgcaccatcacctctgcaaccggcaaccggtgacgtcgcaagcgattcgtacaacaatgtgttcagggatactgaagcactgcgggaacttggggtgactcattacaggttctcaatctcatgggcaagggtgctgccaaacggttcagccggtgtgcccaacagagagggacttcgctactaccggcggcttctcgagagacttcgtgaacttggtgtgcagccagtggtcaccctgtaccattgggatctgccccagcgcctgcaggacgcttacggtggttgggcaaatcgggcgcttgcagatcattttcgtgattacgcagagctctgttttaggcatttcggaggacaagtcaagtactggataaccattgataatccgtacgtcgtcgcatggcatgggtacgcaaccggccgcttggcacctggaattagaggaagccctagacttggatacctcgtggcacataatctcctgctggcccatgcaaaagtttggcacctttacaacacttcattccggcctacccaaggaggtcaggtgtccatagcacttagctcccactggatcaacccaagacggatgactgatcactccataaaggagtgtcaaaaatccctcgattttgtgctcggatggttcgcaaaaccagtgtttatcgacggagattaccctgagagcatgaaaaacaacctgagctcgatcttgcccgattttaccgaatcagagaaaaagtttatcaagggtaccgcagacttttttgccctctgttttggaccaaccttgtcttttcaacttctcgatccacacatgaagttccgacaactggaatcgcctaacctccgccagcttctttcgtggatagatcttgagttcaaccatcctcaaatctttattgtcgaaaacggctggtttgtatcgggtaccaccaaaagagatgacgccaagtatatgtactacctcaaaaagttcatcatggaaacccttaaagcaatcaagctggatggtgtcgacgtgatcggatatactgcctggtcgctgatggacggctttgagtggcaccgcggatactccattcggagaggactgttctacgtggatttcctttcccaggacaagatgcttctgcctaagtcgagcgcacttttctatcagaagctcatcgaaaagaacgggttccctccacttcccgaaaaccaacccctggaaggtacctttccctgtgattttgcttggggtgttgtggataactacattcaggtgagccagctcactaagcccatttcgtcccttaccaaaccttatcat

SEQ ID NO: 15147 - DNA, 1647 bp, synthetic construct; identical to SEQ ID NO: 15146
  misc_feature 1..1647: note = source = /note="Description of Artificial Sequence: Synthetic coding sequence"
  source 1..1647: mol_type = other DNA

SEQ ID NO: 15148 - DNA, 1647 bp, synthetic construct
  misc_feature 1..1647: note = source = /note="Description of Artificial Sequence: Synthetic coding sequence"
  source 1..1647: mol_type = other DNA
atgccggctagcgccccacctcgtagacccagaccacctcctccttctctttcgttgcttctcgtgttgctgggacttggaggtagacgcctccgagccgaacctggcgacggggcacaaacctgggcaaggttttccagaccacccgctccagaagccgcaggactgtttcaaggcacctttccggacggattcctctgggcggtgggttcagcagcctaccaaacggaaggtggctggcaacagcatgggaagggtgcatccatttgggataccttcactcatcatcccctggcaccgccaggggattcgcgcaacgcctcactgcctctcggagcaccatccccgttgcagcctgctactggagacgtggcctcagatagctacaataatgtgttcagggacaccgaggcgctcagggagttgggggtgactcattacagattttccatttcgtgggcacgggtgcttcccaacggctcggccggggtcccaaaccgagaaggcctcagatactaccgcagacttcttgagcggttgagggagctcggagtgcaacccgtggtgaccctttaccactgggaccttccacagagactccaggatgcatacggggggtgggctaaccgggctcttgcagatcattttcgagattatgcagaattgtgttttagacattttggaggtcaagtgaagtactggattactattgataatccttacgtggttgcttggcacggttacgccactgggcgtctggcaccagggattcgtggatcgccccggctgggttatttggttgcacacaaccttctgctggcacacgcaaaggtgtggcatctctacaataccagctttagacctactcagggaggacaggtgtcgatagcgttgtcatcccactggattaaccctaggaggatgaccgatcattccattaaagaatgccaaaagagcctggatttcgtcctcggctggttcgcgaagcctgtctttatcgacggtgactatcccgaatccatgaagaataatctttcgtcgattcttcctgactttactgaatcagaaaagaagtttatcaagggaaccgcagatttcttcgccctttgctttggtccaacgctctccttccagctgcttgatccgcatatgaaattccgccaactggagtcgccaaacctgagacaattgctttcttggattgatcttgagtttaaccacccccaaatcttcatcgtggaaaatggatggtttgtgagcggaaccacgaaaagagacgatgcgaagtacatgtattacttgaaaaagttcatcatggagactctgaaggcaatcaagctcgatggagtcgatgtgatcggatacactgcctggtcgcttatggacggctttgaatggcatcgggggtactcgattcgtagagggcttttctatgtcgactttctgtcacaagacaagatgctgctgcctaagtcgagcgcactgttctaccagaaacttatcgagaaaaacgggtttccacccctgccagagaaccaaccgcttgaaggtacctttccttgtgattttgcatggggagtggtcgataactacatacaagtctcgcagctgaccaaacccattagctctcttaccaagccataccat

SEQ ID NO: 15149 - DNA, 1647 bp, synthetic construct; identical to SEQ ID NO: 15148
  misc_feature 1..1647: note = source = /note="Description of Artificial Sequence: Synthetic coding sequence"
  source 1..1647: mol_type = other DNA

SEQ ID NO: 15150 - DNA, 1647 bp, synthetic construct
  misc_feature 1..1647: note = source = /note="Description of Artificial Sequence: Synthetic coding sequence"
  source 1..1647: mol_type = other DNA
atgccagcgagtgcccctccccggagacctagaccgcccccccctagcctgagcctgttgctggtgctgctgggcctgggtggccgacgcttgagggcagaaccaggggatggcgcccagacttgggctaggtttagtcggccccctgctcccgaggcagccgggctgtttcaggggacatttccagacggattcctctgggcagtgggatctgctgcctatcagacagaagggggctggcaacaacacgggaagggagctagtatctgggatactttcactcatcaccctctggcaccacccggcgacagcaggaatgcatcactgcctttgggagcaccctcaccacttcagcctgccaccggtgatgtggcatccgatagctacaacaatgtgttccgcgatacagaggccctgcgcgagctcggcgtgactcactaccgatttagcatctcatgggctcgggtgctgcctaacggatctgcgggggtgcccaatagggagggactgcggtactaccgacgactgttggaaaggttgcgagagctcggcgtccagccagtcgtgaccctgtatcactgggacctcccacagagactccaggacgcttacggcggatgggcaaatcgggctctggcagatcacttccgcgactatgccgagctgtgttttcgccacttcgggggccaggtgaagtactggattaccattgacaacccctatgtggtggcctggcatggctacgccaccggcagacttgcccctggcatccgaggctcacctagattgggctacctggtagcccataaccttcttctggctcacgccaaagtgtggcatctttacaacacaagtttccgccccactcaaggcggccaggttagcattgccttgagttcacactggataaaccctaggagaatgaccgaccattctatcaaagagtgccaaaaaagtcttgacttcgtactgggatggttcgccaagcctgtgttcatcgatggcgattatcccgagtcaatgaagaataatctctcttccattctgccagactttacagaatccgaaaagaaattcatcaaaggcactgctgacttcttcgcactgtgttttggccccacactgtccttccagctcctggatcctcacatgaaattccggcaattggagtcacccaacctgcgacaactgctgtcttggattgatctcgaattcaaccatccccagatcttcatagtggagaatggttggttcgtatctgggactaccaagcgcgacgatgccaaatacatgtactatctgaagaagtttattatggaaactcttaaagcgattaagctggacggagtggacgttatagggtacaccgcatggagcctgatggatggttttgaatggcatcggggatacagcatacgccggggactgttctacgtagatttcctgtctcaagacaagatgcttctgcctaagagctcagctctgttttatcagaagttgatcgaaaaaaacggcttcccacctttgccagagaaccagcccctggaggggacattcccttgcgactttgcatggggtgtggtggacaattacatccaggtcagccagctgactaagccaatctccagcctgactaagccctaccac

SEQ ID NO: 15151 - DNA, 1647 bp, synthetic construct; identical to SEQ ID NO: 15150
  misc_feature 1..1647: note = source = /note="Description of Artificial Sequence: Synthetic coding sequence"
  source 1..1647: mol_type = other DNA

SEQ ID NO: 15152 - DNA, 1647 bp, synthetic construct
  misc_feature 1..1647: note = source = /note="Description of Artificial Sequence: Synthetic coding sequence"
  source 1..1647: mol_type = other DNA
atgcccgcttcagctccgcctcgacgcccacggcctccccctccatctctgtcgctcctcctcgtacttcttggactcgggggaaggcgcctgagggctgagcctggggatggcgctcagacttgggcccgttttagcagaccacctgcaccggaggcagctggactgttccagggaacatttcctgatgggtttctgtgggccgtggggtcagctgcctaccagacagaggggggctggcaacagcatggaaagggagcctcgatatgggatacttttacccaccatcccctggcaccccctggcgacagtcgcaatgctagcctcccacttggagctccgagtccattgcagccggccaccggagacgtcgcgtcagactcatacaacaacgtgtttcgagatacagaagcccttagggagctcggggtcacccactaccgcttctccataagctgggctagggtcctgcctaatggtagcgctggggtgcccaatagagaaggcctccgctactatcggcggctgctcgagcgtctacgtgaactgggggtccagccagtggtgaccctctaccactgggacctcccgcagcggctgcaggacgcttacggcggctgggcgaacagggctctggcagatcattttagggactatgcggagctgtgttttaggcattttggcggacaggtcaaatattggattaccatagataacccctatgtggtcgcatggcacggttatgccacagggaggttagcaccaggcattagagggtcaccaaggctcggttacctggttgctcataacttgctattagcccacgccaaggtgtggcacctctataacacttccttcaggcccactcagggaggccaggtcagtatagccctcagctcccactggattaatccacgccgcatgacagatcattccataaaagaatgccagaagtcactggactttgtgctcggctggttcgccaagcccgtattcattgacggagactatcctgaaagtatgaagaataacctgtcctctatactgccggactttactgaatccgagaagaagtttattaaaggtacagccgattttttcgctttgtgctttggcccaacactgtccttccagttgcttgacccacacatgaagttccggcagctggagagccccaacctcagacagctgttgtcctggattgacctggagtttaatcaccctcagatcttcatcgtggagaacgggtggtttgtctctgggactaccaaacgtgatgacgctaaatatatgtactacctcaagaagtttatcatggagacgctgaaagccattaaactcgacggagtggacgtgattggctataccgcttggtctctcatggacggcttcgaatggcatcggggatacagtattaggcgtggattgttctacgtggattttctgagccaggataagatgttgctgcctaagtccagcgccttgttctaccaaaagctcattgaaaaaaacggatttcccccacttcccgagaatcagcctctggaaggaacttttccatgcgatttcgcgtggggcgtagtcgacaattacattcaggtgtctcaactcaccaagccgattagctctcttactaagccataccac

SEQ ID NO: 15153 - DNA, 1647 bp, synthetic construct; identical to SEQ ID NO: 15152
  misc_feature 1..1647: note = source = /note="Description of Artificial Sequence: Synthetic coding sequence"
  source 1..1647: mol_type = other DNA

SEQ ID NO: 15154 - DNA, 1647 bp, synthetic construct
  misc_feature 1..1647: note = source = /note="Description of Artificial Sequence: Synthetic coding sequence"
  source 1..1647: mol_type = other DNA
atgcccgcgagcgctccgccccggcgccctcggccgcctccacccagcctctcgctgctcctcgtccttctgggccttggaggccgacggctcagagccgaacccggcgacggagctcagacttgggcgcggttctcgcgtccacccgctccggaggccgccggacttttccagggaaccttccctgatgggtttctctgggcagtgggaagcgcagcttaccagactgaaggaggatggcagcaacacggtaagggcgcctccatatgggacaccttcactcatcaccccctcgccccacccggagactcccgcaatgcatcattgccgctgggggcaccatcgccgctccagccggccactggggacgtcgcctcggattcctacaacaatgtgttccgcgacactgaggctctccgcgaactgggcgtgacccactatcgcttcagcatcagctgggcccgggtgctgccaaacggaagcgctggcgtgccgaaccgtgaaggtctgcgctattaccgccgcttgctggagcggctccgagaactgggtgtccaaccggtcgtgacgctctaccattgggatctgccacagcggctgcaggatgcgtacggtggatgggccaaccgggcgctggccgaccacttccgggattacgcagaactctgcttccgccactttggaggccaggtgaagtactggattaccattgacaatccgtacgtcgttgcgtggcatggctacgccaccggccgcctggccccgggcatccggggaagcccgcgcctgggctaccttgtggcgcataatctgctgcttgcccatgctaaggtgtggcatctctacaatacttccttccggccgacgcagggcgggcaagtctcaatcgcgctctcatcccactggattaacccgaggcggatgacggaccatagcattaaggagtgccagaagtctctcgacttcgtgcttggatggttcgcaaagcctgtgttcattgacggagactaccctgaatcgatgaagaataatctgtcgtcgatcctcccagattttactgaatccgagaagaaattcatcaagggcaccgccgacttcttcgccttgtgcttcggcccaaccctgtcgtttcaattgctggatccgcatatgaaattccgccagctggagagcccgaatctccgccagcttttgtcctggattgatctggagttcaaccatccgcaaatcttcatcgtcgaaaatggatggttcgtaagcggaactactaaacgggatgacgcaaaatacatgtactatctgaagaagtttatcatggagacgctgaaagcaatcaagctcgacggagttgacgtcatcggatataccgcgtggtcactgatggacggcttcgaatggcaccgcggctactccatcagaagggggctcttttatgtcgactttctgtcacaggataagatgcttcttccaaagtcctcggccttgttctaccagaagctgattgaaaagaacgggtttcctccactgccggagaatcagccgcttgagggcaccttcccgtgcgacttcgcgtggggggtggtggataactacattcaggtgagccaattgactaagcctatctcgtctctcacgaaaccataccac

SEQ ID NO: 15155 - DNA, 1647 bp, synthetic construct; identical to SEQ ID NO: 15154
  misc_feature 1..1647: note = source = /note="Description of Artificial Sequence: Synthetic coding sequence"
  source 1..1647: mol_type = other DNA

SEQ ID NO: 15156 - DNA, 1647 bp, synthetic construct
  misc_feature 1..1647: note = source = /note="Description of Artificial Sequence: Synthetic coding sequence"
  source 1..1647: mol_type = other DNA
atgcccgcatccgcaccaccgaggagaccaaggccgccgcccccttctcttagcctcctcctggtcctgctgggtctcggcggccgcaggctgcgggccgaacccggcgacggtgcccagacatgggcccgattttctcgcccacccgccccagaagccgcagggctcttccaggggactttccctgacggcttcctttgggctgtgggttccgccgcgtatcagacggagggaggctggcagcagcatggaaaaggtgcctctatctgggataccttcacacaccaccccttggcccctcctggggattctagaaacgcctcccttccattgggtgcaccctctcccctccagccagcaaccggcgacgtcgcctccgatagttacaataatgtctttcgcgatacagaggctttgagagagttaggggtgacccattaccgattttccatctcctgggcaagggtgctgcctaatggatcagcgggggtacccaatcgcgagggcctcagatactacaggagacttcttgaaaggctgagggagcttggcgtgcagcccgtggttactttataccactgggaccttccccagcgcctccaagacgcgtatggcggctgggccaatagagccttggctgaccacttccgtgattacgcagaactgtgctttcggcactttggcggccaggtgaagtattggattaccatagataatccatacgtggtggcatggcacggatacgcaaccgggaggctcgcacctgggatccgcggcagccccaggctcggctacttggtagcccacaatcttctcctggcccatgcaaaagtttggcatttgtataacaccagcttcagacccacacagggtgggcaggtctcaattgcattatcctctcattggattaatcctagaagaatgacagaccactcgataaaggagtgccagaaatcactggacttcgttctcggctggttcgctaagcccgtatttatagatggtgactaccctgaatctatgaaaaataacttgtcgagcatcctgccagactttactgaatccgaaaagaagtttatcaaaggcaccgctgatttttttgctctgtgcttcggccccacgctcagtttccagttactggatcctcacatgaagtttaggcagctggagtctcccaatctccggcaactgctttcctggatcgacctggaattcaaccatccacaaattttcatcgtagagaatggatggttcgtctctggcactaccaaacgggatgatgcaaagtacatgtattatctcaagaagttcattatggagacacttaaagccatcaagctcgatggcgttgatgtcataggctatacagcctggtcactgatggatggctttgaatggcatcgtgggtatagcataaggcgcggacttttttacgtggattttctgtcacaggacaagatgctgttacctaaaagcagtgcactgttttaccagaagctgatcgagaagaacggtttccctcccttgccagagaaccagcctctagagggaacattcccctgtgatttcgcttggggagtagtggataactatatccaggttagtcagctaaccaaacctataagttccctgacaaagccctaccac

SEQ ID NO: 15157 - DNA, 1647 bp, synthetic construct; identical to SEQ ID NO: 15156
  misc_feature 1..1647: note = source = /note="Description of Artificial Sequence: Synthetic coding sequence"
  source 1..1647: mol_type = other DNA

SEQ ID NO: 15158 - DNA, 1647 bp, synthetic construct
  misc_feature 1..1647: note = source = /note="Description of Artificial Sequence: Synthetic coding sequence"
  source 1..1647: mol_type = other DNA
atgcccgccagcgctccgccgagacggccaagacctccgcctcctagcctctccctgcttctggtcctcctcggccttggcggccgtcggcttcgggctgaaccaggagatggtgcgcagacttgggcgcggttttccagaccaccggccccggaagctgctgggctgttccaaggaaccttccccgacggattcctctgggccgtgggctcagcggcctaccagactgagggtggctggcaacagcacggaaaaggcgcctcaatctgggacacttttacgcatcatccgctcgcaccgccgggcgattcgcggaacgcctcactgccgctgggggctcccagcccgctgcaacctgcgaccggcgatgttgcctcggattcatacaataatgtctttagggacaccgaggcattgagggagttgggagtgacccattatcgcttcagcatttcctgggcgagagtcctgcctaacgggtcggcaggagtcccgaatcgggagggcttgcgctattaccgccggttgctcgagcgattgcgcgaacttggagtgcagccagtcgtgacgctgtaccattgggacctgccgcagcggctgcaggatgcatacggaggttgggcaaaccgcgccctcgcggaccacttccgcgactatgccgaactgtgctttagacacttcggaggtcaagtgaagtactggatcaccatcgacaacccttacgttgtggcctggcacggatacgcaacgggacgtttggccccaggtattaggggaagccccaggctggggtacctggtggctcacaacctgctgttggctcatgccaaggtttggcacctgtacaatacttctttcagaccaacgcagggaggacaagtgagcatcgcactgtcctcgcattggattaacccgcgccggatgactgaccactccatcaaggagtgtcagaaatccctcgatttcgtgctcgggtggttcgcaaaacctgtgtttatcgacggggactaccctgaatcgatgaagaataacctgtcatcaatcctgcctgatttcaccgaatctgagaaaaagttcatcaagggtactgccgacttttttgccctttgcttcggaccgaccctttcgtttcagttgctcgacccgcatatgaaattccgccaactcgaaagccccaacctccggcagcttctgtcgtggatcgacctggagtttaaccacccccaaatcttcatcgtcgaaaatggttggttcgtgtcgggaaccactaagcgcgatgacgctaagtacatgtattatctgaagaagttcatcatggagactttgaaggcaatcaagctggacggcgtcgacgtgatcggatacaccgcgtggtcactgatggatggattcgaatggcaccgagggtactccatccgtagagggctcttctacgtggatttcttgtcgcaagataagatgctgctgcctaagtcctctgccctcttctaccagaagctgatcgagaaaaacggattccccccacttccggaaaatcagccgcttgaaggcactttcccatgtgacttcgcgtggggagtggtggacaactacatacaggtgtcccagctgaccaagcccatatcgtccctcaccaaaccataccac

SEQ ID NO: 15159 - DNA, 1647 bp, synthetic construct; identical to SEQ ID NO: 15158
  misc_feature 1..1647: note = source = /note="Description of Artificial Sequence: Synthetic coding sequence"
  source 1..1647: mol_type = other DNA

SEQ ID NO: 15160 - DNA, 1647 bp, synthetic construct
  misc_feature 1..1647: note = source = /note="Description of Artificial Sequence: Synthetic coding sequence"
  source 1..1647: mol_type = other DNA
atgcctgcttctgctccccctcgacgtccaagacccccaccgccgtcattgtccttgttactcgtgctactggggttgggcgggaggcgcctgcgggctgagccaggcgacggagcccagacctgggccagatttagcaggccccccgccccagaagccgccggcctgttccagggaacctttcccgacgggttcctctgggccgttggcagcgccgcctaccagactgaaggaggatggcagcagcatggcaagggtgccagcatatgggacacatttactcatcacccactggcgcctcccggcgatagtcggaacgcctcccttcccctgggagcccctagccccctgcagcccgccacaggggatgttgcctccgactcttacaacaacgtgttccgagacacagaagccttgcgcgagctgggggtgacgcactatcgcttctcgatctcctgggctcgagtgctacccaatgggtcagctggcgtccccaaccgggagggactgcgctattatcggagattgctggagcgcctgagggaactgggagttcagccggtggtgacactatatcactgggaccttccccagcggctccaggacgcctacggggggtgggctaaccgggcacttgctgaccattttcgggattatgcagagctttgctttcgccactttggtggccaggtgaaatactggatcacaatcgataatccgtacgtcgttgcgtggcatggctacgctaccggtcgcttggcacccggtattcggggttcccctaggctgggctacttagtggctcacaacctgctgctcgcccacgcaaaagtgtggcatctgtacaacacgtcctttcgaccgacacagggcggccaggtatcaatcgctcttagcagccactggattaatcctaggcggatgactgaccatagcattaaagaatgccagaagtctcttgattttgtgctggggtggttcgccaaaccagtttttatcgatggggactatcctgaatccatgaagaataatctgagcagtattctcccagacttcacagaatccgaaaaaaagtttatcaaaggcaccgccgacttcttcgctctgtgtttcggccccaccctgtctttccaactcctcgaccctcacatgaaatttcggcagctggaaagtccaaatctccgccagctcctctcctggatcgacctggagtttaatcatcctcagatctttatcgtggaaaacggatggtttgtgagtggaacaaccaaaagggacgacgccaagtacatgtactatctgaagaagtttatcatggagacactcaaagcaataaagcttgatggagttgatgtgataggctatacagcgtggtcccttatggatggctttgagtggcaccgagggtactccatccggaggggacttttctatgtggatttcctctcgcaggataagatgttgctgccaaagagtagtgcactcttctaccagaagctgatcgagaagaacggctttccgcctctgccagagaaccaacccctagaggggacgtttccctgcgattttgcatggggagtcgtcgataactatatccaggtttcacagttaacaaagccaatctcatccctaactaaaccataccat

SEQ ID NO: 15161 - DNA, 1647 bp, synthetic construct; identical to SEQ ID NO: 15160
  misc_feature 1..1647: note = source = /note="Description of Artificial Sequence: Synthetic coding sequence"
  source 1..1647: mol_type = other DNA

SEQ ID NO: 15162 - DNA, 1647 bp, synthetic construct
  misc_feature 1..1647: note = source = /note="Description of Artificial Sequence: Synthetic coding sequence"
  source 1..1647: mol_type = other DNA
atgccagcgagcgctcctccccgccggccacggccaccccctccttctttgagcttgctcctggtccttctgggacttggagggcgccgcttgcgcgccgaacccggtgatggagctcagacctgggcaaggttctctagaccacccgccccagaagccgctggactgttccagggaacatttccggacggctttctatgggcagtcggctccgcagcctatcagacagagggggggtggcaacagcacggtaagggcgccagtatttgggatacgtttacgcatcaccctctcgcacctccgggggatagtaggaacgcctcattgccattaggcgctccgtccccgctacaacctgccactggtgatgtcgcatccgactcctacaataatgtctttagagacacggaggctcttagagagctgggcgtaacccattaccgattcagcattagctgggcaagggtgctgcctaatgggtccgccggagttcctaatcgggaaggcctgcggtactataggagactcttggagagactgagggagctgggagtgcagcccgtcgttacattgtaccattgggacttgccccagaggttgcaggatgcttatggcggctgggctaaccgggctcttgccgatcattttcgggattatgcagaactttgtttccgacactttggtgggcaggtgaagtactggatcacaatagataatccatatgtggttgcctggcacggctatgctaccggccgcttagctccaggaattcggggaagccccaggctcgggtatcttgtggcacataaccttctactggcacatgccaaggtttggcacctatacaatacatcctttagaccaacacagggcgggcaggtgtccatcgccctttcatcacattggatcaatccacggcggatgacggatcacagcattaaggagtgccaaaagagcctggatttcgtgttaggctggtttgcaaagcctgtctttattgacggagattaccccgaaagtatgaagaacaacctttcaagcatactgccggactttacagagagcgagaagaaattcataaaggggacagctgactttttcgccctctgtttcggaccaaccctctccttccaactgctggatccacacatgaagtttcgtcagctggagtctccaaacctgagacagctgctttcttggatcgacctggaattcaaccacccccagattttcatcgtagaaaatggctggttcgtgtctggtaccacaaaacgggacgacgccaagtacatgtattacttgaagaagttcatcatggagaccctgaaagctataaaactggacggcgtggacgtgatcggatacaccgcctggagtttaatggatggttttgaatggcacaggggctactctattaggaggggtctgttctacgtggatttcctgtcccaggataagatgctgctaccaaagagtagcgctctgttttatcagaagctgattgagaagaacgggttccccccactccccgaaaatcagccactggaaggtacctttccatgtgatttcgcttggggagtggtggacaactatattcaggtgtcacagctcacaaagcccatctcatcactgaccaaaccatatcac

SEQ ID NO: 15163 - DNA, 1647 bp, synthetic construct; identical to SEQ ID NO: 15162
  misc_feature 1..1647: note = source = /note="Description of Artificial Sequence: Synthetic coding sequence"
  source 1..1647: mol_type = other DNA

SEQ ID NO: 15164 - DNA, 1647 bp, synthetic construct
  misc_feature 1..1647: note = source = /note="Description of Artificial Sequence: Synthetic coding sequence"
  source 1..1647: mol_type = other DNA
atgccagcgtcggctccgccacggcgcccacggccgccccctccctcccttagcctcttgctggtgctgctggggctcgggggaagaaggctgagggcggagccgggggacggagctcaaacttgggcacgcttctcgcgccctccggctccggaggcagccggattgtttcaaggcacgttcccggacggtttcctttgggccgttggatcggccgcataccagaccgaaggagggtggcagcagcacgggaaaggcgcatccatctgggataccttcactcaccatccgctggccccgccaggagactcgcggaacgcctccctgcccctgggtgcaccgtcccctctgcagccagccactggcgacgtggcgtccgactcatacaacaacgtattcagagacactgaagcgctccgggaactgggagtcacccattacaggttctccatctcatgggcacgcgtgctccccaacggatcggcgggggtcccgaaccgggaggggcttcggtactaccggcggctcctcgagagactgcgcgagctcggggtgcaaccggtggtgaccctgtaccactgggatcttccacaacgcctgcaggacgcatatggaggatgggccaaccgagccttggccgatcacttcagggactacgcagagctgtgcttccgccatttcggaggacaggtcaagtactggatcaccatcgacaatccatacgtggtggcgtggcacggctacgccactggtcgcctcgccccgggaatccgcggatccccgcgcctgggctatctggtcgcccacaacctcctgctcgcgcacgccaaggtgtggcacctgtacaacacctcattccggccaacccagggaggtcaggtgtccatcgccctgtcctcgcattggatcaatcccagacgcatgactgaccactcgatcaaggagtgccagaagagcctggattttgtgctgggctggttcgccaagcctgtgttcatcgatggagattacccagagtctatgaagaataatctctcctcaatcctgccggatttcacggaatccgagaagaagtttatcaagggaaccgccgacttctttgcactgtgctttggtccaaccctctccttccagctcttggacccccacatgaagttcaggcagctcgagtcaccgaacttgcgccaattgctttcatggatcgatctcgaattcaaccatccacagattttcatagtcgagaatggttggttcgtgagcggcaccactaagagagacgacgctaaatacatgtactacttgaaaaagttcatcatggaaaccctgaaggcgatcaaactggatggcgtcgacgtgataggatacactgcttggtcccttatggatggcttcgagtggcaccgaggatacagcatccggcggggactcttctacgtggatttcctgtcgcaagataagatgctgctccccaagagctccgcgctgttctaccagaaactgatcgaaaagaacggattcccccctctcccggaaaaccagccccttgaaggcacctttccgtgcgacttcgcctggggcgtcgttgacaattacattcaggtgtcgcaactgacgaagccaatctcatccctgactaagccataccat

SEQ ID NO: 15165 - DNA, 1647 bp, synthetic construct; identical to SEQ ID NO: 15164
  misc_feature 1..1647: note = source = /note="Description of Artificial Sequence: Synthetic coding sequence"
  source 1..1647: mol_type = other DNA

SEQ ID NO: 15166 - DNA, 1647 bp, synthetic construct
  misc_feature 1..1647: note = source = /note="Description of Artificial Sequence: Synthetic coding sequence"
  source 1..1647: mol_type = other DNA
atgcccgcctcagcccccccccggcggccacgacctccaccgcctagtctctctctccttctcgttctcttggggctcggagggcggcggctaagagctgaaccaggggatggagcacagacatgggctcgattctcacggcccccagcgcctgaggcagcagggctgtttcaagggacttttcctgatggatttctttgggccgtggggtccgcagcctatcagacagagggggggtggcagcaacacgggaaaggggcttcaatctgggatacatttacacaccaccccctcgccccacccggggatagtaggaatgcttcgctacctctcggagccccatcccccctacaaccagccacaggagatgttgcttccgattcctataacaatgtcttcagagatactgaggctctccgcgaattgggggttacacactatcggttttccatttcctgggcacgggtgctaccaaatggatcagctggagtacccaatagggaaggactccgatattataggcggctcctcgaacgacttcgggagctgggggtacagccagtagtaacactgtatcattgggatctgcctcagcggctccaggatgcatatggaggatgggccaatcgagccctcgccgatcacttccgagattacgccgaactatgctttaggcacttcggggggcaggtgaaatattggataacaatagataatccctatgtcgttgcttggcatgggtacgcgactggacgcctggccccagggattagggggtcaccccgcctggggtatctcgtggctcacaatctactattagctcatgccaaggtgtggcatctctataatacaagtttccgcccaactcaggggggacaggtgtccatagctctctcatcacattggatcaacccccggagaatgacggaccatagtatcaaagaatgtcagaaatccctggattttgtgctgggatggtttgctaaaccagtctttattgacggagattatcctgaatcaatgaagaacaaccttagttccatattacccgactttacagaatctgaaaagaaatttatcaaagggacagctgatttttttgccctctgttttgggcccactttgtccttccagcttctcgacccacatatgaaattcaggcagctggaatcccctaacctaaggcagttactttcatggatcgatttagaattcaaccacccacagatatttatcgtagagaacgggtggtttgtgtctggaacaacaaaacgggatgacgcgaagtatatgtactatcttaaaaaatttatcatggaaactctaaaagctatcaaactggatggagttgatgtgatcggatatactgcatggtcactaatggacgggttcgaatggcaccgggggtattccatcagacgaggactcttctatgttgatttcctatcccaggataaaatgctacttccaaaatcttccgccctcttctatcagaagctgattgagaaaaacggattccccccacttccagagaatcaaccactagaaggaactttcccatgtgattttgcctggggagtcgtggataactatatacaggtttctcagttaactaaacccatttcctcattaacaaagccatatcat

SEQ ID NO: 15167 - DNA, 1647 bp, synthetic construct; identical to SEQ ID NO: 15166
  misc_feature 1..1647: note = source = /note="Description of Artificial Sequence: Synthetic coding sequence"
  source 1..1647: mol_type = other DNA

SEQ ID NO: 15168 - DNA, 1647 bp, synthetic construct
  misc_feature 1..1647: note = source = /note="Description of Artificial Sequence: Synthetic coding sequence"
  source 1..1647: mol_type = other DNA
atgccagcgtcggccccaccaagacggccccgtccgccgccgccgtcactcagcctgctgctggtcctgcttgggcttggaggtcggagactcagggcagaacctggtgacggcgcacaaacttgggcacgattttctcggcctccagcacccgaagcggcaggactgttccagggaacctttccagacggctttttgtgggctgtcggtagcgcagcataccagacggaggggggatggcaacagcatggaaagggcgcttcaatctgggatacctttactcaccatcctcttgcaccccctggagactcgagaaatgcatcgctgccactgggcgccccaagccccctgcaacctgccaccggagatgtggcctcggacagctacaacaatgtgttccgtgacaccgaagctctccgcgagcttggagtgacccactacagattctcgatttcatgggcaagggtgctcccaaacggtagcgcaggagtgcctaaccgcgaggggttgagatactaccgtagactgcttgagcgccttcgcgaacttggcgtgcagcctgtggtgactttgtaccattgggatctgccccaaagactccaggatgcctacgggggatgggcaaaccgcgcactggccgatcatttccgcgattacgctgaactctgtttccggcattttgggggtcaggtcaaatactggattactattgataatccgtacgtcgtggcatggcatgggtacgcgactgggcgccttgcaccaggaattcgcggatcccctcgattgggctaccttgtggcacacaacctgcttctggcgcatgcaaaggtgtggcatctgtacaatactagcttccgaccaacccagggtggtcaagtgagcatagcactgagctcacattggattaacccccggaggatgacggaccacagcataaaggaatgtcagaagtcgctggattttgtgctgggctggttcgcaaaacctgtctttatagatggagattaccctgaatctatgaagaataacttgtccagcatcctgccggattttactgagtcagagaaaaagttcattaagggaacggcggatttcttcgcactttgttttgggcctactctgtcctttcaacttctggaccctcatatgaagttccgccaacttgaaagcccaaacctgcgccaactgctttcctggattgatctggaattcaaccatcctcagatattcatcgtagaaaacggatggtttgtctcgggtactacgaaaagagatgacgcgaaatacatgtactacctcaaaaagttcatcatggaaactctcaaagccatcaagctcgacggtgtggatgtgatcgggtacaccgcgtggtcccttatggatggatttgagtggcatcgcggttactcgattaggcggggtctgttttacgtggattttctgtcacaggacaagatgcttctgccaaagtcgtccgcactcttttaccaaaaactgattgaaaagaatgggtttcctccgctcccagagaatcagcctttggaagggaccttcccgtgtgactttgcctggggcgtggtcgataactacattcaggtgtcacaactgaccaagccgatatcttcacttaccaagccgtaccat

SEQ ID NO: 15169 - DNA, 1647 bp, synthetic construct; identical to SEQ ID NO: 15168
  misc_feature 1..1647: note = source = /note="Description of Artificial Sequence: Synthetic coding sequence"
  source 1..1647: mol_type = other DNA

SEQ ID NO: 15170 - DNA, 1647 bp, synthetic construct
  misc_feature 1..1647: note = source = /note="Description of Artificial Sequence: Synthetic coding sequence"
  source 1..1647: mol_type = other DNA
atgcccgctagcgcccctcctagacgacccagacctccccccccgtcactgtctcttctgttggtcctgctgggcctgggcggtaggagacttcgcgccgaacctggcgatggcgcccagacatgggctcgcttctcaaggcccccagcaccagaagccgctggactgtttcagggcacattccccgatggtttcctatgggccgtgggatccgccgcttatcagaccgaaggtggatggcagcagcacggcaaaggagcatccatttgggacacatttacccaccacccactggccccccccggagactcccgaaatgcaagcttgccgctgggtgcccctagcccgctccagcccgcgacaggggatgtcgcgtctgattcttataataatgtattccgagacaccgaggccctccgggaactgggcgtaacacattaccggttctctataagttgggcaagggttctcccgaatggtagcgctggggtgcctaatcgggagggtctgcggtactaccgtcgtttgctggaacggcttagggagttgggggttcagcctgttgtgactttgtaccactgggacttgccacaacgcctgcaggatgcctatggcggctgggcaaatcgggccctggcagatcacttccgggattacgcagagttatgcttcagacattttggcggccaggtgaaatactggatcacaattgataacccatacgtggtagcgtggcacggttatgctactgggcgcctggctccggggattagagggtcgccccgcttgggatacctggtcgcacacaatctgctacttgcccacgcaaaggtctggcatttgtataacacaagcttcaggcctactcagggaggtcaggtcagtatagcacttagctcgcattggattaatccccgcaggatgacggaccattccatcaaggagtgccagaagtcgctggactttgtcctgggatggttcgcaaagcccgtctttatcgacggcgattatcccgaaagtatgaagaacaatctttcaagcatcttgcctgatttcaccgagtctgagaagaagttcataaaaggtaccgccgatttcttcgcactttgctttggacccacactgtcgtttcaactgctggacccccatatgaagttccgacaactggagtccccgaacctccggcagctgctgtcctggatcgacctggagttcaaccaccctcagatcttcatcgtcgaaaatggttggtttgtgtccggcactacgaagcgggacgatgccaaatacatgtactacctgaagaagttcatcatggaaaccttgaaagcaattaagctagatggcgtggatgtaattggctacaccgcctggagtttgatggatgggtttgagtggcatcgaggctattcgattcgacgaggactgttttacgtcgacttcttgtctcaggataagatgctcctcccaaagtcatccgccctgttctatcagaagttgatagaaaaaaacggattccctcccttgcctgagaatcaaccacttgagggaacattcccttgcgatttcgcgtggggcgttgttgataattatatccaggttagccaactcacgaagcccatttccagtctgacaaagccctatcat

SEQ ID NO: 15171 - DNA, 1647 bp, synthetic construct; identical to SEQ ID NO: 15170
  misc_feature 1..1647: note = source = /note="Description of Artificial Sequence: Synthetic coding sequence"
  source 1..1647: mol_type = other DNA

SEQ ID NO: 15172 - DNA, 1647 bp, synthetic construct
  misc_feature 1..1647: note = source = /note="Description of Artificial Sequence: Synthetic coding sequence"
  source 1..1647: mol_type = other DNA
atgccggcctccgcgcccccacgccggcctagaccgccgccaccgtccctgtctctgctgctggtgctcctggggcttgggggacggaggctgcgggccgaacccggcgacggggctcagacttgggcgagattttccaggccgccggcgccagaggctgctggattgttccaaggtacttttcccgacggattcctgtgggccgtgggaagcgccgcgtaccagactgagggaggctggcagcagcacggaaaaggagctagcatctgggacactttcacccatcatccgctggcaccgccgggagactcgcggaacgcctcccttccgctcggcgcaccctccccgttgcaacccgctacgggtgacgtcgcttcagactcatacaataacgtgttccgcgataccgaggcgttgcgggaactcggcgtcactcactacagattttccatcagctgggctcgggtgttgcctaacggaagcgcgggtgtgcccaatcgggaaggactgcggtattaccgccggttgctggagaggctccgggagcttggagtgcaaccagtcgtcaccctctaccattgggatctcccacagcgcctgcaggatgcgtacggaggctgggcaaaccgggccctcgccgaccacttccgggactacgccgagctgtgttttcggcacttcgggggacaggtgaaatactggattaccatcgataacccatacgtggtggcgtggcatggatacgctactggacgtctggccccgggaattcgcggatccccgagactcggttatctggtggcccacaacctcctgctcgcccacgctaaggtctggcatctttacaacacttccttcaggccaacccaggggggccaagtttcgatcgcactgagcagccattggatcaatccacggcgcatgaccgatcattccatcaaggagtgccagaagtcgctggacttcgtgctgggttggttcgccaaacctgtgttcattgacggcgactacccagaaagcatgaagaacaacctctcgtccattctcccggatttcactgaatcagagaagaagtttatcaagggtactgcggatttcttcgccctgtgcttcggacccacgctgtcgtttcagctgctcgatccccacatgaagttcaggcaactggaatcgcctaatctgcgccagctgctgtcgtggatcgacctggagttcaaccatccgcaaatcttcatcgtggaaaatggatggttcgtctcgggcactacgaagcgtgacgacgccaagtatatgtactacctgaagaaattcatcatggaaaccctcaaggctatcaaacttgatggcgtggatgtgatcgggtacactgcctggtcgctgatggatggattcgaatggcatcgaggatacagcatcagacggggcctcttctacgtcgattttctctcccaagacaagatgctcttgcctaagagctccgcgctgttttaccagaagctgatcgagaagaacggctttcctccgctgccggaaaaccagcctttggagggcacctttccatgcgacttcgcctggggggtcgtcgacaattacattcaggtgtcccagctgaccaagccgatttcttcgcttaccaagccataccat

SEQ ID NO: 15173 - DNA, 1647 bp, synthetic construct; identical to SEQ ID NO: 15172
  misc_feature 1..1647: note = source = /note="Description of Artificial Sequence: Synthetic coding sequence"
  source 1..1647: mol_type = other DNA

SEQ ID NO: 15174 - DNA, 1647 bp, synthetic construct
  misc_feature 1..1647: note = source = /note="Description of Artificial Sequence: Synthetic coding sequence"
  source 1..1647: mol_type = other DNA
atgcccgcttccgcgcctcctcggaggcctcgaccaccgcctccatcgctctcgctccttcttgtgctgcttggtcttgggggtcggaggctccgggcagaacctggtgatggcgcacagacctgggctagattttcaaggcctccagcacctgaagcagcaggtctgtttcaaggaacgttcccagatgggttcctttgggcagtgggctctgcggcttaccagactgaaggcggttggcagcaacatggaaagggagcctccatttgggatacctttactcatcatccactggcgcctccgggcgattcacggaacgcgtctcttccactcggagcaccatcgcctctccaacccgcaaccggggatgtggcatcagattcgtacaataacgtgtttcgtgatactgaggcactcagggaattgggagtgactcattacaggttctccatttcgtgggcaagagtcctgcctaacgggtcggcaggtgtccccaatagggagggactgagatactaccgccgactcctggaacgacttcgggagctgggagtgcagcctgtggtcactctttatcattgggacctgcctcagcgccttcaagacgcatacggtggatgggcgaatcgtgcactcgcggaccatttccgggactacgccgaattgtgcttcagacactttggaggtcaagtgaagtattggataacgatagacaatccatacgtggtggcctggcatggatacgcaaccggacggcttgcgccaggtattcgcggatccccgcgactgggatacctggtggcacataacttgctgctggcccatgcaaaggtctggcatctgtacaacacctcattccgtccaactcagggtggtcaagtctcaattgcgcttagctcgcattggattaacccacgaagaatgactgaccactcaattaaggaatgtcagaagtcgctggattttgtgcttggatggtttgctaagccagtgttcatcgacggcgactacccagaatccatgaaaaacaatctttcatcgatcctgccagatttcaccgaatcggagaagaagtttatcaagggcaccgctgatttcttcgctctctgttttgggccaaccttgtcctttcaacttctggatccgcacatgaagtttagacagcttgagagccctaacctgagacaacttctgtcatggattgaccttgagttcaatcaccctcagatctttatcgtggaaaacggatggtttgtgagcggaaccactaagagagatgatgccaagtatatgtactacttgaaaaagttcatcatggaaacgctgaaggccattaaactggacggcgtggacgtgatcggttacactgcgtggtcacttatggatggattcgaatggcataggggttacagcatacgtcgtggtttgttctacgtcgactttctcagccaggataagatgcttctgcccaaaagctcagcactgttttaccaaaagctgattgagaaaaatggctttcctcctctgccagagaaccaaccactggaaggtacctttccgtgtgatttcgcttggggagtggtggataactatattcaagtctcgcaattgaccaagcccatttcctcgctgaccaagccctaccac

SEQ ID NO: 15175 - DNA, 1647 bp, synthetic construct; identical to SEQ ID NO: 15174
  misc_feature 1..1647: note = source = /note="Description of Artificial Sequence: Synthetic coding sequence"
  source 1..1647: mol_type = other DNA

SEQ ID NO: 15176 - DNA, 1647 bp, synthetic construct
  misc_feature 1..1647: note = source = /note="Description of Artificial Sequence: Synthetic coding sequence"
  source 1..1647: mol_type = other DNA
atgccagccagcgcacccccgaggaggcctcggccaccgcctcctagtctatcactgcttctggtcctattgggattaggaggcagacggcttagggcggagcccggtgatggagctcagacctgggcacgtttctcccgccccccagctcctgaggctgcaggattgttccaaggtacgtttcccgatgggttcctctgggccgtgggttctgctgcttatcaaacagagggcgggtggcagcagcatgggaagggcgcgtctatttgggacacgttcacccatcatccactggccccaccaggcgattccaggaacgcctccctcccactcggggctccctcccctcttcagccagccacaggagatgtggcgtctgatagctacaataatgtgttcagggatacggaggcactgcgcgaactgggggtcacccactaccggtttagcattagttgggcacgagtgctccccaacgggagtgcaggcgttcccaatagggaagggctgaggtactacagacggctgttggaacggctgcgcgagctcggtgtgcagcccgtagttacactttatcactgggatctgccccagaggcttcaagatgcctacggaggttgggcaaatcgcgccctggcggatcatttcagagattatgccgagctctgctttaggcacttcggcggtcaggttaaatattggatcactatcgataacccgtacgttgtagcgtggcacggatacgcgaccggccggctggcccccggaattagagggagtcctaggcttggctacctggttgcccataacctgctgttggcacatgcgaaggtctggcatctgtataacacatcgtttcgaccaactcagggagggcaggtgtccatcgcattgtcaagccactggatcaaccccaggaggatgactgatcactccatcaaagaatgtcagaaaagtctggacttcgtgctcggctggtttgcaaagcctgtctttatcgatggggactatcccgagtcgatgaaaaacaatttatcctcaatactgccagattttactgaatctgagaagaaatttattaagggaacggccgatttcttcgctttgtgctttggacctactctctctttccagttgctggatccacacatgaagttccgacagttagaatcgccaaatttgagacagttgctctcctggatcgacctggaatttaaccatccacagatcttcattgtagagaacgggtggttcgtgtccggcactacaaagagagacgatgctaagtatatgtattatctgaagaaattcatcatggaaaccctgaaagccattaagctggatggtgttgatgtgatcggatacacggcttggtcactgatggatggatttgagtggcatcggggctactccatccgacgtgggttgttctatgtcgattttctgtcccaagacaagatgctgctaccaaagagtagcgcgctcttttaccaaaagctgattgaaaagaacgggttccctcctctccctgagaatcagccactagagggtacattcccgtgcgatttcgcctggggcgtggttgataattatattcaggtaagccagttgacaaagcctatctcttccctcaccaagccataccat

SEQ ID NO: 15177 - DNA, 1647 bp, synthetic construct; identical to SEQ ID NO: 15176
  misc_feature 1..1647: note = source = /note="Description of Artificial Sequence: Synthetic coding sequence"
  source 1..1647: mol_type = other DNA

SEQ ID NO: 15178 - DNA, 1647 bp, synthetic construct
  misc_feature 1..1647: note = source = /note="Description of Artificial Sequence: Synthetic coding sequence"
  source 1..1647: mol_type = other DNA
atgccagcaagtgctccccctagacgcccacggcctccgcctcctagcttaagcctgctgctggtgttactaggcttgggcggcaggcgcctgcgcgccgagcccggggatggcgctcagacctgggcccgattctcaaggccccccgcacccgaggccgccggcctgttccagggcactttccctgatggcttcctatgggccgtggggagcgctgcctaccagaccgaagggggctggcagcagcatgggaaaggggcttccatttgggatacctttacacaccatccgctggcccctcctggagactctcgcaacgcctctcttccgctgggcgcaccaagtcctctgcagcccgccaccggcgatgtagccagtgattcttacaacaatgtgtttagggacacggaggcgctacgcgaactcggggtgacccattatcgattctctatctcttgggcaagagttctgccaaatggcagcgctggggtgcccaatagggaggggttacgttactatcggcgtctactcgagaggttgcgggagctgggggtacagcccgttgtgacgctttaccactgggatctgcctcagcgtttgcaagacgcatacggaggctgggcaaatcgggctctggccgaccactttagagattatgccgagttgtgttttcggcactttggcggccaggtgaagtattggattaccatcgataacccctatgtcgtcgcttggcacggttacgctaccggccgcctcgcgccagggatcagaggcagcccccgactcggctacctagtcgcacacaacctgctcctcgcccatgcgaaggtatggcacctttataataccagctttaggccaactcaaggcggccaggtctctattgccttgtcatcccactggattaaccctcgaagaatgaccgatcacagcattaaggaatgtcagaagagtttggacttcgtgctcggctggtttgctaaacctgttttcatcgatggagactaccctgaatccatgaagaacaaccttagctctatattacctgacttcacagagagcgaaaagaagtttatcaagggcactgccgacttctttgcattgtgttttggacccaccctatcatttcagctgttggacccccacatgaagttcaggcaacttgaaagcccaaacctaaggcagctgctgagctggattgatctggaatttaaccatcctcagatattcatcgtcgagaatgggtggtttgttagcgggaccactaaacgggacgatgccaagtacatgtattaccttaagaaatttattatggagacacttaaggcgattaagctggacggtgtggacgttattggttacaccgcctggagtctaatggacggtttcgagtggcatagagggtatagcattcgccggggattattctatgtagactttctgagccaggataagatgctgctgccaaagtcatctgcactgttttatcaaaagctgattgaaaaaaatggctttccacctttgccagaaaaccaacccctggaggggacattcccatgtgactttgcctggggcgttgtagataattacattcaggtttcgcagttaacaaagcccatttcttcactaactaaaccatatcat

SEQ ID NO: 15179 - DNA, 1647 bp, synthetic construct; identical to SEQ ID NO: 15178
  misc_feature 1..1647: note = source = /note="Description of Artificial Sequence: Synthetic coding sequence"
  source 1..1647: mol_type = other DNA

SEQ ID NO: 15180 - DNA, 1647 bp, synthetic construct
  misc_feature 1..1647: note = source = /note="Description of Artificial Sequence: Synthetic coding sequence"
  source 1..1647: mol_type = other DNA
atgcccgcctctgctcctcctcgtcgcccaagaccacccccgccttctctctcgctccttctagtcttgctcggcctcggcgggcgaaggcttcgtgcggagccgggcgatggcgcacagacatgggccaggttttcacggccgcctgcgcccgaagccgctggcctttttcagggcactttcccagacgggtttctgtgggcggtgggtagtgccgcctatcagacagagggaggctggcagcaacacggcaagggcgcgtctatctgggacacattcacccatcaccccttggcccctccaggggattctcgtaacgccagcttgcctctgggcgccccatccccactgcagccggccactggagacgtggcctcggactcctacaacaacgtgttcagggatacggaggccctgagagagttgggtgtgacacactaccgcttctcaatcagttgggcccgagtcctgcctaacggctctgccggagtgcccaatagggagggtctccgatactaccggcgattgctggagcggttgcgggagctcggtgtccagccagttgtcacattgtaccattgggatctgccccagagattacaagacgcctacggcggctgggctaaccgtgccctggcagatcacttccgcgactatgctgagctgtgctttagacactttgggggtcaggtgaagtactggattactatcgataacccgtatgtggtggcatggcacggttacgctaccgggcgcctggcacccggtatcagaggctctcccaggctaggttatctggtcgctcataacctgcttttggcccacgccaaagtgtggcatctgtataatactagctttagaccaacacaaggaggtcaggtgagcatagcactcagctcacactggatcaacccacggagaatgacagaccattctatcaaagagtgtcagaaatcactagacttcgttttgggctggttcgcgaaacctgtgttcattgatggggactaccctgagtctatgaaaaacaacttaagctcgatcctccccgacttcacggagagcgagaagaaattcatcaagggaactgccgacttttttgccctgtgcttcggtcctaccctcagtttccaattgttggacccacacatgaaattcaggcaacttgaatcccctaaccttcggcagttgctaagttggatcgatctggagttcaatcatccccaaatctttattgttgaaaacggctggttcgtgagcggaacaacgaagcgcgatgacgcgaagtatatgtactatctcaagaagttcatcatggagactctgaaagctattaagctggacggggtggacgtgatcgggtacacagcatggtctctgatggacggttttgagtggcatcgagggtacagcatccgcaggggcctattctacgtggactttctttcacaggacaaaatgttgctgccaaagagctctgccctgttctaccagaagcttattgaaaagaacggctttcctcctctgcctgagaatcagcccctcgagggaaccttcccgtgcgatttcgcctggggtgtcgtggacaattacatccaggtgtctcaactgaccaagcctatctcttccctcacaaagccataccac

SEQ ID NO: 15181 - DNA, 1647 bp, synthetic construct; identical to SEQ ID NO: 15180
  misc_feature 1..1647: note = source = /note="Description of Artificial Sequence: Synthetic coding sequence"
  source 1..1647: mol_type = other DNA

SEQ ID NO: 15182 - DNA, 1647 bp, synthetic construct
  misc_feature 1..1647: note = source = /note="Description of Artificial Sequence: Synthetic coding sequence"
  source 1..1647: mol_type = other DNA
atgcccgcatccgcacctcctcgccgccctcgcccacctccaccgagcctttctctcttgcttgtccttttgggactgggcggtcgaaggctgagagcagaaccaggtgatggtgctcagacttgggcaagattctcaagaccacccgcaccggaggctgccgggctgttccaggggacttttcctgacggatttctttgggcagtgggttccgcagcataccaaactgaaggaggctggcagcagcatggtaagggagcgtcaatatgggacacttttactcatcatccactggcaccacccggagattccagaaatgcatcgcttcctctcggagcaccctctccgcttcaacctgcaaccggggacgtcgcgtccgacagctacaataacgtgttcagggatacggaagcactgcgggaactgggcgtgacccattatcggttttccatttcgtgggcccgagttttgcctaacggttcagctggtgttccgaacagagaaggtctgcggtactacaggcgtctcttggaaagactgagggaacttggtgtccagcctgtggtgactttgtaccattgggatcttcctcaacgattgcaagatgcatacggcggttgggcaaaccgcgctcttgcggaccactttcgcgactacgcagagctgtgctttaggcactttggaggccaggtgaagtattggattactattgataacccttatgtggtggcatggcatggatacgcaaccggaagattggcgccgggaattcggggcagtccacgtctggggtatcttgtcgcgcataatctcctgctggcacatgctaaagtctggcatctgtacaacacctcgtttcgtcctacccaaggaggacaggtttccattgcactgtcgtcccactggattaaccccaggcggatgaccgatcactcgattaaggaatgtcaaaagtcgctggattttgtgttgggatggttcgcaaagcctgtgtttatagatggcgactaccccgagtccatgaagaataacctttccagcattctccccgattttaccgaaagcgaaaagaagttcataaaaggaactgccgacttttttgcactttgttttggtcctactctctcgtttcagcttctggacccccacatgaaatttcgccaacttgaaagccccaatctgcgacaactcctgtcctggatcgatcttgaattcaaccaccctcagattttcattgtggagaatggttggttcgtgagcggaaccaccaagcgagatgatgccaagtatatgtactaccttaagaaattcattatggaaactctgaaggccattaagctggatggtgtggatgtgatcggatacaccgcatggtccctcatggatgggtttgagtggcatcgggggtactccatccgaagaggccttttctacgtggattttctctcacaggacaaaatgcttctgccaaaatcatccgcgcttttctatcaaaagctgattgagaagaacggtttcccacctctgcctgagaatcagcctctcgaaggaacttttccttgcgatttcgcatggggtgtggtggataactacatacaggtatcacaactcaccaagcctatttcgtcactcactaagccgtaccat

SEQ ID NO: 15183 - DNA, 1647 bp, synthetic construct; identical to SEQ ID NO: 15182
  misc_feature 1..1647: note = source = /note="Description of Artificial Sequence: Synthetic coding sequence"
  source 1..1647: mol_type = other DNA

SEQ ID NO: 15184 - DNA, 1647 bp, synthetic construct
  misc_feature 1..1647: note = source = /note="Description of Artificial Sequence: Synthetic coding sequence"
  source 1..1647: mol_type = other DNA
atgccagcttctgccccacctcggcggccccgcccccctccgccttcactcagcttactccttgtgctgcttggactgggcggaaggagattacgcgcagaacctggcgatggcgcccagacatgggcccgcttttcacggcccccagcccctgaagctgctgggctcttccagggaaccttccccgacggttttttgtgggcagtgggcagcgcagcgtaccaaactgaaggaggctggcaacagcatggcaaaggcgcctctatttgggatactttcacacatcatccccttgccccccccggcgattcgcggaatgcctctctgcccttaggcgcacctagtccgttacaaccagctaccggagatgtggcctctgactcttataataacgtctttcgcgacaccgaagctctgagagagctgggtgtgacgcactatcggttttctattagctgggccagggtgcttccaaacggatcagcaggtgtgcctaatagggagggtctacggtactacaggcgcctgctggagcgccttcgcgaactaggtgttcagcccgttgtgacgttatatcactgggatctgcctcagagactgcaggatgcgtatgggggctgggccaatagggcgctggcagatcatttccgggactacgctgaactgtgctttcgccattttggaggtcaagtcaagtattggatcacaatagacaacccctacgtagtggcatggcacggatacgccacaggtaggctggcgcccggcatcagggggagcccccggctgggttacctggttgcccacaaccttctgctggcgcacgcgaaggtttggcacctgtataatacttcgttcaggccaacgcagggcggacaggtctctattgcgctttcttctcactggattaaccctcgcagaatgaccgaccactctataaaggagtgtcagaagtcgctcgacttcgtgctggggtggtttgcaaagcccgtattcatcgacggggactatcccgagtctatgaagaataacctttcctccatactgccagattttaccgaaagcgagaagaagtttattaaaggtactgccgacttttttgctttgtgcttcggcccaacactgtcatttcagctcctcgaccctcatatgaagtttcgacagctggagagtcctaacctgagacagttgctgtcgtggatcgatctggagtttaatcatccccaaatctttatcgtagagaacggatggttcgtcagcgggaccacaaaaagggatgacgccaagtatatgtactatctgaaaaaattcatcatggaaactcttaaagccataaagctcgacggcgtcgacgtgattggctacacggcttggagcctgatggacgggttcgagtggcaccgaggatactcaatccgacgaggactgttctatgttgactttctgagtcaggataagatgttgctccctaaatcgtccgcactgttttatcagaaactaatcgaaaagaatggtttccctccactgccagaaaaccagcctctggaaggcacctttccgtgcgattttgcttggggcgtggttgataattatatacaggtaagtcagctgacaaaacctattagcagtttgacgaaaccctatcac

SEQ ID NO: 15185 - DNA, 1647 bp, synthetic construct; identical to SEQ ID NO: 15184
  misc_feature 1..1647: note = source = /note="Description of Artificial Sequence: Synthetic coding sequence"
  source 1..1647: mol_type = other DNA

SEQ ID NO: 15186 - DNA, 1647 bp, synthetic construct
  misc_feature 1..1647: note = source = /note="Description of Artificial Sequence: Synthetic coding sequence"
  source 1..1647: mol_type = other DNA
atgcccgcatctgcccctccccgtagacccagaccacctccaccttcgctttcacttctgcttgtccttcttggacttggcggacgcagactccgcgccgagcccggagacggagcacagacgtgggctcggtttagtaggccccccgcccctgaggcagcagggctctttcaaggaacgttcccggatggttttctgtgggccgtgggttcggcagcatatcagacggaaggaggatggcaacagcatggcaagggtgcgagtatctgggatactttcactcatcaccctcttgctccacccggagatagtcgaaatgccagtctcccactcggagcaccctcaccactgcagccagcaactggggatgtggcaagcgactcgtacaataacgtctttcgcgataccgaagcactccgtgagctcggagtgacccattacagattttcgatctcgtgggcacgggttctccctaacggaagcgccggggtgcctaaccgcgagggacttagatactaccgacggcttcttgaaagactgcgtgagcttggcgtgcaacctgtggtcactctgtaccactgggatctgcctcaacggctccaggacgcctatggagggtgggcaaatagagcacttgcggaccactttcgtgactacgcagagctgtgttttagacattttgggggacaggtgaagtactggattaccattgataatccatacgttgtggcgtggcatggctacgccaccggtcgcttggctcccggcattcgtggatcgcctaggttgggttacctggtggcacataacctccttcttgctcacgcaaaggtgtggcatctgtacaatacttccttcaggcctacgcagggtggccaggtgagcatcgctctgtcctcacactggataaaccctcgccggatgactgatcattcgatcaaagaatgtcaaaagagcctcgacttcgtgttgggatggttcgctaagccggtctttattgacggcgactaccccgaatccatgaaaaacaatctgtcatccattctgcctgactttaccgaaagcgaaaagaagtttatcaaaggaaccgcggacttttttgcactgtgtttcggaccaaccctgtcgtttcagctgctggatccccacatgaagttccggcaattggaatctcctaacctgagacaacttttgtcatggattgatcttgagtttaatcatccacaaatctttattgtggaaaacggttggttcgtctcagggactaccaaaagagacgacgccaaatacatgtactacctcaaaaagtttatcatggaaacccttaaagcaattaagctcgatggagtagacgttataggctacaccgcatggtcgctcatggatggttttgaatggcatcgaggatactcgattcggcgaggcctcttctacgtggatttcctgtcccaagataagatgctgctgcctaagagctcggcccttttctatcagaagctgatcgagaagaacggtttcccgccattgcccgaaaaccaacctcttgagggtacttttccttgcgatttcgcatggggtgtggttgataactatatacaagtctcgcaactgacgaagcctatttcctccctgaccaagccctaccac

SEQ ID NO: 15187 - DNA, 1647 bp, synthetic construct; identical to SEQ ID NO: 15186
  misc_feature 1..1647: note = source = /note="Description of Artificial Sequence: Synthetic coding sequence"
  source 1..1647: mol_type = other DNA

SEQ ID NO: 15188 - DNA, 1647 bp, synthetic construct
  misc_feature 1..1647: note = source = /note="Description of Artificial Sequence: Synthetic coding sequence"
  source 1..1647: mol_type = other DNA
atgccagcctccgccccacccagaaggcctcggccccctccaccatcactttccctgctgctggttctgctgggtctggggggcaggagattgcgcgccgaaccaggagacggtgctcaaacctgggcccggttttcgcggccccctgcacctgaagcagcaggattgtttcagggcacgtttcctgacggcttcctgtgggccgtgggatccgcagcgtaccagactgagggtgggtggcaacaacacggcaaaggtgcatcaatctgggacactttcacgcaccacccccttgcaccacctggagactcacgaaatgcctctctccctcttggcgccccttcgcccctgcagcctgcgaccggtgacgtcgcgtcggattcatacaacaacgtgtttcgcgacactgaagcactccgagaattgggcgtgacccactacagatttagcatctcctgggcacgtgtgctgcctaatggtagcgccggcgtccctaaccgggagggccttcgatactacagacggctgctcgaacggctccgggagctcggcgtgcaaccagtcgttaccctttaccactgggatcttcctcaacgactgcaagatgcttatggtggttgggcaaatagagccctggccgatcattttcgcgactatgctgaactttgctttcgccatttcggtggtcaagtgaaatactggatcacgattgacaacccctacgtggtggcatggcacgggtacgcaaccggacgtttggcccccggaattagaggatcgcctaggcttggttacttggtcgcacataatcttctgcttgcgcatgcaaaagtctggcatctttacaatacctcatttagacctactcagggtggacaagtctcgattgctttgagcagccattggattaacccgagacgcatgactgatcacagcataaaggagtgtcaaaagtcccttgatttcgtgctgggatggttcgcaaagcctgtgttcatcgatggggattaccctgaatcaatgaagaataacctttcgtccatacttccagatttcaccgagtcggagaaaaagttcattaagggtaccgcagacttttttgcgctttgcttcggacctaccctgtccttccaattgctggatccccatatgaaatttcgacaactcgagtcccctaacctgaggcaacttctgtcatggatcgatctcgagtttaaccatcctcagattttcatcgtggagaacggctggtttgtgtcgggaacgacgaagagagacgacgcaaagtatatgtattaccttaagaagttcataatggaaacccttaaggcgatcaagctggacggagtggatgtcattggatacaccgcttggagcctgatggacggttttgaatggcatagaggttacagcatcagaagaggtcttttctatgtggattttctgagccaagacaagatgctgcttccaaagagctccgcactgttctaccaaaagctcattgaaaagaacggttttccgcctctgccggaaaatcaacctctggaaggaacgtttccttgcgattttgcctggggagtggtcgataactacatacaagtctcccaacttactaaaccgattagcagcctgaccaaaccctaccat

SEQ ID NO: 15189 - DNA, 1647 bp, synthetic construct; identical to SEQ ID NO: 15188
  misc_feature 1..1647: note = source = /note="Description of Artificial Sequence: Synthetic coding sequence"
  source 1..1647: mol_type = other DNA

SEQ ID NO: 15190 - DNA, 1647 bp, synthetic construct
  misc_feature 1..1647: note = source = /note="Description of Artificial Sequence: Synthetic coding sequence"
  source 1..1647: mol_type = other DNA
atgcctgcctcagcacccccccggcgccctaggccccctcctccatctcttagtctgcttctggttttgctggggctcgggggccgcaggcttcgggcggaaccaggagatggcgcccagacctgggctcgcttctctaggccccccgcccctgaggccgcgggcctgttccagggaactttcccggacgggttcctttgggccgtggggagcgcagcataccagactgagggcggttggcagcagcatggtaaaggcgcatcaatctgggacacttttactcaccatccgctggccccacccggcgactcacgcaacgcatctttgccattgggcgcgccctctccactgcagccagctaccggagatgtggctagtgatagctataacaacgtatttagagatacagaggctttgcgggaactcggagtgacccactaccgcttctccatcagctgggctagagttctgcccaatggtagtgcaggtgttccaaatcgcgaaggtctgcggtattacaggcgcctcctcgaaaggctccgggaactgggtgtgcagcccgtcgtcaccctctaccactgggatcttcctcaacggctgcaggacgcctatgggggatgggccaaccgagcactcgccgaccactttcgggattacgccgagttgtgttttcggcacttcggtgggcaggttaagtattggattactattgataacccttacgtggtggcctggcacgggtatgcaaccggacggctggcccccggaatccggggctcacctagactcgggtatctggtcgcacacaacctgctcctggctcatgccaaggtatggcacctttacaatacaagttttcgccccactcagggagggcaggtgtctatcgccctgagttcccattggatcaacccccggcgaatgacagaccactccatcaaggagtgtcagaaatccttggattttgtcctgggctggttcgccaaacccgttttcattgacggcgattacccggagagtatgaaaaacaacctgagcagcatcctccctgattttactgaatccgaaaagaaattcattaaaggcacggctgacttttttgccctgtgctttgggccaaccctgagcttccagctcctggatccccacatgaagtttcgacaattggaatcccccaatctgagacagctcctttcctggattgatttggagtttaatcatcctcagatcttcatcgtggaaaacggttggttcgtctcaggcacaacaaagcgggacgatgccaaatacatgtattatttgaagaagttcataatggaaaccttgaaagctatcaagctcgacggcgtcgatgtgattggatacacagcctggtctttgatggatggtttcgagtggcatcggggatactcaatcaggagaggactgttctacgtcgactttttgtcccaggacaagatgctcctgcctaaatcctccgctctcttttaccagaaacttatcgaaaagaacggtttcccccctcttccagagaatcagccacttgaagggaccttcccgtgtgatttcgcctggggagtggtggataactatatccaagtatctcagctgaccaagccaatatcctccttgactaaaccctaccat

SEQ ID NO: 15191 - DNA, 1647 bp, synthetic construct; identical to SEQ ID NO: 15190
  misc_feature 1..1647: note = source = /note="Description of Artificial Sequence: Synthetic coding sequence"
  source 1..1647: mol_type = other DNA

SEQ ID NO: 15192 - DNA, 1647 bp, synthetic construct
  misc_feature 1..1647: note = source = /note="Description of Artificial Sequence: Synthetic coding sequence"
  source 1..1647: mol_type = other DNA
atgcccgcctctgcccctcctcgccggcctcgtccccctcctccttctctttcattgttattggttctcttagggctgggcggaagaagactgagggccgagccgggggacggcgcacaaacttgggcaagatttagccggccccccgccccagaagccgccggtctattccagggtacgttcccagatgggtttctctgggcagtgggaagcgcagcctatcagactgagggtggatggcaacaacacggcaaaggagcttctatctgggatacattcactcatcatcctctcgccccgccaggtgattcacgcaacgcctctctgcctttaggagcaccgtcacccttacaacctgctaccggcgacgtagccagcgactcttacaacaacgtgtttcgggacacagaggcccttcgagagctcggagtgactcactatcggttcagcatatcctgggccagggtattgcctaacggcagcgccggggttcctaatagggaaggcctcaggtattatcgcagattgttagagcggctaagggaactgggagtgcagccagtggtgacactctaccattgggatctgccacagagactgcaggatgcctatggcggatgggcaaatagagcattggccgatcatttccgcgattacgcagaactgtgttttcgccattttggagggcaggtgaaatattggataactatcgacaatccatacgtcgtagcatggcatggatatgccaccggccgccttgctccaggcatccgaggaagcccccggttggggtacctcgttgcccataacctgcttctggcccatgcgaaagtgtggcacctgtacaacacttcgttccgcccaacccagggcggacaggtctccatcgctctgagctcccattggattaacccacgccgtatgaccgaccatagtattaaggaatgccagaagtccctggactttgttctgggctggttcgcaaaacccgtcttcatagacggagattatccagaaagcatgaagaataatctgagtagtatactgccggacttcacagaatcggagaagaaattcattaagggcaccgccgacttctttgctttgtgctttggaccaactctgagctttcagctccttgacccccacatgaagttcagacagctggaatcacctaatttacgccagctactgagctggatcgacttggagttcaaccatcctcagatctttattgtggaaaacgggtggtttgtttcggggacgactaaacgagacgatgcgaagtatatgtattatttgaagaaattcatcatggaaacgttgaaagcaattaagctggacggggtggatgtaatcggatacaccgcatggtccttgatggatgggttcgagtggcacaggggttactctattagacgaggcctgttttatgtcgattttctgagccaagacaagatgctgcttcccaagtcaagtgccctcttttatcagaagctaatagagaaaaacgggtttccgccactgcccgaaaatcaaccactggaaggtacattcccttgtgattttgcctggggggtcgtcgataactatatacaggtgagccagctcacaaaacctatatcctccctcacaaaaccgtaccat

SEQ ID NO: 15193 - DNA, 1647 bp, synthetic construct; identical to SEQ ID NO: 15192
  misc_feature 1..1647: note = source = /note="Description of Artificial Sequence: Synthetic coding sequence"
  source 1..1647: mol_type = other DNA

SEQ ID NO: 15194 - DNA, 1647 bp, synthetic construct
  misc_feature 1..1647: note = source = /note="Description of Artificial Sequence: Synthetic coding sequence"
  source 1..1647: mol_type = other DNA
atgccggcaagcgccccacctcggaggcccagaccacctccaccctcactctcgttgcttctggtcttgttgggtttgggagggcgcagactgagagcagaaccgggagatggagctcagacttgggcaagattttctcgcccaccggctcctgaagcagcagggcttttccagggaacgtttccggatggttttctgtgggccgtgggatctgcagcataccagaccgaagggggatggcaacagcacggaaagggcgcatcaatctgggataccttcacccatcaccctcttgcccctccaggagatagccgtaacgcgtcgcttccactcggggcaccaagccctctccagccggctactggagatgtggcatccgactcgtataacaacgtgttccgagataccgaagccctgagggaacttggagtgacccattaccgattctcgatcagctgggctcgggtgcttccgaacggttccgcaggtgtacctaaccgggaagggctcagatactaccggcggctgcttgagagactgcgggaacttggtgttcagcccgtggtcacgctctaccattgggaccttccacagcgacttcaagacgcctacggcggatgggcaaaccgggccttggcggatcactttagagactacgccgaattgtgtttccgacattttggtggtcaagtgaaatactggattaccatagataacccatacgtcgttgcatggcatggatacgcaactggaagattggcaccaggcataagagggtccccccgactgggatacctcgtggcgcataacctgcttctggcacatgctaaagtgtggcatctctacaatacgagctttcgcccaacgcagggtgggcaagtgtcgatcgcactttcaagccactggattaatccgaggcgtatgaccgatcatagcatcaaggaatgtcagaagtcgctggactttgtccttggttggttcgcgaagcctgtgtttattgacggtgattaccccgagagcatgaagaataacctgagctccatactcccagattttaccgaatccgagaagaagttcataaaggggaccgccgatttcttcgcactctgtttcggacctaccctgtcatttcagctgcttgatcctcatatgaagttcagacagcttgagagccctaacctgagacaacttctctcctggatcgatctggaattcaaccatcctcagatctttatcgtcgaaaacggatggttcgtgtcaggtacgactaagcgcgatgatgcgaaatacatgtactatctgaagaaattcattatggagactcttaaggccataaaactcgacggtgtcgatgtgatcggctacaccgcctggtcgcttatggatggcttcgaatggcaccggggatactccattcgccggggcctcttttacgtggattttctttcccaagataagatgctgttgcccaagtcctcggcactgttttatcaaaaactgattgaaaagaacggtttcccgccacttccagaaaaccaacctcttgaaggcacttttccttgtgacttcgcatggggagtcgtggacaactacatccaagtgtcgcagcttaccaagccaatttccagcctcaccaaaccttatcat

SEQ ID NO: 15195 - DNA, 1647 bp, synthetic construct; identical to SEQ ID NO: 15194
  misc_feature 1..1647: note = source = /note="Description of Artificial Sequence: Synthetic coding sequence"
  source 1..1647: mol_type = other DNA

SEQ ID NO: 15196 - DNA, 1647 bp, synthetic construct
  misc_feature 1..1647: note = source = /note="Description of Artificial Sequence: Synthetic coding sequence"
  source 1..1647: mol_type = other DNA
atgcccgcatccgccccaccccggcgtccccgaccacctcctccctctctatcccttctgttggtccttctaggactaggtgggcggcgactaagggctgaacctggcgacggcgcccagacgtgggccagattctcaagaccccccgcacccgaggccgctgggcttttccaaggcactttccccgacggattcctgtgggccgtgggaagcgctgcgtaccagaccgaggggggctggcagcagcacggcaaaggagcctcaatttgggataccttcacacatcaccccttggcacccccgggggactcaagaaatgcgagcctacccctgggggccccgagccccttgcagccagctaccggggacgtagcgagcgactcatataacaacgttttccgcgacactgaagcactcagagagctgggggtcactcattatcggtttagtatcagttgggctcgggtactccccaatggtagcgctggcgtgcccaacagggaaggcttgaggtactacaggaggctgctggagcgccttagagagctcggtgtgcaacccgttgtcaccttatatcattgggatctcccacagcgactgcaggatgcgtatggagggtgggctaatcgcgcactggcagaccattttcgcgattacgccgaattatgtttcagacacttcgggggccaggttaagtactggatcactatcgacaacccgtatgtagtagcttggcacggatacgctaccggccgactggctcctggcattagggggtctcccagactgggctacttagttgctcacaatctgttgttggctcacgcaaaggtgtggcatctttacaacacctcatttcgtcccactcagggtgggcaggtgtctatcgcactaagttcccactggattaaccctcgcaggatgaccgatcactcgataaaggagtgtcagaaatcactggattttgtcctgggctggttcgcgaaacctgttttcattgatggcgattaccccgagagtatgaaaaataacctgtctagcatccttcccgatttcacagagtcggagaaaaaattcataaaggggactgccgacttcttcgcgctctgcttcgggccaacactgtcgttccagctcctcgatccccacatgaagttcaggcagctggagagccctaacctgcggcagctactttcctggattgacctggagtttaaccatccacagattttcatcgtcgaaaacggctggtttgtgtcaggaacaacgaaacgcgacgacgccaagtacatgtactacctgaagaaattcattatggaaacgctcaaggccataaaattggacggagtggatgtcatcggttacactgcctggtctttgatggacggtttcgagtggcaccggggttactcgatccggagaggtctgttttacgtggacttcctctctcaggacaagatgctgctgcctaagtcatctgccttattctaccagaagctgatagaaaaaaatggcttccctccccttcccgagaaccaacccctggagggaacatttccatgtgatttcgcctggggtgtggttgataattacatccaggtgtctcagctcactaaacccatttcctcgctgacaaagccctaccat

SEQ ID NO: 15197 - DNA, 1647 bp, synthetic construct; identical to SEQ ID NO: 15196
  misc_feature 1..1647: note = source = /note="Description of Artificial Sequence: Synthetic coding sequence"
  source 1..1647: mol_type = other DNA

SEQ ID NO: 15198 - DNA, 1647 bp, synthetic construct
  misc_feature 1..1647: note = source = /note="Description of Artificial Sequence: Synthetic coding sequence"
  source 1..1647: mol_type = other DNA
atgcctgcctctgctccaccacgcaggcctcgaccgccaccacctagcctttctctgctgctggttttattggggctagggggcaggagactgcgggctgagcctggggacggggcgcagacatgggctcgtttttcaaggcctccagctccagaggcggctggcctgttccagggtacattcccggacgggttcctgtgggccgtgggctctgccgcttatcagactgaaggaggatggcagcaacatggcaagggggcatcaatttgggataccttcacacatcatcctctggccccccccggtgattcgaggaatgcttcacttccccttggtgccccttccccacttcaaccagcaacaggcgatgtggccagtgattcatacaacaacgtgttcagggatacagaagcccttagagagttaggtgtgacgcactataggttctccatctcttgggctagggttctgcctaacggaagtgcaggagtccctaatagagaggggttgcggtattatcgacggctcttggaacgtctgcgcgagctgggggtccagccagtggtgacactgtaccattgggatttaccacaaaggttgcaggacgcttatggaggttgggccaacagggcactagctgaccactttagggactatgccgagctgtgttttagacacttcggcggccaggtgaagtattggattacaatcgacaatccttacgttgtagcctggcacgggtatgcgacaggtcgattagcacccggcatacgtgggagccctcggctgggatatctggtagcacacaacctgctgctcgcccatgctaaggtttggcacctctataacacatctttcaggccaacccagggagggcaagtgtccatcgctctgtcaagtcactggatcaatccgcggcgaatgacggaccactctataaaagaatgccagaaatctcttgatttcgttttggggtggtttgcgaaaccagtcttcattgacggagattacccagagagcatgaagaacaatttgtcatccattctgccggactttacggaatcagagaaaaagttcatcaagggtactgcagatttctttgcgttgtgcttcggaccaacactcagctttcagctgttggacccccacatgaaattcaggcagcttgagagtcctaatttgcgccaactgctgtcatggattgatcttgagttcaaccacccacagatattcattgtggagaacggttggttcgtgtcgggaaccaccaaacgggatgacgcaaagtatatgtattaccttaaaaagttcataatggagacactgaaagctatcaaacttgacggggtggatgtgattgggtacactgcctggtctctgatggatggcttcgagtggcacagagggtactctatccgacgtggactattttacgtcgactttctgagccaggacaaaatgctcttacccaagtcatctgctctgttttatcagaagttgattgagaagaatggctttcctcctctcccggagaatcagccactcgaggggacttttccttgtgattttgcctggggagtggtggacaactatattcaggtttctcaattgactaagccaatcagttctcttacgaagccctatcac

SEQ ID NO: 15199 - DNA, 1647 bp, synthetic construct; identical to SEQ ID NO: 15198
  misc_feature 1..1647: note = source = /note="Description of Artificial Sequence: Synthetic coding sequence"
  source 1..1647: mol_type = other DNA

SEQ ID NO: 15200 - DNA, 1647 bp, synthetic construct
  misc_feature 1..1647: note = source = /note="Description of Artificial Sequence: Synthetic coding sequence"
  source 1..1647: mol_type = other DNA
atgccagcgtcagctcccccgcggcgccctagaccgcctccaccgagcttgagcctgctgttggtactcctggggctcggcggtcggagactgagagcggaaccaggcgatggcgcacagacctgggcgcgcttttcccgccctccggccccagaagctgcaggactgttccaagggacgttcccggacggattcctctgggccgtcggctcggcggcctaccaaaccgagggaggctggcaacagcatggtaagggagcaagtatttgggatacctttactcaccacccacttgcaccgccgggggacagccgcaacgcctcactgcccctcggagcaccttcgccgctccaaccggcgacgggtgacgttgctagcgacagctacaataacgtgttccgggatactgaagcgctgcgcgaacttggagtgacccactaccggttctcgatcagctgggcccgggtccttcctaatggatctgcgggggtgccaaatcgcgaaggccttagatactaccggcggctcctcgaaaggcttcgggaactgggtgtccagccagtggtcactctgtaccactgggacctgccacaacggctgcaggacgcctacggcggatgggccaatcgcgccctggccgatcacttcagggattacgctgagctgtgtttccgccacttcggagggcaggtgaagtactggatcacgattgataatccgtacgtcgtggcgtggcatggctatgctaccggtagacttgcaccgggaatccgcggaagccctcgcctcggatacttggtcgcacacaacctcctcctcgctcacgccaaggtgtggcatctgtacaacactagtttcagaccaactcagggaggacaggtgtcaatcgccttgtcatcccactggatcaacccgcgtcgaatgactgaccatagcatcaaggaatgtcaaaagtccctggatttcgtgctgggctggttcgcaaaaccggtgtttattgacggcgattaccctgagtccatgaagaataacctgtcgtcgatactgccggactttactgagtctgagaaaaagttcatcaagggaaccgcagatttctttgcgctgtgttttggaccaacccttagcttccaattgctggacccacatatgaagttccgccagctggagtcaccaaacttgaggcagctcctctcctggatcgaccttgagttcaaccatccgcagatctttatcgtggaaaatggatggttcgtctcggggactacgaagcgcgatgatgcaaaatacatgtactatcttaagaaattcatcatggagactctgaaggcgattaagttggacggagtggatgtgatcgggtacaccgcctggagtctgatggacgggttcgaatggcatcggggatactcaatcagacgcggtctgttttacgtcgacttcctgtcccaggacaaaatgctgctgccaaaatcgtccgccttgttctaccagaagctcatcgaaaagaacggtttccccccgctgccggagaaccagcccctggagggaaccttcccgtgcgacttcgcctggggggtggtagataactatatccaagtgtcgcaactcaccaaacctattagctccctgacgaagccgtaccat

SEQ ID NO: 15201 - DNA, 1647 bp, synthetic construct; identical to SEQ ID NO: 15200
  misc_feature 1..1647: note = source = /note="Description of Artificial Sequence: Synthetic coding sequence"
  source 1..1647: mol_type = other DNA

SEQ ID NO: 15202 - DNA, 1647 bp, synthetic construct
  misc_feature 1..1647: note = source = /note="Description of Artificial Sequence: Synthetic coding sequence"
  source 1..1647: mol_type = other DNA
atgccagcctctgcacctcctagaagacctcgaccaccacctcctagcctgagcctactgctggtgctgctgggcctaggcggccgaaggctgagggcagagccaggcgacggcgctcaaacttgggcccgcttttcccgcccccctgctccagaggccgcagggttattccaaggcacctttcccgatgggtttctgtgggctgtggggagtgctgcataccagactgaaggtggatggcagcagcatggcaaaggggcaagcatttgggacacatttactcatcatcccctggcacctcccggcgatagtcggaacgcctccctgcccctgggggccccatctcccttgcagcctgccaccggtgacgtggcatcagattcatataataacgtgttccgggatactgaagccctgagggagctgggcgttactcactaccggttctctatctcctgggctcgggtactccccaatggctctgccggggtccctaaccgggagggcctgagatactatagaaggttactggagagactccgggagctcggagtgcagcccgtcgtcacactgtatcattgggacctacctcagcggctgcaggatgcctacggaggctgggccaacagggctctggctgaccattttagggactacgccgagctatgtttcaggcacttcggagggcaggtgaagtattggattaccatagataacccatacgtcgtcgcttggcacgggtacgctaccggacggctggccccaggcatccggggttctccacggttaggctatctagtggcccataacctgctgttagcccatgcaaaggtgtggcatctatacaatacaagcttcaggcctacccagggcggacaggttagcatcgctctctcctctcattggatcaaccctagaaggatgactgaccactctattaaagagtgccagaagtcactggatttcgtgctgggctggtttgccaaaccagtatttatcgatggcgactacccagaaagcatgaagaataatttaagtagcattctgccagacttcactgaatctgagaagaagtttattaaagggacagcagatttttttgcactgtgctttgggccaacactttcattccagctgctggacccccacatgaagttccgtcagctggagtctcctaatctgcggcagctcttgagctggatcgacctggagtttaaccatccccagattttcatagtggaaaacggttggttcgtgtctggtacaaccaagcgggacgacgccaagtacatgtactacctgaagaagttcatcatggagactctgaaagccatcaaactggatggagtggacgtgatcggctatactgcttggtctctgatggacgggttcgaatggcaccgcggctatagcatcagacgcggactcttctacgtcgactttctgtctcaggataagatgttactgcctaagtctagtgcactgttttatcagaagctgatcgagaagaacggctttcctccgctgccagagaaccaaccactcgagggcaccttcccttgcgatttcgcctggggagtggtggacaactacatccaggtgtctcagctgacaaagcctattagttctctgactaaaccttaccac

SEQ ID NO: 15203 - DNA, 1647 bp, synthetic construct; identical to SEQ ID NO: 15202
  misc_feature 1..1647: note = source = /note="Description of Artificial Sequence: Synthetic coding sequence"
  source 1..1647: mol_type = other DNA

SEQ ID NO: 15204 - DNA, 1647 bp, synthetic construct
  misc_feature 1..1647: note = source = /note="Description of Artificial Sequence: Synthetic coding sequence"
  source 1..1647: mol_type = other DNA
atgcctgctagcgctccacctagaaggcctaggccacctcccccctcactgagtttgctgctggttctcctcggacttggagggagaaggctgagggccgagcctggagacggggctcagacatgggccaggttttcccgccctccagcccccgaagcggccgggctgttccaagggaccttcccagatggttttctatgggcagtggggtctgctgcataccagaccgaaggcggctggcagcagcatggaaagggggcaagcatctgggatacctttacccaccacccactggcaccacccggcgatagccgtaacgcatcactgcccctgggagccccaagccctcttcagccggcaactggtgatgtggcctcagacagctacaacaacgtcttcagagatactgaagctcttagggagttgggtgtgacccattatcgctttagtatcagttgggctcgggtcctccccaacggaagcgcaggagtgccaaatcgcgagggcctgagatactaccgtaggctgctggagagacttcgggaactgggggtccagcctgttgtcacactgtatcactgggatctgccccagcgcctgcaagacgcctacggcggctgggccaacagggctcttgccgatcattttcgggattacgctgagctgtgcttccggcatttcggaggccaggtcaagtattggatcacaattgataacccatacgtggtggcatggcatggttacgctaccggcagactggctccgggaatcagaggctcgcccagactcggatatcttgtagcccacaatctcctgctggctcatgccaaagtgtggcatctctacaatacgagcttccgtcccacccaaggcggccaggtgagcatcgcactgtcaagtcattggataaaccccagaaggatgactgaccatagcatcaaagagtgccagaagagcttggattttgtgctgggctggtttgccaagcctgtctttattgatggtgactacccagaaagcatgaagaacaatctgagctctattctgcctgattttaccgaatctgagaaaaaattcatcaaaggcacagccgatttcttcgcattgtgcttcggccctactttgtccttccaactcctcgatcctcacatgaagtttaggcaactggagtcccccaatctgcgccagcttctctcttggatcgacttggaattcaaccacccacagatatttattgtcgaaaacggctggtttgtgagcggaacaactaagcgggatgacgcaaaatatatgtactatcttaagaagttcatcatggaaaccttaaaagcgattaaactggatggcgtagacgtgatcggttacaccgcctggtccttaatggatgggttcgagtggcatcgtggttacagcatccgcagagggctgttttatgttgactttcttagtcaggataagatgctgttgcctaagtctagcgctctcttctaccagaagctcatagagaaaaacggattcccaccgttgcccgagaaccagcctttggagggcacgtttccttgtgatttcgcctggggcgtagtcgataactacatacaggtgagccagttgacaaaaccaatctctagcttgactaaaccctaccac

SEQ ID NO: 15205 - DNA, 1647 bp, synthetic construct; identical to SEQ ID NO: 15204
  misc_feature 1..1647: note = source = /note="Description of Artificial Sequence: Synthetic coding sequence"
  source 1..1647: mol_type = other DNA

SEQ ID NO: 15206 - DNA, 1647 bp, synthetic construct
  misc_feature 1..1647: note = source = /note="Description of Artificial Sequence: Synthetic coding sequence"
  source 1..1647: mol_type = other DNA
atgcccgcttccgcgcctccgcgccgcccgcggccacccccaccgtctctgtcgctcttgctggtgctgctgggcctcggtggtcgtagactgcgggcggagccaggcgatggtgcgcaaacttgggcccggttctcccgcccacccgcgcctgaggctgccggcctctttcaggggaccttccccgacggattcctgtgggccgtgggttcggcggcgtatcaaacggaaggtggatggcagcagcatggaaaaggcgcttctatctgggataccttcacccaccatccactcgccccgccgggcgacagccgcaatgcctcgctcccgctcggagcccctagcccacttcaaccggccactggtgacgtggcctctgactcctacaataacgtctttcgggataccgaagccttgcgcgaacttggagtgacccattatagatttagcatctcctgggcacgcgtgctgccgaatggttcagcaggagttcctaacagagaaggactgcgctactatcggaggctccttgaaaggttgagagagctcggggtgcagccggtcgtcaccctctaccactgggatctgcctcaacggctgcaggatgcatacggaggatgggctaatcgcgccctggccgaccactttagagactacgccgaactgtgttttaggcacttcggaggacaagtcaagtactggatcaccatcgataatccgtacgtcgtggcatggcacggatacgccactggaaggctcgcaccgggaatacggggaagccctagactcggatacctcgtggcccataaccttctcctcgcgcacgcgaaagtctggcacttgtacaacacctcattccggcctacccagggcggtcaagtgtctattgcactgtcgagccattggatcaatccgcggcgcatgaccgatcactctatcaaagaatgccagaagtccctggacttcgtccttggatggttcgctaagccggtgtttatcgacggagattacccggagagcatgaaaaacaatttgtcgtccatcctcccggactttaccgaatccgaaaagaagttcataaagggtactgcggacttcttcgcgctttgttttgggccaactcttagcttccaactcctggatccccacatgaagttccgccaactggaatcgccaaacctgcggcagctgctgtcatggatcgatttggaattcaaccacccccagattttcatcgtggagaacggatggttcgtgtcaggaactactaagagggacgatgcgaaatacatgtactaccttaagaaattcatcatggagacgctgaaggctattaagctggatggagtggacgtgatcggctacactgcctggtcgctgatggatgggttcgagtggcatcgcggatactccattaggagagggctgttctatgttgacttcctctcacaggacaagatgctcctgccgaaaagcagcgcccttttctatcaaaaactgatcgagaagaacggattccctcccctgccagaaaaccagcccctcgagggcacgtttccatgtgactttgcatggggagtggtagacaactacatccaggtgtcccagcttactaagcccatctcatcgctcacgaagccctaccac

SEQ ID NO: 15207 - DNA, 1647 bp, synthetic construct; identical to SEQ ID NO: 15206
  misc_feature 1..1647: note = source = /note="Description of Artificial Sequence: Synthetic coding sequence"
  source 1..1647: mol_type = other DNA

SEQ ID NO: 15208 - DNA, 1647 bp, synthetic construct
  misc_feature 1..1647: note = source = /note="Description of Artificial Sequence: Synthetic coding sequence"
  source 1..1647: mol_type = other DNA
atgcccgcctctgcaccgccaaggcgtcctcgcccaccccctccctctttatccctgctgctggtgctgctggggctgggcggccgacgactcagggccgaacctggggatggcgctcagacatgggctaggttcagtagaccccctgcgcccgaggccgctggcctgttccagggcacatttccagacgggtttttatgggccgtgggctcagccgcataccagacagaggggggatggcagcagcatggtaaaggagcatcaatttgggatacctttactcaccatcctttagccccacctggggattctagaaatgctagtctgcccctgggagcccccagtcctttacagcccgccacaggcgacgtggcttccgactcatacaacaacgtttttcgggacacagaggctctgcgtgagcttggggtgacccactatcggttttctatttcatgggctcgagtgctccctaatggctccgctggcgtgccaaaccgggagggtttgcgctactaccggaggctgctcgagaggctccgggagctcggagtacagcctgtggtgaccctgtaccattgggatttacctcagcggctacaggatgcctacggaggctgggcgaatcgggcattggctgatcacttccgggactatgctgagttgtgcttcaggcattttggtggacaggtgaagtattggatcactattgataatccatatgttgttgcatggcatggctatgcgaccggtaggctcgccccaggtattcgcggatccccacgactgggttatctcgtggctcataacctcttgcttgcccacgccaaggtatggcacctttataacacctccttccgcccaacccaggggggacaagtaagcatcgccttatctagtcactggataaacccaaggcgtatgaccgatcattccattaaggaatgtcaaaagtccttggacttcgtgctggggtggtttgccaagcctgtgttcattgacggcgattaccccgaatctatgaagaataatctgagttctattctccctgatttcaccgagagcgaaaaaaaatttattaaaggcacagctgactttttcgctctgtgcttcgggcccaccttgtcgtttcagctgctggacccacatatgaaattccgacagctggagtcacccaacctgaggcagcttctgtcttggatagatctagagttcaaccatccccagatatttatcgtggaaaacggctggttcgtcagtggtaccacgaagcgggatgacgctaaatacatgtactatttaaaaaagttcattatggaaacccttaaggcaatcaagcttgatggcgtcgatgtaataggatatactgcttggtccctgatggatggttttgagtggcatcgagggtatagcatcaggcgaggccttttctacgttgactttctcagccaggacaaaatgctgttaccaaaatccagcgcactgttctaccaaaaactcatcgagaagaacggcttccctcccctgcccgagaaccagccgctggagggcaccttcccctgcgattttgcctggggcgttgtggataactatattcaggtgagccagctgaccaagcctatctccagtttgaccaagccctatcac

SEQ ID NO: 15209 - DNA, 1647 bp, synthetic construct; identical to SEQ ID NO: 15208
  misc_feature 1..1647: note = source = /note="Description of Artificial Sequence: Synthetic coding sequence"
  source 1..1647: mol_type = other DNA

SEQ ID NO: 15210 - DNA, 1647 bp, synthetic construct
  misc_feature 1..1647: note = source = /note="Description of Artificial Sequence: Synthetic coding sequence"
  source 1..1647: mol_type = other DNA
atgcccgcaagcgcaccccctaggcggccccggcccccccctccgagcctgagcctcttactggtgctcctgggcttgggtggcagaagactcagagcagagcctggtgacggagcccaaacatgggccagattctcacggccacctgcacctgaggccgccggcctattccagggaacatttcctgacggcttcctgtgggccgtgggcagcgctgcttaccaaactgagggcggctggcagcagcatggcaagggagccagcatctgggatacctttacccatcacccactggctcctccgggcgattctcggaacgcctccttgccccttggagcaccatctcccctccagcctgcaaccggggatgtggccagtgacagttataataacgtttttagagataccgaggcactgcgggaacttggggttacccactaccgcttttcgatcagctgggccagggtcctaccgaacggatctgccggggtgcccaacagagaagggctgcggtactatcggcgcctgctggagcgcctccgcgaattgggggtgcagcccgtcgtgaccctctatcactgggacttgcctcagcgtctgcaggacgcctacgggggatgggctaatcgcgctttggccgaccattttcgagactacgcggaattatgcttccgccactttggaggccaggtgaagtattggattacaattgacaacccgtacgtggtggcttggcacggatacgctacaggccgcctcgcccccggcattagagggagcccacggttgggatacctcgtggcccacaatttgctattggctcatgcaaaagtctggcatctctataacacttctttcagaccaacacagggagggcaggttagtatcgccctcagcagccattggataaaccccaggcggatgactgatcattctatcaaagagtgtcaaaaatctcttgattttgtattgggctggttcgccaagccggttttcatagacggggactatcccgaatctatgaagaacaacctgtctagtatcctgccagattttacggaatccgagaagaagtttatcaaggggactgcagactttttcgctctttgttttggccctacactcagttttcaacttctggacccgcacatgaagtttcgccagttggagtctcctaatctgcggcaactgctgagttggatagatctggagttcaaccacccccagatcttcatcgtggagaacgggtggtttgtgtccggtacaacaaagagggatgatgccaagtatatgtactatctgaaaaagttcattatggagacactgaaagcgatcaagctagacggagtggatgtgatagggtacaccgcttggtcattgatggacggcttcgagtggcacaggggatattccatacgccgtggactgttttacgtcgatttccttagccaagacaaaatgctcctcccaaaatcctcagccctgttttaccagaaacttatcgagaagaacggattcccccccttgcctgaaaaccagcctctggagggcactttcccctgtgattttgcatggggcgtggtggataattacattcaggtcagccagctcacaaagcctatctcatctctcactaaaccttaccat

SEQ ID NO: 15211 - DNA, 1647 bp, synthetic construct; identical to SEQ ID NO: 15210
  misc_feature 1..1647: note = source = /note="Description of Artificial Sequence: Synthetic coding sequence"
  source 1..1647: mol_type = other DNA

SEQ ID NO: 15212 - DNA, 1647 bp, synthetic construct
  misc_feature 1..1647: note = source = /note="Description of Artificial Sequence: Synthetic coding sequence"
  source 1..1647: mol_type = other DNA
atgcctgcatcggccccgcccagacgcccacggccaccacctccttccctgagcctgcttcttgttcttctgggcctgggaggacgccgactgcgggcagaaccgggagatggtgcacagacttgggcacgatttagcagaccacctgctcccgaggctgccggtcttttccagggcaccttcccagacgggttcctgtgggccgtgggttccgcagcctaccaaaccgaaggtggatggcagcaacacggtaagggcgccagcatttgggatactttcacccatcatcccctcgcccctccaggagattcgcgaaatgcaagcctgcccctgggagccccttcgccgctccagcctgccactggagacgtggcgagcgattcgtacaataatgtgtttcgtgacaccgaagcacttcgcgaactgggagtgacccactaccgcttttcgatctcgtgggcgcgagtgcttcctaacggttcagccggcgtcccaaatagagaaggactgagatactaccgcagacttcttgaaagactgcgcgaacttggtgtgcagccagttgtgaccctgtaccactgggacttgcctcaacggcttcaggacgcctacggaggttgggcaaaccgcgcactggcagatcactttagagattacgccgaactttgcttcagacatttcggcggacaagtgaagtactggattaccattgacaatccctacgtcgtcgcatggcatggatacgcaaccggtaggctggctcctggtataaggggttccccacggcttggatacctggtcgcacacaatcttctccttgcacatgcgaaagtgtggcacctctacaatacctcatttcgtcccacccagggaggtcaagtgagcattgcactgtcgtcgcattggataaatcctcgaagaatgaccgatcactcaatcaaggaatgtcaaaagtcattggatttcgtcctgggttggttcgcgaagcctgtgtttatagatggcgattaccctgaatccatgaagaataatctctcgtccattctgcctgactttaccgaatctgagaagaagttcattaaaggcacggccgacttctttgcactttgcttcgggcctaccctgtcctttcaacttctcgaccctcatatgaagtttcggcaactggaatcgccgaacctccggcagcttctctcgtggatcgatcttgagtttaaccatcctcaaatctttattgtggagaatgggtggtttgtgtcgggaacgactaagcgcgatgatgctaagtatatgtactacctgaaaaagttcattatggaaacgctcaaggctatcaaattggacggcgtggacgtgattggatacaccgcatggtccctgatggatggatttgaatggcaccggggatatagcatccgtagaggcctgttttacgtggatttcttgagccaggacaaaatgctgcttcctaagtcaagcgctcttttctaccaaaaactcatcgaaaagaatgggtttccaccactccctgaaaaccaacccctcgaaggtacgtttccctgtgattttgcgtggggcgtggtggataactatattcaagtctcccaactgactaaaccaattagctcattgacgaagccttaccac

SEQ ID NO: 15213 - DNA, 1647 bp, synthetic construct; identical to SEQ ID NO: 15212
  misc_feature 1..1647: note = source = /note="Description of Artificial Sequence: Synthetic coding sequence"
  source 1..1647: mol_type = other DNA

SEQ ID NO: 15214 - DNA, 1647 bp, synthetic construct
  misc_feature 1..1647: note = source = /note="Description of Artificial Sequence: Synthetic coding sequence"
  source 1..1647: mol_type = other DNA
atgccagcatccgcaccaccgagaaggccacgtcctccacctccatccctcagcctccttttggtcctcctggggctgggtggacgacgcctgagagcggaaccaggagatggagcccagacttgggctcgctttagccggccaccggccccagaggccgcgggactcttccagggtacttttccagacggttttctgtgggccgtcggttcagcagcataccaaaccgaaggaggatggcaacagcatggaaaaggggcctcaatttgggataccttcacccatcatccattggcaccaccaggtgatagccggaacgcttcgctcccactgggggccccttcgcctcttcaaccggcaaccggggacgtggcgagcgattcgtacaacaacgtgtttcgggatactgaggcactccgagagctcggcgtcactcattaccgattctcgatcagctgggcaagggtgctgcctaacggtagcgcaggtgtgcccaatcgggaaggacttcgctactaccggagacttctggagaggctgcgggaacttggagtgcagccagtggttaccctttaccactgggatcttcctcaacgactgcaagacgcctatggaggatgggccaacagggctctcgcggatcactttagagattacgccgagctttgttttcggcactttggaggccaagtgaagtactggatcactatagataatccctacgtggtggcgtggcatggatacgctactggacgtctggcaccgggaattaggggatcgccgcgactcggttacctcgtcgcacataacctccttctcgcccatgcaaaagtctggcatctgtacaatacctcgtttcgacctacccaagggggccaagtctcaattgctctttcaagccactggattaatccgcgtcgaatgaccgaccattcgattaaagaatgtcaaaagtccctcgattttgtgctgggatggttcgcaaagccagtgtttatagacggagattaccctgaatccatgaagaataacctgagttccatccttcctgattttaccgagagcgaaaagaagtttatcaagggcaccgcagatttctttgccctgtgttttggtccaactctgagctttcaactgctggatcctcatatgaagtttagacagctggaatcacctaacctccgccaattgctgtcgtggattgatctggaattcaaccatccacagattttcattgttgaaaacgggtggttcgtctccggaaccacgaagcgagacgatgcaaaatacatgtactacctcaagaaattcattatggaaacgctcaaggctatcaaacttgatggtgtggatgtgatcggatacaccgcatggtcgcttatggatggctttgaatggcatagaggatacagcattcggagaggcctcttttacgtcgattttctctcccaggataagatgctgctgccaaagtcatccgcacttttctaccagaaacttatcgagaagaatggatttcctcctctgccggagaaccagccccttgaaggtactttcccatgtgacttcgcatggggggtggtggataactacattcaggtgtcacagttgaccaagcctatttcgtcgcttactaagccctaccat

SEQ ID NO: 15215 - DNA, 1647 bp, synthetic construct; identical to SEQ ID NO: 15214
  misc_feature 1..1647: note = source = /note="Description of Artificial Sequence: Synthetic coding sequence"
  source 1..1647: mol_type = other DNA

SEQ ID NO: 15216 - DNA, 1647 bp, synthetic construct
  misc_feature 1..1647: note = source = /note="Description of Artificial Sequence: Synthetic coding sequence"
  source 1..1647: mol_type = other DNA
atgccggcctcggctccgcctcgtagaccgaggccgccacctccttcactttctttgttattggttctgttgggactcggaggccgaagattacgagccgaaccaggggacggggctcagacctgggcgagattcagcaggccgcctgctccagaagctgccggactctttcagggaacctttcccgatgggttcctgtgggctgtaggttccgctgcttatcagaccgaaggcggctggcagcaacatggcaagggggcctccatctgggataccttcacacatcatccgttagcaccccccggtgatagcaggaacgcttctctgccactcggagctccatccccattgcagccagccacgggggacgttgcctcggattcatacaataacgtgttccgggacaccgaagccctgagggaactcggagtcacacactatcgattctctatctcatgggcccgggtgctacctaacggcagcgccggagtgcccaaccgagagggactgagatattatagacgattgctggaaagattgagggaactgggcgtacagcctgttgtaacgctctaccattgggacctcccacagagactgcaggacgcatatggcggctgggcgaaccgagcattagccgaccactttagggactacgctgagctatgcttccgacacttcggcggacaggttaaatattggattacaatcgacaacccctacgtcgtggcctggcatggctatgccacggggcgactcgccccaggcatccgcggcagtccaaggctgggctatttagtggcccataatctgctgctggcacacgcaaaagtatggcatttgtacaatacctcattccgacctactcagggcgggcaggtgtcgatcgccttgtcaagccattggattaaccctagacgaatgactgaccacagtattaaggaatgccagaagagtcttgacttcgtcttgggatggttcgcaaagcctgtattcattgatggtgactaccctgagtctatgaaaaacaatctgagtagcatattgccagacttcaccgagtcagaaaagaaattcatcaagggaacggccgacttctttgccttgtgctttgggcccacactgagcttccagctacttgacccacacatgaaatttaggcagctggagtcaccgaacctgcgccagctgctcagctggatcgatttggagttcaaccacccacagatctttatcgtggagaatggttggttcgtgtccggaaccacaaagagagatgacgccaagtacatgtattatctgaaaaaatttatcatggaaaccttgaaagctattaaacttgacggagtagatgtgatcgggtacacggcatggtccctgatggacggcttcgagtggcataggggatactctataaggagaggattgttctatgtcgactttttgagccaggacaaaatgctgcttcccaagagcagtgctttattttaccagaagctgattgaaaagaacggatttcctcccctgcctgaaaaccagcctctcgaagggacgttcccatgcgactttgcctggggggtggtagataattatattcaggtttcccagcttacaaagcctatttcttctctgaccaagccctaccat

SEQ ID NO: 15217 - DNA, 1647 bp, synthetic construct; identical to SEQ ID NO: 15216
  misc_feature 1..1647: note = source = /note="Description of Artificial Sequence: Synthetic coding sequence"
  source 1..1647: mol_type = other DNA

SEQ ID NO: 15218 - DNA, 1647 bp, synthetic construct
  misc_feature 1..1647: note = source = /note="Description of Artificial Sequence: Synthetic coding sequence"
  source 1..1647: mol_type = other DNA
atgcctgcgtcggcccccccgcgtaggccaagaccaccgcccccctctcttagcttgttgctcgtgctgttgggcctcggtggacgccgcctcagagccgagcctggggatggcgcccagacctgggctcgcttttctcggccgcccgcccccgaggctgctgggttgttccaaggaacattcccggatggtttcctatgggcagtcggctctgcggcataccagaccgaaggaggttggcaacaacacggtaaaggtgcttccatctgggataccttcacgcaccatcccctagctcctcccggtgattcgcgtaacgcctccctgcccctgggtgctccctcccctctgcagcccgccacgggggatgtcgcctcggatagctacaacaacgtgtttcgggacaccgaagctctccgtgagctaggcgttacccactaccggttctcaatttcctgggcccgtgtcctgcccaacggatccgcgggtgtgccaaatcgcgaaggtctgcgttattaccgacgtctcctggagcgattgcgtgagcttggagtgcagcccgtggtcactctgtatcactgggacctaccgcagagactccaggacgcctacggcggctgggccaaccgtgctctggcggaccacttccgggactacgcggagctctgcttccgccatttcggaggacaggtcaagtactggattaccattgacaacccttacgtcgtcgcctggcatggttatgctaccggccggctggcccccggtatccggggttctcccaggcttgggtacctggtggcgcacaacctgctcctagcccacgctaaggtctggcacctctacaatacatctttccgccccacccagggcggccaggtttccatcgctctcagcagtcactggattaacccacgacggatgactgaccactctatcaaggagtgccagaaatccctggatttcgttctcggctggtttgccaagccagtctttattgatggtgattaccccgagtccatgaaaaacaacctctcgagcatcctgcccgacttcacggagtccgagaagaagttcatcaagggtactgctgacttctttgccttgtgtttcggacctaccttgtctttccagctccttgacccccacatgaagtttcgccaactcgagagtcctaacttgcgtcagttgctatcctggatcgacctcgagtttaaccatccgcagatttttattgtcgagaacggttggttcgtctcaggtaccaccaagagggacgacgccaagtacatgtactacctgaagaaattcattatggagacgcttaaggccattaagctcgatggtgtcgatgtcatcggctacacagcttggtcccttatggatgggttcgagtggcaccgcggttactctattcgaagaggtctcttttacgtcgatttcctctcccaggataagatgctcttgcctaagtcttcagccctgttctaccagaagctaatcgaaaagaacggatttccacccttgcccgagaatcaacccctggaaggtaccttcccgtgcgatttcgcctggggtgtcgtcgacaactacatccaggtcagccagcttactaagcctatctctagccttactaagccctaccac

SEQ ID NO: 15219 - DNA, 1647 bp, synthetic construct; identical to SEQ ID NO: 15218
  misc_feature 1..1647: note = source = /note="Description of Artificial Sequence: Synthetic coding sequence"
  source 1..1647: mol_type = other DNA

SEQ ID NO: 15220 - DNA, 1647 bp, synthetic construct
  misc_feature 1..1647: note = source = /note="Description of Artificial Sequence: Synthetic coding sequence"
  source 1..1647: mol_type = other DNA
atgcctgcgtccgccccaccaagacgaccccgcccgccccctccgagcctgtccttgctactggtcttgctcggtctagggggccgtagactccgagcagaaccaggggatggagcccaaacatgggcaagattcagccgacctcccgccccagaggcagcgggtctattccagggaaccttccccgatggcttcctttgggctgtcggctctgccgcgtatcagacagaaggcggatggcagcagcacggcaagggcgcgtctatttgggataccttcacacaccatccgctcgccccaccaggcgatagccgcaacgcaagcctgccattgggtgcccctagtcccctgcagcccgcaacaggtgatgtggcctcggatagctataataatgtattcagagacaccgaggccctgcgagaactgggagtgacccactaccgctttagcatttcgtgggccagagtattacccaacggtagtgcgggagtgcccaatcgcgaggggctgcgatactatcgccggctgctagaacgactccgcgagctaggtgtacagcctgtggtgaccctctaccattgggacttgccacagcggctccaagacgcttatggcggatgggctaacagagccctcgccgaccatttcagggactatgcagaactttgtttccgccattttgggggccaggtgaaatattggatcacgattgacaatccgtacgtagtggcatggcacggatatgcaaccggccggctcgccccaggtatccgggggagtcctcgactggggtatctggtcgcacataatctcttgctagctcatgctaaggtgtggcacctgtataatacgtcctttaggccgacccaaggtgggcaggtgtctatagcgctctcctctcactggatcaatcctcgtagaatgaccgatcatagtatcaaggagtgccaaaagagtctcgattttgtgctcggctggttcgctaaaccggtgttcatagacggggattatcccgagtctatgaagaataatctctcttctatcctgccagactttacagagtctgagaaaaagtttatcaaaggtaccgctgactttttcgctctctgcttcggacccactttaagctttcagctgctagacccccacatgaaattccgccagcttgagagtccgaacctgcggcaacttttgagctggatagacttagagtttaaccatccacagatttttatagtcgagaacgggtggtttgtgagcggaaccacaaaacgagacgacgccaagtacatgtattacctaaagaaatttatcatggaaacactgaaagcgattaaactcgacggtgtagacgttatcggttacacagcatggagtctgatggacggcttcgaatggcacagaggctattccatccgccggggtcttttctacgtggacttcctctcccaggacaaaatgctgctccccaagtcaagtgccctcttctatcagaagctgatcgaaaaaaacggattcccccccttgcccgaaaaccagcccctggagggcacgtttccttgtgactttgcgtggggagtggtggacaactacattcaggtttcgcagctgaccaagcctatttctagcttgacgaagccataccac

SEQ ID NO: 15221 - DNA, 1647 bp, synthetic construct; identical to SEQ ID NO: 15220
  misc_feature 1..1647: note = source = /note="Description of Artificial Sequence: Synthetic coding sequence"
  source 1..1647: mol_type = other DNA

SEQ ID NO: 15222 - DNA, 1647 bp, synthetic construct
  misc_feature 1..1647: note = source = /note="Description of Artificial Sequence: Synthetic coding sequence"
  source 1..1647: mol_type = other DNA
atgcctgcaagcgcccctcccaggaggcctcgacctcctcctccaagtttatcacttctgttggtgcttttgggtttgggtgggcgccgactgcgagctgaaccaggagatggtgcacaaacttgggcaaggttcagtagaccccctgctcctgaggctgctggtctctttcaagggacctttcccgatggctttttgtgggcagttgggtcagcagcatatcaaactgaaggaggatggcagcagcatggcaagggtgctagtatctgggacacatttacccatcatcctttggcccctcccggtgatagtcgtaatgcatctttaccattgggagctccaagtcctctgcaaccggctacgggggatgttgccagcgattcttacaataatgtatttcgtgatacagaagcacttcgagaattgggagttactcattatcgtttctcgatcagttgggctcgagttctcccaaatgggtccgcaggagtcccaaaccgtgaaggactcagatactacaggagactcctcgagaggctccgggagttgggcgtccagcccgtggtcaccctgtatcattgggatttgccccagaggctacaagatgcatatggaggttgggcaaatcgcgcactagctgatcacttcagagattacgctgaactctgctttaggcattttgggggacaggtgaagtactggattactatcgacaacccatacgtggttgcatggcatggttatgccacaggaagacttgcccccggcattagaggttcgcccaggctcggttatctagtagctcataatcttctgttggctcatgcgaaagtgtggcacttatacaatacttcattcaggcccacccaaggaggacaggtctcaatcgccctttcttcccactggatcaacccaaggaggatgaccgaccactctattaaggaatgtcaaaagtcattggatttcgtactagggtggttcgccaagcccgtttttatcgacggagactacccagagtccatgaagaacaacctgtcatctatcttgcctgatttcaccgagagtgagaaaaagttcattaagggtacagctgatttctttgccctttgtttcggtcccacattgtcatttcagcttttggatcctcatatgaagtttagacagcttgaaagccctaacctgaggcagctcttgagctggatcgatctggagttcaaccaccctcaaatatttatagttgaaaacggttggttcgtatctggaactacgaaacgtgatgacgcaaaatacatgtactatctcaaaaaattcattatggagactttaaaggcaataaaactagatggagttgatgtaattggttataccgcttggtccctgatggatggattcgagtggcatagaggctactccattcgtcggggtttgttctacgttgacttcctttcgcaagataaaatgttgctccctaaatcaagcgcactcttttatcagaaattgattgagaaaaatggatttcctcctcttcctgaaaatcaacctctggaagggacttttccttgtgatttcgcttggggcgttgttgacaattacatccaagtttctcagttaacgaagcctatctcatctctgacaaaaccctatcac

SEQ ID NO: 15223 - DNA, 1647 bp, synthetic construct; identical to SEQ ID NO: 15222
  misc_feature 1..1647: note = source = /note="Description of Artificial Sequence: Synthetic coding sequence"
  source 1..1647: mol_type = other DNA

SEQ ID NO: 15224 - DNA, 1647 bp, synthetic construct
  misc_feature 1..1647: note = source = /note="Description of Artificial Sequence: Synthetic coding sequence"
  source 1..1647: mol_type = other DNA
atgccggcttcagctccgccgcgacggcctagacccccaccgccgtcattgtctcttcttcttgtgctcctgggattaggtggacggagactgcgtgcagaaccgggtgatggcgcacagacatgggctcgcttttcccggccgccagccccggaagctgctggtttatttcaggggacgttcccggatggctttttatgggctgtaggtagcgctgcataccaaactgaaggagggtggcaacaacacggcaagggcgcgagcatctgggatacatttacacaccatccacttgcgcccccgggtgattcgaggaatgcgtctctacccttgggggcgccctcaccgttacagccagccacaggggacgtcgcttctgacagttacaataatgtttttcgagacactgaagcgctgagagaattaggcgtcactcattaccgctttagtatcagctgggcacgtgtccttccaaatggtagcgctggcgttccgaatcgggaaggcttaagatactataggagacttctggaacgtctgcgggaattgggcgttcaaccggtagttacattgtatcattgggacttaccccaacggctgcaagatgcttacgggggctgggcgaatagagccttggcagaccatttccgggattatgcggagctttgcttcagacattttggaggacaggtgaagtactggattactatagataatccgtatgtagtagcttggcatgggtatgccaccgggcgtttggcccctggaattaggggctctccgaggttaggatatttggtcgcccataatcttttgcttgcgcacgcaaaagtgtggcatttgtataacacatcgtttcgtcctacgcaaggaggtcaggtttccattgcattatcctcacattggatcaacccgcgacgcatgacggatcattcaatcaaagaatgtcagaagagtcttgacttcgtgttaggttggttcgcaaaaccggtgtttatcgatggggattatccggaaagcatgaaaaataatctgtcgtcaattctgcctgactttacggagtccgagaaaaaatttattaaaggcacagcagatttctttgctctgtgctttggtccgacacttagctttcagttattggatcctcatatgaagtttagacagctggagtcgccaaaccttcgacagctattgtcatggatagacctcgaattcaatcatccccagattttcatcgtcgaaaacgggtggttcgtatcaggaaccacaaaacgcgatgatgcaaaatatatgtactatcttaaaaaattcattatggagacattaaaagccataaagttggatggcgtagacgtaattggctatacggcatggagcctgatggatggttttgaatggcatcgtggttactctattcgtagaggactgttttatgtagattttttgagccaagataaaatgcttctccctaaaagctccgccttattttaccaaaaattaatcgagaaaaatggctttcctcctcttcctgaaaatcagccgttagaaggaacatttccatgtgattttgcttggggtgttgttgataattatattcaggtaagccagttgacgaagccgataagctcattaaccaagccatatcat

SEQ ID NO: 15225 - DNA, 1647 bp, synthetic construct; identical to SEQ ID NO: 15224
  misc_feature 1..1647: note = source = /note="Description of Artificial Sequence: Synthetic coding sequence"
  source 1..1647: mol_type = other DNA

SEQ ID NO: 15226 - DNA, 1647 bp, synthetic construct
  misc_feature 1..1647: note = source = /note="Description of Artificial Sequence: Synthetic coding sequence"
  source 1..1647: mol_type = other DNA
atgcccgcatctgcacctccaaggcgccctcgacctccgccccccagcctgtctctgcttcttgtcttgctgggcctgggaggtaggcgcctgagggctgaacccggtgatggagctcagacttgggcccgcttttcgcggccccctgcgcctgaggccgcaggcctattccaggggactttccccgatggattcctgtgggctgtcggcagcgcagcctatcagactgagggggggtggcagcagcacgggaagggcgcaagtatatgggacaccttcacgcaccacccactagctcctcctggcgactctagaaacgctagcttgccccttggcgctccctcccccctgcagccagcaacaggcgatgtggccagcgatagctacaacaacgtattcagggatacagaggcactgcgcgagttgggagtgactcactatcgcttttctatttcctgggctcgtgtgctcccgaacggtagtgctggggtccccaacagagaaggcctgcggtactatagaagattgctcgaacgactcagagagctaggcgtgcagcctgtggttacactataccactgggacctaccccagcggctgcaggacgcttacgggggttgggccaatcgggcactggccgatcatttcagggactatgcagaactttgttttcgacacttcggaggccaagtgaagtattggatcaccatcgataatccctatgtcgttgcctggcatggctacgccactggccgattagctcccggaattcgcggttcgcccaggctgggctatctggtcgcgcataacttgttgctggcacacgctaaagtgtggcacctctacaacacaagcttccgtccaacccagggcggccaagtgagtatcgcattgagttctcattggataaaccctcggagaatgactgaccattcaataaaggagtgccagaagagtttggacttcgtgctgggatggttcgccaaaccggtcttcatcgacggagactatcctgaaagcatgaaaaacaatttatctagcatcctccctgactttacggagagcgagaaaaaattcatcaagggcacggcagatttttttgctctttgcttcgggccaaccctcagcttccagctcttggaccctcacatgaagttcagacagctcgaatcgcctaatctgcgtcagctgctgtcttggatcgacctggaatttaaccacccgcagatattcattgttgagaacggatggttcgtgtccggtactactaaacgggatgacgctaagtatatgtattacctaaaaaaatttatcatggaaacactgaaggctattaagttggacggggtggatgttatagggtatactgcttggagcctgatggacggattcgagtggcataggggttatagcatccggcgagggctgttttacgtggacttcctgtcacaggacaaaatgcttctgcccaaatcttctgccttattttaccaaaaactcattgagaagaacggatttcccccacttcctgagaaccaacccctggaggggacttttccctgcgatttcgcatggggcgtcgtggacaattatatccaggtgagtcagctaacaaagcctatttcatctctgaccaagccctatcac

SEQ ID NO: 15227 - DNA, 1647 bp, synthetic construct; identical to SEQ ID NO: 15226
  misc_feature 1..1647: note = source = /note="Description of Artificial Sequence: Synthetic coding sequence"
  source 1..1647: mol_type = other DNA

SEQ ID NO: 15228 - DNA, 1647 bp, synthetic construct
  misc_feature 1..1647: note = source = /note="Description of Artificial Sequence: Synthetic coding sequence"
  source 1..1647: mol_type = other DNA
atgcctgcttccgcgcctccaaggaggcccaggcccccacccccatcactctcattgctcctcgtactgctgggcctcggcggcagaaggttgcgcgcagaacccggagatggtgctcagacctgggctaggttttccaggcctcccgctcccgaagccgctggactgttccaaggcacatttcccgacggctttctgtgggctgtgggatctgcggcatatcagactgaaggaggttggcaacagcacggcaagggagcctcaatctgggatacgtttactcatcatccacttgcgcccccgggcgactctaggaacgctagtcttccactgggcgcccctagccctctgcaacccgcaacaggcgacgtcgctagcgattcctacaacaacgtgtttcgcgataccgaggctctgagagagcttggcgtgacacactacaggttcagtatatcctgggcgcgcgtactgccgaatggttcagcaggcgtgcccaatagggaaggcctgagatattatcgccgccttctcgaaaggctgcgcgaactgggcgtgcaacctgtcgtgacactgtatcattgggacctccctcagaggctccaagatgcatacggtggttgggcaaacagagctctcgcagaccacttccgcgattatgcagagctctgtttcagacactttggaggtcaggtcaaatattggatcactatagacaacccttatgtggtcgcttggcacggttacgctacaggccgcctcgcgcctggaatcagaggttctcccagacttggctacctcgtggctcataacttgctgttggcgcatgccaaagtgtggcacttgtacaatacttccttccgcccgacacagggcggccaggtctctatcgccctctcctctcattggatcaatcccaggcgcatgacagatcactctattaaagaatgtcagaaaagcctggatttcgttctgggctggttcgctaagccggtctttatcgacggagattacccggaatcaatgaagaacaatttgagttccatcttgcccgacttcaccgagtccgaaaagaagttcatcaagggtacagcagacttcttcgcactgtgctttggacctaccctctctttccagctcctggatccccatatgaaatttaggcagctcgagtcccccaacttgagacagttgctcagttggattgacctggagttcaaccaccctcagatcttcattgttgaaaacggatggttcgtgagcggaaccactaagagagacgacgctaagtatatgtactatctgaagaagttcattatggagaccttgaaagccatcaaacttgacggtgtggatgtcattggctatactgcttggtctctgatggatggctttgaatggcaccgcggatactccatcaggagaggccttttctacgttgactttctgagtcaggacaaaatgctgctgcccaagagctctgctctgttctatcagaaactgatcgagaaaaatggatttccaccactgcccgagaaccagccactggaaggcacattcccttgcgacttcgcctggggtgtggtggacaactacatccaggtaagccaactgacgaagcccatctcctccctgactaaaccttaccat

SEQ ID NO: 15229 - DNA, 1647 bp, synthetic construct; identical to SEQ ID NO: 15228
  misc_feature 1..1647: note = source = /note="Description of Artificial Sequence: Synthetic coding sequence"
  source 1..1647: mol_type = other DNA

SEQ ID NO: 15230 - DNA, 1647 bp, synthetic construct
  misc_feature 1..1647: note = source = /note="Description of Artificial Sequence: Synthetic coding sequence"
  source 1..1647: mol_type = other DNA
atgcctgcaagtgctccaccccgcagaccaagacctcctccgccgagtctgtctctgctcttggtgttattagggttgggagggaggaggctgcgggccgaacccggcgacggcgctcaaacgtgggctcgattctcacggcccccagctcccgaggccgcgggactctttcaaggcactttccccgatggattcctgtgggcggtgggcagcgccgcgtatcagacggaaggcggatggcagcagcacggcaagggggcgtcgatctgggataccttcacacaccacccattggcaccccccggggactcgcgaaacgccagtttgcccctgggtgccccttctcccttacaacctgctacgggggacgttgcatctgattcttataataacgtgttccgggacactgaagccttgcgagagttgggagtgacacattaccgcttcagcattagttgggcaagagtgctgcccaacggaagcgctggggtgcctaaccgtgagggtctgaggtactaccgtcggctcctggaaagattaagggagttaggcgtccaacctgtggtcaccctgtatcattgggatcttccacagcggctgcaggacgcttatgggggctgggcgaatagagcgctcgcagaccattttcgcgactatgctgaactctgcttcagacacttcgggggtcaggtgaaatattggattaccatcgacaatccctatgtcgtcgcttggcacgggtatgctacagggcggttagctccagggataagggggtctccccgactgggctacctggtggcccataacttgctgcttgcccacgccaaggtgtggcatttatacaatactagcttccgccccacacagggcggccaggtcagtatcgctctgagtagccattggatcaacccccgccggatgaccgatcattccattaaagagtgccagaaatctcttgactttgtcctgggatggttcgccaagccggtatttattgatggcgattaccctgaaagtatgaagaacaatctgtctagtatcctgcccgattttaccgaatccgaaaagaagtttattaaaggtactgccgacttctttgcactttgttttggacccactctctctttccagctgctcgaccctcacatgaagtttaggcagctggagtcgccaaatcttcggcagctgctctcatggattgacctggagttcaatcacccacagatcttcattgtcgagaatggttggtttgtctctgggactactaaaagagacgacgctaaatatatgtactatctgaagaaattcatcatggaaacccttaaggccataaagctggacggagtggacgtcattgggtacacagcctggtctctgatggatggcttcgagtggcatagaggctactccattagacggggactgttttatgtcgactttctgagccaggataagatgctcctgcctaagtctagcgccctcttctaccagaagctgatcgagaagaatgggttcccacctctgcctgagaaccagccactagagggaactttcccatgcgactttgcctggggagttgtggataattacatccaggtcagtcagcttaccaagcccatatctagtctgaccaagccttatcac

SEQ ID NO: 15231 - DNA, 1647 bp, synthetic construct; identical to SEQ ID NO: 15230
  misc_feature 1..1647: note = source = /note="Description of Artificial Sequence: Synthetic coding sequence"
  source 1..1647: mol_type = other DNA

SEQ ID NO: 15232 - DNA, 1647 bp, synthetic construct
  misc_feature 1..1647: note = source = /note="Description of Artificial Sequence: Synthetic coding sequence"
  source 1..1647: mol_type = other DNA
atgccggcatccgcgccaccgcgccgaccgcgcccaccacctccgtcactgagcctgctcctcgtcctcctgggacttggaggacggcggctccgggcggaaccgggagacggagcgcagacttgggcgaggttctcgcgcccccctgccccagaagcggctggtctgttccagggaactttcccagatgggtttttgtgggcggtgggatcggccgcttaccagactgagggcggatggcagcagcatgggaagggtgcaagcatctgggacacctttactcaccatcccctggctccgccgggtgacagccggaatgcttcgctgccacttggggcccctagcccactccagccagcaactggtgacgtggcctccgactcgtacaataatgtgttcagggatactgaagccctccgcgaactgggcgtgacgcattaccgcttctccatctcgtgggccagagtcctcccaaacggatcggcgggagtgcccaatcgggaaggtctgaggtactaccggcgcctcttggagcggctccgggagcttggcgtgcagcctgtcgtgactctgtaccactgggacctgccacagagactgcaagacgcctacgggggttgggctaacagggccctcgcagaccatttccgcgactacgcagaactgtgctttcggcacttcggaggacaggtgaaatactggattaccattgataacccgtacgtggttgcctggcacggatacgctaccggacgcctcgctcctggcatccggggaagtcccagactgggctacctcgtcgcccataacttgcttctggcgcatgctaaggtgtggcatctgtacaacacttcattcagaccgactcagggagggcaggtcagcatcgcgctttcgtcgcattggatcaaccctcgcagaatgactgatcactccatcaaggaatgccagaagtcgctcgacttcgtgctggggtggtttgcaaagccggtgttcatcgatggagactaccccgagtccatgaagaataacctctcctcaattctgccggacttcaccgagagcgaaaagaaattcatcaaggggaccgcggactttttcgcactgtgtttcggcccaactctgtcatttcagctccttgacccgcacatgaagttccgccagttggaatcgccgaacctcaggcaactcctgtcatggattgacctcgagttcaatcatccacagattttcattgtcgaaaatggctggttcgtgtcaggcaccactaagcgggacgacgcaaagtatatgtattacctgaaaaagttcatcatggaaaccctcaaagccatcaaacttgacggtgtcgatgtgatcggctacactgcatggtcgctcatggacggattcgagtggcaccgtggatattcgatccgccggggactgttttacgtggactttctgtcgcaggacaaaatgctcctgccaaaaagctccgccctcttctaccaaaaacttatcgaaaagaatggattcccgcctcttcctgaaaatcagcctctggagggaacgtttccgtgcgacttcgcgtggggggtggtggacaactatattcaggtgtcacagctcaccaagccgatctcatcactgactaagccgtaccac

SEQ ID NO: 15233 - DNA, 1647 bp, synthetic construct; identical to SEQ ID NO: 15232
  misc_feature 1..1647: note = source = /note="Description of Artificial Sequence: Synthetic coding sequence"
  source 1..1647: mol_type = other DNA

SEQ ID NO: 15234 - DNA, 1647 bp, synthetic construct
  misc_feature 1..1647: note = source = /note="Description of Artificial Sequence: Synthetic coding sequence"
  source 1..1647: mol_type = other DNA
atgcctgcctcagctccccccagacggccccggccacctccaccctcactctcactcctgcttgttttactcggactaggaggacggcggctcagagccgaaccaggagatggagcccagacatgggcacgattctccagaccccctgctcctgaagccgcaggacttttccagggaactttccccgatgggttcctctgggccgtgggatccgcagcctatcagacagaaggggggtggcagcagcacggaaagggagccagtatctgggatacatttactcatcatcctttggcccctcctggagattcgagaaacgcctctctgcccctgggggctccctcccctctccagcctgctacaggagatgtcgcaagtgattcttacaacaacgtgttcagagatacagaagccctgcgcgaactgggggttacacactacaggttttctatttcatgggccagggtactacctaatgggtcagccggggttcccaaccgggaagggctgcgttattacaggagactcctggaacgcctcagggaactaggagtgcagcccgtggttactctgtaccattgggatctgcctcagaggctgcaggatgcctatggggggtgggccaacagagctttggccgatcactttcgagactatgctgaactgtgctttcggcatttcggaggacaggtgaaatactggataactatagataacccgtatgtggtcgcatggcatggatatgccacagggcgtctcgctcccggaatacgggggagtcctagactcgggtaccttgtggctcacaatttactcctcgctcacgccaaagtttggcacctgtataatacatctttcagacctactcagggagggcaagtctctattgctctgagttcccactggattaatcctagacggatgacagatcattcaattaaagaatgtcagaaaagtttagatttcgtcttagggtggttcgctaagccagtgttcattgacggggattatcctgaatctatgaaaaataatctgtcatccattctccctgactttactgaatccgaaaagaaatttatcaaagggacagcagatttctttgcactttgtttcggacccactctttccttccagttacttgatccacatatgaaatttagacagcttgagtcaccaaatctgcggcagcttctgtcctggatcgatctggagtttaatcatccccagatctttatcgtcgaaaacgggtggtttgtatcagggactactaaaagagatgacgccaaatatatgtattatctgaaaaaatttattatggagacactgaaagcgattaaacttgatggagtggatgtaatagggtatacagcttggagtttgatggatggatttgaatggcatagagggtattctatacgacgcggattattctatgtggatttcctttcccaggataaaatgctactgcctaaaagtagtgctttattttaccagaaactcatcgagaaaaacgggttcccccccttgccggagaaccagccccttgaagggacatttccttgcgattttgcatggggggtcgttgacaactacatacaggtctcccagctgactaaacctattagttccctcactaaaccttaccac

SEQ ID NO: 15235 - DNA, 1647 bp, synthetic construct; identical to SEQ ID NO: 15234
  misc_feature 1..1647: note = source = /note="Description of Artificial Sequence: Synthetic coding sequence"
  source 1..1647: mol_type = other DNA

SEQ ID NO: 15236 - DNA, 1647 bp, synthetic construct
  misc_feature 1..1647: note = source = /note="Description of Artificial Sequence: Synthetic coding sequence"
  source 1..1647: mol_type = other DNA
atgccggcatcagcacctccacgccgacctaggccccctcctccttccctgtccttgctccttgtcctcctcggcctgggtgggagacgtcttagggccgagcctggagacggagcgcaaacttgggcacgattctcccgtccacctgcgcctgaggcggccggacttttccagggaacttttcccgatgggtttctttgggcagtcggatccgccgcataccaaactgaaggaggatggcaacaacatggtaagggggcgtcaatctgggacacttttacccatcatcccctggctcctccgggcgattcccgtaatgccagccttcctcttggagccccatcgcctcttcaacctgccactggtgatgtggcatcggactcctacaacaacgtgtttagagataccgaagcacttagagaacttggcgttacgcattaccgcttttcaatctcctgggcaagagtgctgccaaatggatcggccggagtgccgaaccgggagggacttagatactacaggagactgcttgaacgcctgcgcgaactcggtgtgcagcctgtcgtcacgctgtaccattgggatctgcctcagcggctgcaagacgcatacggcggttgggccaaccgagccctcgcagatcacttcagggattacgcagagctttgttttcgccactttggcggacaagtgaagtactggattaccattgacaacccttacgtggtcgcttggcacggctacgcaactggacgccttgcaccagggatccggggttcgccaagactgggatacctcgtggcacataaccttctgcttgcgcatgcaaaggtctggcacctttacaacacttcatttaggcccacccagggaggtcaagtctcaatcgcattgtcaagccactggattaacccaaggagaatgaccgatcactccattaaagaatgccagaagagtcttgatttcgtcctgggttggttcgctaagccagtctttatcgatggagactatccagaatccatgaagaacaatcttagtagcatccttcctgattttactgaaagcgagaaaaagttcattaagggaaccgctgacttcttcgctctttgcttcggccctaccctttcatttcagctcctcgatccacatatgaagttccggcaactcgaatcgcccaatctgcggcaacttctgtcgtggatcgatctggaattcaaccacccacagatcttcatagtcgaaaatgggtggtttgtctcaggaactaccaagcgtgatgatgcaaagtacatgtattatcttaagaagttcatcatggagactctcaaggcaattaagctggatggtgtggacgtcattggttacaccgcgtggtcccttatggatggttttgagtggcatcgaggctactccatccggagaggcctgttttacgtggattttctctcacaagataagatgctcctcccaaagagctccgcactcttttaccagaagctgatcgagaagaatggattcccccctctccccgaaaaccaaccccttgagggtaccttcccttgcgatttcgcatggggagtggtggacaattacatccaggtttcgcagctgaccaaacctattagctctttgactaagccttaccat

SEQ ID NO: 15237 - DNA, 1647 bp, synthetic construct; identical to SEQ ID NO: 15236
  misc_feature 1..1647: note = source = /note="Description of Artificial Sequence: Synthetic coding sequence"
  source 1..1647: mol_type = other DNA

SEQ ID NO: 15238 - DNA, 1647 bp, synthetic construct
  misc_feature 1..1647: note = source = /note="Description of Artificial Sequence: Synthetic coding sequence"
  source 1..1647: mol_type = other DNA
atgccggcatccgcacctccgcgacggcccagacctcccccaccatctctctcattacttctggtcttgctcgggctgggcggaagaagactgcgagccgagccaggtgatggagctcaaacgtgggccagatttagccggcctcccgcccctgaagctgccggactttttcagggaacattccccgacggttttttgtgggccgttggctcagccgcctaccagactgagggcggatggcagcagcatgggaagggagcatcaatttgggatactttcactcatcatcccctggcacccccaggggattcccgcaatgcgagcttaccactgggcgccccttctccactgcagcccgcaaccggggatgtagcctctgactcttacaacaacgtgtttcgcgatacagaggctctcagagaactgggagtgacgcattacaggtttagcattagctgggctcgggtgctgcctaacggatccgctggagtgccgaacagggagggccttcgttactatagacgtttactggagagactacgggaattgggagtgcagccagttgtcaccctctaccactgggacctgccacaacggctgcaggatgcttatggaggttgggcaaaccgagctcttgcggatcacttccgcgattatgcagagctatgttttaggcatttcggcggccaggtaaaatattggatcaccatcgacaacccctatgtggtggcttggcacggctatgccacaggaaggttggcaccaggaatccgggggagccccagactgggatatctggttgcccacaatctcctcctagcgcatgcaaaggtatggcatctgtataacactagcttcagacccacgcagggaggccaggtcagcatcgccttatcttcccactggatcaaccccaggagaatgaccgaccactcgattaaagagtgccagaaaagcttagatttcgtcctcggatggttcgcaaaacctgtgttcattgacggtgactatcctgagagtatgaagaacaacctcagcagcatcctgcccgacttcacggagtcagagaagaagtttataaaggggactgcggactttttcgcgctctgttttggaccaacactaagcttccagctgttagaccctcacatgaaatttcgtcagctggaaagcccaaacctccggcagcttttgagttggattgatcttgagtttaaccatccacagatctttatagtcgaaaacgggtggtttgtcagcggaactactaagcgcgacgatgcaaagtatatgtattacctgaaaaagtttataatggagacattgaaggccattaagctggatggagtggacgtcattggatacacagcttggagcctgatggatggatttgagtggcacagagggtattccatccgccgtggcctgttttatgtggacttcctatctcaggacaagatgttgttacctaagtcatcagccctattttaccaaaagttgattgagaagaatggattcccacctcttcccgaaaaccagcctctggaaggcacattcccctgcgatttcgcgtggggagtggtggataactatatccaggtgagccagctgaccaagccaatcagttcactcactaaaccgtaccac

SEQ ID NO: 15239 - DNA, 1647 bp, synthetic construct; identical to SEQ ID NO: 15238
  misc_feature 1..1647: note = source = /note="Description of Artificial Sequence: Synthetic coding sequence"
  source 1..1647: mol_type = other DNA

SEQ ID NO: 15240 - DNA, 1647 bp, synthetic construct
  misc_feature 1..1647: note = source = /note="Description of Artificial Sequence: Synthetic coding sequence"
  source 1..1647: mol_type = other DNA
atgcccgcaagcgcacccccacgacggccacgaccaccacctccatcactgtcgcttcttttggtgcttctcggactcggtggacgaaggctcagagctgaaccaggtgacggtgcacaaacttgggctcgcttttcaagacccccggcacctgaggcggcagggctgttccagggtaccttcccagacggattcctgtgggctgtgggttccgcagcctaccagactgagggaggatggcaacagcatggaaaaggtgcatcaatctgggatacctttacccatcaccctcttgcgccccctggagactctcgcaatgcgtctttgccactcggagcgccttccccgcttcagcctgctactggagatgtggcctcagattcgtacaacaacgtctttagggatacggaggcccttcgtgagctcggtgtgacccactaccggttctcgatttcctgggctagagtccttccaaatggcagcgctggagtgccaaaccgcgaaggattgagatactaccggcgccttctggaaagacttcgggaactgggtgtgcagccagtggtgacgctgtaccactgggatcttccacaacgcctgcaggacgcatacggaggatgggccaatcgagcactggctgaccactttcgggattacgcggaattgtgttttagacattttggtggccaggtgaagtattggattaccattgataacccgtacgtggtggcctggcatggttacgctaccggtagactcgccccaggcatcagaggttcgcctcgtcttggatacctggtggctcataacttgctcctggcccatgcaaaagtttggcatctttacaacacctcctttcggccaacccaaggtggtcaagtgagcatcgcgctctccagccactggataaaccccaggaggatgactgatcattcgattaaggaatgccaaaaaagcctcgattttgttctgggctggtttgccaagccggtctttattgatggagattaccctgaatcgatgaagaataatctttcgtcaatcctccctgatttcactgagtccgagaaaaagttcattaaggggactgcggacttttttgcactctgcttcggccctaccctttccttccaattgctggacccccacatgaagtttaggcaactcgaatcacccaacctgcgccagctgctctcgtggatagaccttgaattcaaccacccccaaatctttatcgtggaaaacggatggtttgtctccggtaccactaaacgcgacgatgcaaaatacatgtactatctgaagaaattcattatggagacgcttaaagccattaaacttgatggtgtggacgtgatcggctatactgcatggagccttatggatggcttcgagtggcatcggggatactccatccgccggggtttgttctatgtggactttttgagccaagataagatgcttcttccaaaatcaagcgccctgttttaccaaaaactgattgagaaaaacggattccctcctctgcccgaaaatcaacctctggaaggcacctttccgtgcgattttgcgtggggtgtggtcgacaattacattcaagtgagccagctgaccaagccgatctccagccttactaagccctaccac

SEQ ID NO: 15241 - DNA, 1647 bp, synthetic construct; identical to SEQ ID NO: 15240
  misc_feature 1..1647: note = source = /note="Description of Artificial Sequence: Synthetic coding sequence"
  source 1..1647: mol_type = other DNA

SEQ ID NO: 15242 - DNA, 1647 bp, synthetic construct
  misc_feature 1..1647: note = source = /note="Description of Artificial Sequence: Synthetic coding sequence"
  source 1..1647: mol_type = other DNA
atgccagctagcgcgccacccagacgacctagaccccctcctccatctctgtccttgctgcttgtgctgctgggcctgggcggacgacgtttaagggcagaaccaggagatggtgctcaaacttgggccagattctcgaggccaccggctcccgaagctgcggggctgtttcagggcacattcccggatggctttttgtgggctgtgggttcagccgcatatcagactgagggcggttggcagcagcatggtaaaggcgcgtcaatctgggatactttcacccaccatccactggctcctccaggcgattccagaaatgctagtcttcctttgggcgctccctcacctctgcagcccgccacaggagatgtggcctcagactcatataataacgtcttccgcgatacagaggccctgagagaattgggagtgacgcactacagatttagcattagctgggcgagggttctacccaatggatcagccggcgtaccaaacagagaaggcttacgatattacaggaggctgctggaacggttacgagaactgggagttcaacctgtggttaccctgtaccactgggacctaccacaaaggctgcaggatgcatatgggggttgggccaatcgagcacttgctgaccactttcgcgactatgccgagctctgtttcagacacttcgggggccaggtcaagtattggattacaattgataatccctacgtggtggcgtggcatggttatgctacgggacgactggcgcccggcatcagaggctcacctcgactaggatatctggttgctcacaatctactgctcgcccatgccaaagtgtggcatctctacaacacgtcgttccgtcctacccaaggcgggcaagtcagcatcgccctgtcttcccattggattaacccacgaaggatgaccgaccatagcatcaaagagtgccagaaaagtctggatttcgtgctcggatggtttgctaaacccgtgttcatcgacggtgattaccctgagtccatgaagaacaatctatcgtccatcctccccgactttaccgaatcggagaagaagttcatcaaaggaaccgctgatttctttgctctctgctttggtcctacactgtcatttcaactattggatccccatatgaaatttaggcagctcgaatcccccaatctgagacaactgctcagctggatcgatctggaattcaatcacccacaaatttttatagtagagaatgggtggttcgtgagtggcaccaccaagagggacgacgccaagtatatgtactacttgaagaaattcattatggagaccttaaaggcaatcaaactggatggcgttgatgtgatcggttacacagcttggagtctgatggatgggtttgaatggcaccgaggttattcgatacggcgaggcctcttttacgtggactttctgagccaggataagatgttattaccgaagtcttccgcgctcttctaccagaaattaatagaaaaaaatgggtttcctccgctgccagagaatcagccactggaaggaacctttccctgtgatttcgcctggggtgtggtggacaattacatccaagtatcccagctgactaagcctatatcatcccttactaaaccataccat

SEQ ID NO: 15243 - DNA, 1647 bp, synthetic construct; identical to SEQ ID NO: 15242
  misc_feature 1..1647: note = source = /note="Description of Artificial Sequence: Synthetic coding sequence"
  source 1..1647: mol_type = other DNA

SEQ ID NO: 15244 - DNA, 1647 bp, synthetic construct
  misc_feature 1..1647: note = source = /note="Description of Artificial Sequence: Synthetic coding sequence"
  source 1..1647: mol_type = other DNA
atgcccgcttcggctccaccacgtcggcctcgtcctccacctccctcactgtctctgcttttggttctactaggcctaggcggtcgacgtctgcgagcagaaccgggtgatggtgctcagacgtgggccaggtttagtagacctcctgctcctgaagctgccggtctgtttcaggggacctttcctgatggctttctatgggcagtcggttcagcagcgtatcagacagagggcggttggcagcaacacggtaaaggcgccagtatttgggataccttcacacatcatccattggcgccaccgggcgactctcgaaacgcgagtcttcctctgggcgcacccagcccgcttcagccagcaaccggcgatgttgcatctgactcatacaacaacgtcttccgggataccgaggccctcagagagttgggtgtcactcattaccgtttctcaatctcttgggcacgagtgctccccaacggttctgctggtgttcctaatcgagaggggctgcgatactaccgccgcctcctagagagactccgcgaactgggcgttcagccggtcgtgactttgtaccactgggacctgccgcagcgcctccaggatgcttatggcggttgggcaaaccgagcgctcgccgatcacttcagggattacgccgaattgtgtttccgccattttgggggccaggtcaagtattggattaccatcgataacccatacgtggtcgcctggcacgggtatgctacgggtcgtctggcgccaggtatccgaggttcaccccgactcggctacttagtcgcccacaacttacttcttgctcatgcaaaggtgtggcacctctataacacgtcattccgaccgacacagggtggacaggtcagcatcgctctcagcagtcactggataaacccaaggcgcatgacagaccactccatcaaggaatgtcaaaaatcactggatttcgtgctcgggtggttcgccaaacctgtcttcattgatggtgattacccagagtcaatgaaaaacaacttgagctccattctccccgacttcacggaatccgagaaaaagttcatcaagggcactgctgacttctttgccctctgttttggacctacgttatcgttccagctgcttgacccgcatatgaagttccggcaacttgagtccccaaacttgcggcagctgctgtcgtggattgacctcgaatttaatcatcctcaaatttttatcgttgagaacggttggtttgtgtccggcactaccaaacgagatgatgccaagtacatgtattatctgaaaaagttcattatggagacgctgaaagcgatcaagttagatggagtcgacgtgattggatataccgcatggtcattgatggacgggttcgaatggcatagagggtatagcattcgtcgtggtctgttttacgtagacttcttgagtcaagataagatgttgctcccgaagagcagcgctctgttttaccaaaagctgatcgaaaaaaacggtttcccgcctttaccagagaaccagccgctggaaggcacatttccctgcgacttcgcctggggcgttgttgacaattatatccaggtctctcagctgaccaaaccaatctcctcacttaccaagccttaccat

SEQ ID NO: 15245 - DNA, 1647 bp, synthetic construct; identical to SEQ ID NO: 15244
  misc_feature 1..1647: note = source = /note="Description of Artificial Sequence: Synthetic coding sequence"
  source 1..1647: mol_type = other DNA

SEQ ID NO: 15246 - DNA, 1647 bp, synthetic construct
  misc_feature 1..1647: note = source = /note="Description of Artificial Sequence: Synthetic coding sequence"
  source 1..1647: mol_type = other DNA
atgcctgctagcgcccctccacgacggccaagaccacctcccccgtctttgtcactgctcctcgtcctgctggggctgggaggtcgccgccttcgagcagaaccgggtgacggcgcccaaacttgggcccgcttctcgaggccaccggccccggaagcggcaggtctgttccagggaaccttccctgacggcttcctgtgggcagtgggttcggcggcctatcagactgaagggggatggcagcaacacggcaaaggggcgtctatctgggacacttttacccaccatcctctcgctccaccaggtgattcgcggaatgcctccctccccctgggagccccgtcgccgctgcaacccgcgaccggggacgtggcgagcgacagctacaacaacgtgtttcgcgacaccgaagccctgcgcgaacttggagtgacgcactaccggttttcaatctcatgggcacgcgtcctcccgaatggaagcgccggagtgcccaacagagagggcttgaggtactaccggagattgctggagcgcctcagagaactcggcgtccagcccgtggtcaccctgtaccactgggatctgccgcaacgcctgcaggatgcttacggaggatgggctaatagagctctggccgaccacttcagggactacgcggaactgtgtttccgtcacttcggcggacaggtgaagtactggattactatcgataatccatacgtggtggcatggcacggctacgccacgggacggctggccccgggcatccgggggtcgccacggctcggatatctggtggcgcacaacctgctgctggcgcatgcaaaggtgtggcatctgtacaacacttcgtttagaccgacccagggaggacaagtgagcatcgcgctctccagccattggattaacccgcgcaggatgactgaccacagtatcaaggagtgccagaagtcgctggacttcgttcttggctggttcgcaaagccggtgttcatcgatggagattacccggagtccatgaagaataacctctcctcaatactgcctgatttcaccgaatcggagaaaaagttcatcaagggaacggccgatttctttgcactttgcttcggccctaccctctccttccaactcctcgaccctcatatgaagtttcggcagctcgagtccccgaatctgcgccagctgctgtcctggatcgacctggaatttaaccacccacaaatcttcatcgtggagaacggatggttcgtgtcaggcaccactaagagagacgacgctaagtacatgtattaccttaagaaattcatcatggaaaccctcaaggccatcaagctggacggtgtcgatgtcattggatacactgcgtggagcctcatggatggattcgaatggcatcgggggtactcgatccgccggggattgttctacgtcgacttcctgtcccaggacaagatgttgcttccgaagtcatcggctttgttttaccagaaactgattgagaaaaacggatttcctccactgccggaaaatcagccgctcgaggggactttcccatgcgatttcgcctggggagtcgtggataactacatccaggtttcacaacttaccaaaccgatctccagcctgactaaaccctaccat

SEQ ID NO: 15247 - DNA, 1647 bp, synthetic construct; identical to SEQ ID NO: 15246
  misc_feature 1..1647: note = source = /note="Description of Artificial Sequence: Synthetic coding sequence"
  source 1..1647: mol_type = other DNA

SEQ ID NO: 15248 - DNA, 1647 bp, synthetic construct
  misc_feature 1..1647: note = source = /note="Description of Artificial Sequence: Synthetic coding sequence"
  source 1..1647: mol_type = other DNA
atgccggcatctgctccgcctcgacgaccaagacctcctcccccttccctctctctgctcttggtgctgttggggctaggtggaagaaggctcagagcagaacccggtgatggcgcccagacctgggcccgattctcaaggcctccggcccccgaggccgcgggactgtttcaaggaaccttccccgatggattcttgtgggccgtaggatctgctgcgtaccagaccgaaggcggatggcagcagcacggaaaaggcgccagcatctgggatacctttacccaccatcctttggcacctccaggcgactccaggaacgccagcctcccattgggggccccttctcctttacagcccgccactggggatgtagcatcagactcctacaataatgtcttcagggataccgaagcactgcgcgagctgggggtgacgcattacagattttcaatcagctgggcaagggtgcttccaaatgggtcggctggcgtacccaaccgcgaaggtctgcggtactacaggcggcttttggagagactgagggaactgggcgtgcagccagtcgtgacactgtatcattgggacctcccccagcgccttcaggacgcatacggtggctgggccaacagggcgttggccgaccacttccgggactacgcggagctgtgcttcagacactttggaggtcaggtgaagtactggattacaatcgataatccgtatgtcgtggcttggcacggttatgcaacagggcggctagcacctgggatccgggggagcccgcggctggggtacttggttgctcacaatttgctactggcacatgctaaggtgtggcatctgtacaacactagcttccgccccacccagggcgggcaggtgtccattgcgctttcctctcactggatcaaccctcgcagaatgacagaccattccatcaaggaatgtcaaaaatcactggattttgtgcttggctggtttgccaagcctgtgtttattgacggggactaccctgagtctatgaagaataacttgtcttcgattctccccgatttcacggagtcagagaaaaagtttatcaagggcactgccgactttttcgccctctgcttcgggcctacactgtcattccaactcctcgacccccacatgaagtttagacagttagagagtcctaacctgcggcagttactgagttggatcgatttggagttcaaccacccgcagatattcatagttgaaaatggatggtttgtgtcggggaccaccaagcgggatgatgctaaatacatgtattatctcaaaaaatttattatggagacactcaaggccataaaactggatggtgtggacgtgataggctatactgcgtggagccttatggacggattcgagtggcacaggggttactctatacggcgaggactgttctacgtcgactttctcagccaagataagatgttgctgcctaaaagcagcgccttgttttatcagaagctcatcgaaaagaatggtttccctcccctgcccgagaatcagccgctggagggaacatttccctgcgacttcgcctggggcgtggtcgataattacatacaggtgagccagctgacgaagcccattagcagtctgaccaagccctatcac

SEQ ID NO: 15249 - DNA, 1647 bp, synthetic construct; identical to SEQ ID NO: 15248
  misc_feature 1..1647: note = source = /note="Description of Artificial Sequence: Synthetic coding sequence"
  source 1..1647: mol_type = other DNA

SEQ ID NO: 15250 - DNA, 1647 bp, synthetic construct
  misc_feature 1..1647: note = source = /note="Description of Artificial Sequence: Synthetic coding sequence"
  source 1..1647: mol_type = other DNA
atgcctgcttcagcaccccccagaagaccaaggcccccacctccttcgctctcgctgttgttggttctgctgggcttgggcgggcgtcggctgagggccgaacctggagatggcgcccaaacctgggctcggttttccagacctcctgccccggaggccgctgggttattccagggcacatttcctgacggtttcctgtgggctgtcggatccgccgcttaccagaccgagggcggctggcagcagcacggcaagggcgctagcatttgggataccttcacacaccatcctctggctcctcccggcgactcgcgcaacgctagcctccctcttggggcaccttctcccctgcagccggcaacaggagatgtcgctagcgacagctataacaatgttttcagggatactgaggccttacgggagctgggagtgacccattaccgtttttctatctcctgggcgagagtactgcctaatgggagcgctggcgtccctaatcgtgagggtctgcgctattaccgcagattgctggaaaggttgagagagctcggcgtgcaaccggtcgtgacactgtatcactgggacctcccgcagaggttgcaagacgcttacggcggatgggcaaatcgtgcactggcggaccattttagggactacgccgagttgtgcttccgccactttggtggacaggtgaaatactggattaccattgataacccttacgttgtcgcttggcatggatacgcaaccggccggctggctcctggaatcagaggtagtccaaggctgggctacctcgttgcacacaaccttttgctggctcatgctaaggtatggcacctgtacaacacatcctttcggcccacgcagggtggacaggtcagcatcgctctgtcttctcactggattaacccacgcaggatgaccgaccacagtatcaaggagtgccaaaagtctctggattttgtgctgggctggtttgccaagcctgtttttattgacggggactaccccgagagcatgaagaacaacctgtcctctatcctgcccgacttcacggaaagtgagaagaagtttatcaaaggtaccgccgatttttttgctctgtgtttcggccctacgctgtcttttcagcttctggacccacatatgaagtttaggcagttggaatccccaaacctgcgccagctgttatcctggatcgaccttgaatttaatcacccgcagatctttattgtcgagaacgggtggtttgtgagcggcacaactaagcgcgacgacgccaaatacatgtattacttaaaaaaattcataatggaaactctgaaagcaatcaaactcgacggggtcgacgtgatcggctacactgcttggtcattgatggatgggttcgagtggcataggggttatagcattaggagaggcctgttctacgtggacttcctgagccaagacaaaatgttgctgcctaaaagcagcgctctgttttaccaaaagctgatcgaaaaaaatggcttcccccccctgcctgaaaaccaacctctggaaggcaccttcccttgtgatttcgcttggggagttgtcgacaattatatccaagtgtcacagctgaccaagccgatttcaagcctgaccaagccctaccac

SEQ ID NO: 15251 - DNA, 1647 bp, synthetic construct; identical to SEQ ID NO: 15250
  misc_feature 1..1647: note = source = /note="Description of Artificial Sequence: Synthetic coding sequence"
  source 1..1647: mol_type = other DNA

SEQ ID NO: 15252 - DNA, 1647 bp, synthetic construct
  misc_feature 1..1647: note = source = /note="Description of Artificial Sequence: Synthetic coding sequence"
  source 1..1647: mol_type = other DNA
atgcccgcttctgcgccaccgaggcgcccaagaccgccgccaccgtccctctcgctgctactggtcctcttgggtctgggaggacgccgcttgcgcgccgagccaggagatggagctcagacctgggccaggttttcacgaccgccagcgcccgaggccgctggtctgttccagggaacgttccctgacggcttcctgtgggctgtcggctcagcagcctaccagaccgagggaggatggcagcaacacggcaagggcgcaagcatatgggatacattcacccaccacccacttgccccgccgggagacagccgaaatgccagcttgccgctgggcgccccgtcgccgctgcagcccgccactggagacgtggccagcgactcctataataacgttttccgagacacggaggctctccgggagctgggcgttacccactaccgtttttctatctcctgggcacgcgtgctgcccaatggatccgcgggcgtgcctaatcgcgaggggttgcgttactaccgccgtttgctggagcgattgcgcgagctaggagtgcagccagtcgtaacgctttaccactgggacctgccccagcgtctccaggacgcctacggcggttgggcgaatcgtgctctggccgaccatttccgggattacgccgagctgtgcttccgacatttcggcggccaggttaagtactggataacaatcgacaacccctatgtagtggcgtggcatggatatgccacgggacgcctagcgccgggcattcgaggctcaccccggctgggttatttggtggcgcataatcttctgttggcccacgccaaggtatggcacttatataataccagtttccgtcccacccagggtggacaggtgtctatagcactgagctcgcactggattaacccgcgaagaatgaccgaccactctattaaggagtgtcaaaagtcgctggacttcgtgcttggatggtttgctaagccagttttcattgacggtgactacccagagtccatgaagaacaacctgtcctcaattctgccggactttacggagagcgagaagaagttcataaagggcacagccgattttttcgcgctctgcttcggccccaccctgagctttcaactgctggaccctcatatgaagttcagacaacttgagtcgccgaacctcaggcagcttcttagctggattgaccttgagttcaaccacccccaaatttttatcgttgagaacggctggttcgtgtcaggtaccacgaaacgcgatgacgcaaagtacatgtactatttgaaaaaattcataatggaaacgctgaaggccatcaaactcgacggcgtggatgtcattggctatacagcctggtcgctgatggatgggtttgaatggcaccgtggttacagcatccgacgaggattgttctatgtcgatttcctctcgcaagataagatgctactgccaaagagttccgctctgttctaccagaagctaatcgagaagaacggatttcccccgttgccagaaaaccagcccctggagggaacctttccctgcgactttgcctggggcgtggtggataattacatccaggtctcccagttgaccaagcccataagcagtcttaccaagccttatcac

SEQ ID NO: 15253 - DNA, 1647 bp, synthetic construct; identical to SEQ ID NO: 15252
  misc_feature 1..1647: note = source = /note="Description of Artificial Sequence: Synthetic coding sequence"
  source 1..1647: mol_type = other DNA

SEQ ID NO: 15254 - DNA, 1647 bp, synthetic construct
  misc_feature 1..1647: note = source = /note="Description of Artificial Sequence: Synthetic coding sequence"
  source 1..1647: mol_type = other DNA
atgccagcctccgcacctccaaggaggcctaggcctccccccccctctttgagtttactgctagtgttgctcggcctgggcggccgaagacttagagccgaacccggagacggggcgcagacatgggctcgttttagcagaccaccggccccagaggccgctggactcttccagggtaccttccctgatgggttcttatgggcagtgggttccgctgcctaccaaaccgagggggggtggcagcagcacggaaagggtgcttcaatctgggatactttcacacatcacccgttggcccctccaggggattcaagaaatgcctctctgcccctgggcgcgccttcccccctacaaccagccacgggggatgtcgccagtgattcttacaacaatgttttcagagatacggaggctcttagggaacttggggttactcactacaggttcagcatttcctgggctagggtgttgccaaatggaagcgcgggggtgccaaaccgggaaggcctccggtactatcggcgcctgctcgagcgcctccgcgaactgggagtccagcccgtggttacactgtatcattgggacttgccgcagcgactgcaggatgcgtacgggggatgggctaacagggcacttgccgaccactttcgcgattacgcagagctttgcttccgtcactttggggggcaggtcaagtactggatcactatcgataatccctacgtggtggcatggcatggctatgcaaccggcaggcttgctcctgggatcagaggcagtcctaggctgggctacctcgtggcgcataacctgttgctcgcccatgcaaaggtttggcatctgtataatacgtcgttcagaccaactcagggagggcaggtaagcatcgcactgagtagtcattggatcaatcctaggagaatgactgatcactcaatcaaggagtgccaaaagagcttggatttcgtgctgggctggtttgctaaaccagtgtttattgacggtgactatccagagagtatgaaaaacaacttgtcctctatcctgcctgatttcaccgagtcagaaaagaagttcatcaagggcacagctgatttttttgcattgtgtttcggcccgaccctcagctttcagctgctcgatccccacatgaagtttaggcagctcgaatccccaaatctgcggcagcttctgtcctggattgatctcgaattcaaccacccccagatcttcatagtcgaaaatggctggtttgtatctggtacaaccaagcgcgatgatgctaagtacatgtattaccttaagaagttcattatggaaacactgaaagctattaagctggatggtgtggatgtgatcggctacaccgcgtggtcactaatggacgggtttgagtggcaccggggctatagtatcaggagagggctgttctacgtggatttcctgtcccaggacaaaatgttgctgcctaagagctcagcgctgttttatcagaaattaattgagaagaacggttttcctccacttccggaaaaccagcctctcgagggtacctttccctgcgactttgcctggggagtcgtagacaattatatccaagtttcccagttaaccaagcctatcagttctctcacaaaaccctaccac

SEQ ID NO: 15255 - DNA, 1647 bp, synthetic construct; identical to SEQ ID NO: 15254
  misc_feature 1..1647: note = source = /note="Description of Artificial Sequence: Synthetic coding sequence"
  source 1..1647: mol_type = other DNA

SEQ ID NO: 15256 - DNA, 1647 bp, synthetic construct
  misc_feature 1..1647: note = source = /note="Description of Artificial Sequence: Synthetic coding sequence"
  source 1..1647: mol_type = other DNA
atgcctgcttctgccccaccgcgtcgtccaagaccgcctcctccgtcgttgagcctgttgttggttctgctcggactgggcgggcggcgtctccgagccgaacctggcgacggtgcacagacctgggcaaggttttcccgaccgccagctcccgaggccgccggcctctttcaaggcacttttcccgatggatttctgtgggccgtgggttcggcagcctaccaaaccgaaggagggtggcagcagcatggaaagggggcgtcgatctgggacacttttactcatcacccactcgctccgcccggcgactcccggaatgcttcccttccactgggcgcgcctagcccgttgcagcctgccactggtgatgtcgcctcagacagctacaacaatgtgttccgggataccgaagcccttcgggagctgggagtcactcattatagattttcaatctcatgggctcgcgtgctgccgaatggttcagcaggagtgccaaacagagagggactcagatactaccggcgcctcctcgagaggctgagagaactgggtgtgcagccggttgtgaccctctaccactgggatctgccacagcggctgcaggacgcatacggtgggtgggcaaacagagctctggcggatcacttccgtgactacgccgagctctgcttccgccattttgggggtcaagtgaagtactggataactatcgacaacccgtacgtggtggcctggcacggatacgcgacgggccgactggctccggggatccgcgggagcccgcgcctgggatacctggtggcgcataatctgctgctggcccatgccaaggtctggcacctgtacaacacttctttccgcccaacccaaggaggacaggtgtcaatcgccctcagctcacactggattaacccgcggcggatgactgaccactcgatcaaggaatgtcagaagtcgcttgactttgtgttgggatggttcgcaaaaccagtgttcattgacggagattacccggaatcgatgaagaacaacctctcatcgatcttgcccgacttcacggagtccgagaagaagttcatcaagggaaccgctgatttctttgcgctgtgtttcgggcccacgctttcgttccaattgttggaccctcatatgaagttcaggcagctcgaatcgccgaacctccggcagctgctctcctggatagatctggagttcaaccacccgcaaatcttcatcgtggagaatggatggttcgtgagcggaaccaccaaaagagatgacgctaaatacatgtactatctgaaaaagtttatcatggaaactctgaaagcgatcaaactggacggcgtggacgtgatcggatataccgcatggtccctgatggatggcttcgagtggcaccgcggatactcaatccgccgcggccttttctacgtggattttctttcgcaagataagatgctcctgccgaaatccagcgccttgttctaccagaaattgatcgaaaagaacggctttccgccgctgcctgaaaatcaaccccttgaaggaaccttcccatgcgacttcgcctggggcgtggtcgataactacatccaggtcagccagctcactaagccgatcagctcgctgaccaagccgtaccac

SEQ ID NO: 15257 - DNA, 1647 bp, synthetic construct; identical to SEQ ID NO: 15256
  misc_feature 1..1647: note = source = /note="Description of Artificial Sequence: Synthetic coding sequence"
  source 1..1647: mol_type = other DNA

SEQ ID NO: 15258 - DNA, 1647 bp, synthetic construct
  misc_feature 1..1647: note = source = /note="Description of Artificial Sequence: Synthetic coding sequence"
  source 1..1647: mol_type = other DNA
atgcctgcatccgcacctcccaggcgaccacggccaccgcctccctcgctttctcttctcttggtgctcctggggctcgggggcagacgccttcgggctgagccgggagatggagcacagacctgggcccggttctcccgccctcccgcaccagaagcagcaggtctgtttcaagggacgtttcctgatgggtttctgtgggcagtgggctcggcagcctaccagaccgagggtggctggcagcaacatggcaagggggcttcgatttgggatacttttactcatcatccccttgcgcctccaggtgatagccggaacgcctcgcttcccctgggcgctccttcaccactgcaaccggcgaccggagatgtggcttccgactcgtataacaacgtctttcgcgatactgaagcactgcgtgaactcggggtcactcactacagatttagcatttcctgggcgcgagtgctgcctaatgggagcgcaggcgttccaaatagagaaggactgagatactaccggagactgctggaaagactgagggaactgggagtgcagcctgtggtgactctttatcattgggaccttcctcagagactgcaggatgcatacggcggttgggccaatagggcactggcagaccattttcgggattacgccgagctctgttttcgacattttggagggcaagttaagtactggattacgatcgacaatccttacgtggtcgcttggcatggctatgcaacgggtcgtctggcccctggaattcggggatcccctagacttggttacttggtggcacacaacctgctgctcgcgcacgcaaaggtctggcacctgtataacacctctttccgcccaacccaaggcggacaagtgagcattgctctgtcctcccattggataaacccgcggcgaatgaccgatcactccataaaagaatgccaaaaatcccttgactttgtgctcggttggtttgccaaacctgtgttcattgatggagattaccccgagtcaatgaaaaacaatctgtcctcgattctgccagactttactgagtcggaaaagaagttcataaagggcaccgcggactttttcgcactttgcttcgggcctaccctgagctttcaactccttgaccctcacatgaagttcagacaactcgaatcccccaatctgcgtcaactgctgtcttggattgatctcgagttcaaccatccacagattttcattgtggagaatggatggtttgtgtcgggaacgactaagcgcgacgacgccaagtatatgtattaccttaagaagtttatcatggagactctcaaggcaattaagctggatggcgtcgacgtcatcggatacaccgcctggtcccttatggatggttttgagtggcatcgaggatactccattcgtagaggtcttttctacgttgacttcctttcgcaagataagatgctgcttccaaagtcgtcggcgcttttctatcagaaactcattgagaaaaacggattccctccgcttccagagaaccaacctctcgagggcacctttccctgtgatttcgcatggggcgtggtggataactacatccaagtgtcacagctcaccaagccaatttccagcctgactaagccctaccat

SEQ ID NO: 15259 - DNA, 1647 bp, synthetic construct; identical to SEQ ID NO: 15258
  misc_feature 1..1647: note = source = /note="Description of Artificial Sequence: Synthetic coding sequence"
  source 1..1647: mol_type = other DNA

SEQ ID NO: 15260 - DNA, 1647 bp, synthetic construct
  misc_feature 1..1647: note = source = /note="Description of Artificial Sequence: Synthetic coding sequence"
  source 1..1647: mol_type = other DNA
atgccagcgagtgcaccgcccaggcggccacggcctccaccaccatcactgtctctgctgttggtgcttctgggccttggcgggagacgcctgagagctgagccaggagatggcgcacagacgtgggcacgcttttcacggccacccgccccagaagcagcaggcctctttcagggcacctttcccgatgggttcttgtgggccgtcgggtctgctgcctatcagaccgaaggaggctggcagcagcacggcaagggcgccagtatatgggacacgtttactcaccatccgcttgcaccacctggcgactccagaaacgcctccctgcctttgggagcaccgagtccgttgcagcctgccacaggggatgtggcgagcgattcatataacaacgtctttagagatacagaagctttgcgggaattgggcgtgacccattataggttctctatatcatgggcgcgggtattgccgaacggttcagcgggcgtgccaaatcgggaaggacttagatactaccgcaggctgctagagagactccgggagttgggagttcagcctgtggtgactttataccactgggatctcccacaaaggctgcaggacgcatatggcggttgggcaaaccgggcattagctgatcactttagggactacgccgagctttgcttcaggcacttcggtggtcaggtgaaatactggatcacaattgataacccctacgtggtggcttggcatgggtatgctactggacggttagccccgggcatcagaggatctccgagactcggatacctcgtcgcacacaacctgctacttgctcatgccaaagtttggcatttatacaacacatcctttaggccaacacagggtgggcaggtctcaatagctctttcctcacactggattaacccacggcggatgaccgaccactcaattaaggagtgtcaaaagagcctggattttgtgctggggtggtttgcgaaaccagtctttatcgacggggactaccctgagtcaatgaaaaacaacctttccagcatactgccagattttacggaatcagagaagaaatttattaaggggaccgctgacttcttcgctttgtgctttggtccaaccttatcctttcagctgctagatccgcacatgaagtttcgccagcttgaatccccaaacctgagacagttgctctcctggattgatctcgaattcaaccaccctcaaatattcattgtcgaaaatggttggtttgttagtgggaccacgaaaagggacgacgccaagtatatgtactacctcaagaaatttattatggagactcttaaagccatcaaattagacggcgtggatgtcattggatatacagcctggagcctgatggacggcttcgaatggcatcgcggctacagtatcagacgcgggctgttctacgttgattttttgtcccaagataaaatgctgctgcccaagtccagcgcactcttctaccagaaactgatcgagaagaacgggttcccacctctgcccgagaatcagccgctcgaaggaacattcccatgtgattttgcctggggtgtggtggacaattatattcaggtgagtcaattgaccaagcctatatccagcctgactaagccgtatcac

SEQ ID NO: 15261 - DNA, 1647 bp, synthetic construct; identical to SEQ ID NO: 15260
  misc_feature 1..1647: note = source = /note="Description of Artificial Sequence: Synthetic coding sequence"
  source 1..1647: mol_type = other DNA

SEQ ID NO: 15262 - DNA, 1647 bp, synthetic construct
  misc_feature 1..1647: note = source = /note="Description of Artificial Sequence: Synthetic coding sequence"
  source 1..1647: mol_type = other DNA
atgcccgcgagcgcaccccccaggaggcccagacccccccccccgagcttgtccctgctgctcgtcctccttgggctgggtgggagacggctccgcgcagagccaggagatggcgcccagacctgggcaaggttcagtcgacccccagcccccgaagcagccggactgttccaggggactttccccgacggtttcttgtgggcagtagggagcgccgcataccagacagaagggggctggcagcagcatggcaaaggagcaagcatctgggataccttcacccatcacccccttgcgcctcctggtgacagccgaaatgcaagtttgccccttggcgcaccatcccctttgcagccagccactggtgacgtggcctccgattcatacaacaacgtgttcagagacactgaggcactgagagaactgggcgtgactcactacagatttagcatttcttgggctcgcgtcctgcctaacggcagcgcaggtgtacctaacagagagggcctgagatactataggcgacttctcgagcggctgcgagaacttggcgtccagcctgtggtgacactgtatcactgggacctcccccagagactccaggacgcttatggagggtgggctaatcgggccctggcagaccacttcagggactatgctgaactgtgctttaggcatttcggcggccaggtaaagtattggattaccatcgacaatccgtatgtggtcgcctggcacggctacgccacaggcagattggcgccagggatccgagggagtcccagactggggtatctggtggcccataatctgctcctggcacacgccaaggtctggcatctttacaacacatcattccggcccacccagggggggcaagtttccatcgcattgtcatcccactggattaatccacgaaggatgacggaccattctatcaaggaatgtcagaagagcttggatttcgttctgggttggttcgctaagcccgtttttatagatggtgactaccctgaatcaatgaaaaacaacttgtcctccatcctgcctgatttcactgagtctgaaaaaaagtttataaaaggcaccgccgattttttcgccctctgtttcggacctactctgtctttccagctgcttgatccccacatgaagtttaggcagctggagtctccaaacctgcggcagttgctgtcctggattgaccttgaattcaaccacccacagatttttatcgttgaaaatggttggtttgtgagtgggacaactaaacgggatgacgctaagtatatgtactacctcaaaaagtttattatggaaacactcaaggccatcaagctggacggcgttgacgtcatcggttatacagcttggtcccttatggatgggtttgaatggcatcggggatactctatacgcagaggactgttttacgtggattttctttcacaggataagatgttgctgcctaaatcctctgccttgttttatcagaaattgatcgagaagaatggattccccccactcccggagaaccagccgctggagggtactttcccatgcgattttgcttggggtgtggtcgacaattatattcaagtctctcagctgaccaaaccaattagctcattgactaaaccttaccat

SEQ ID NO: 15263 - DNA, 1647 bp, synthetic construct; identical to SEQ ID NO: 15262
  misc_feature 1..1647: note = source = /note="Description of Artificial Sequence: Synthetic coding sequence"
  source 1..1647: mol_type = other DNA

SEQ ID NO: 15264 - DNA, 1647 bp, synthetic construct; identical to SEQ ID NO: 15254
  misc_feature 1..1647: note = source = /note="Description of Artificial Sequence: Synthetic coding sequence"
  source 1..1647: mol_type = other DNA

SEQ ID NO: 15265 - DNA, 1647 bp, synthetic construct; identical to SEQ ID NO: 15254
  misc_feature 1..1647: note = source = /note="Description of Artificial Sequence: Synthetic coding sequence"
  source 1..1647: mol_type = other DNA

SEQ ID NO: 15266 - DNA, 1647 bp, synthetic construct
  misc_feature 1..1647: note = source = /note="Description of Artificial Sequence: Synthetic coding sequence"
  source 1..1647: mol_type = other DNA
atgccagcctccgccccccccagacggccgcgccctccccctccgtcgctctccctgctgttggtgcttctagggttgggaggtcggagattgcgcgcagaaccgggcgatggggcccagacatgggctaggttctcacgccctcccgcacctgaagccgccggactcttccagggaactttccccgatggtttcctgtgggccgtcggctccgctgcctatcagaccgaggggggctggcagcaacatgggaagggcgccagcatatgggacacattcactcaccatcccttagcaccccccggggattctcggaacgcaagcctgcctctcggcgcaccatctccactccagccagccacaggggatgttgccagcgatagctataataatgtatttcgggacactgaggcccttagagagctgggcgtgactcactatagattctcaatcagctgggcccgagtcctgccgaacgggagtgcgggtgtacccaacagagaaggactgcggtactataggagactgctcgagaggctcagagagctgggagtacagcccgtcgtcaccctgtaccactgggacctgccacagcgccttcaggacgcatatggcggctgggctaatcgagcgctggctgatcattttagagactacgccgaactatgcttcagacactttggcggacaggtcaaatattggattacaattgacaacccctacgtggtggcttggcacggatacgccaccggaagactggcaccagggattcggggctctccccggctcggctacctcgtggctcacaatttgctactggcccatgcgaaggtttggcatttgtacaacacttcttttcggcctacgcaaggcggccaggtctctatcgcattgtccagccactggattaatccacgccgtatgacagatcactcaatcaaggagtgccagaagagcctggattttgttctgggctggtttgctaaaccggtgttcatcgacggcgactatcctgaatctatgaagaataacctttctagtatcctgccggacttcactgagagtgagaagaagtttatcaaaggaacagcggactttttcgccttgtgcttcggacccaccctgtctttccaactgctcgatccccacatgaagttccgccagctggagagtcccaaccttcgtcagctcctctcatggattgatcttgaatttaatcatcctcaaatcttcatcgtcgaaaatggctggtttgttagcggcactaccaaacgcgacgatgccaagtatatgtactacctgaaaaagtttatcatggagactctgaaggccataaaattggacggcgtggatgtaatagggtatactgcatggtcactcatggatggcttcgagtggcaccgcggctatagcatccgcagaggcctgttctacgtggactttctgagtcaggataaaatgcttcttcccaagtccagcgcactattctatcagaagcttatcgagaagaacggattcccacctttgcctgagaatcagcccctcgagggtacctttccatgtgacttcgcatggggcgttgtggacaactacatccaggtcagtcaattgacaaagcccatcagctcccttactaagccttaccac

SEQ ID NO: 15267 - DNA, 1647 bp, synthetic construct; identical to SEQ ID NO: 15266
  misc_feature 1..1647: note = source = /note="Description of Artificial Sequence: Synthetic coding sequence"
  source 1..1647: mol_type = other DNA

SEQ ID NO: 15268 - DNA, 1647 bp, synthetic construct
  misc_feature 1..1647: note = source = /note="Description of Artificial Sequence: Synthetic coding sequence"
  source 1..1647: mol_type = other DNA
atgccggccagcgcccctccacgtcgaccacgccctccacctccatcgctctcgctgttgctggttctgctgggcctggggggaaggagactcagagccgaaccgggcgacggagcgcagacctgggccagattctcgcggccaccggcaccggaggctgccggactgtttcagggcacttttccagacggatttctctgggcagtcggctccgcggcataccagaccgaaggtggttggcaacagcatggcaaaggagcttccatctgggacactttcacccaccatccactggccccaccgggagactcaaggaacgcctcactcccgttgggtgctccgtcccctctgcagccagcaactggagatgtggcaagcgattcatacaacaacgtgtttagggatactgaagccctgcgggaactgggagtgactcactaccgcttctcgatcagctgggcacgggtgctgccgaacggttcggccggagtgccgaaccgggagggactgagatactacagacggctcctggagagacttcgcgaactgggagtccaacctgtcgtgactttgtaccactgggatctcccgcagcgcctgcaggacgcctacggaggctgggctaatagagcgctggcggatcactttcgggactacgcagagctgtgcttccgccatttcggtggacaagtcaaatactggatcaccatcgacaacccgtacgtcgtcgcctggcacgggtacgccactggacgcttggcccctggaatccgcggaagcccacggctgggctacctggtggcacacaatctgcttcttgcacacgctaaggtgtggcatctgtacaacacttcgttccggccgacccagggcggtcaggtcagcatcgcactttcttcccattggatcaaccctagacgcatgaccgaccactccatcaaagagtgtcaaaagtccctggactttgtcctgggttggtttgcgaagccagtgtttatcgatggagattacccggaatcgatgaagaacaacctttcgtcgatcctcccggatttcaccgaatccgagaaaaagtttatcaagggtactgctgacttttttgcgctctgcttcggaccgaccctcagctttcagctcctggacccgcacatgaaatttcgccaactcgaatccccaaatcttcggcaactgctcagctggatcgacctcgagttcaaccatccgcagattttcatcgtggaaaatggatggttcgtttctggtactactaaacgcgatgacgctaagtatatgtactacctgaagaagttcatcatggaaaccctgaaggccatcaaactggatggagtggacgtgatcggctacactgcttggagcttgatggacggattcgaatggcaccgcggatactccatccgccgggggctcttttatgtggacttcctgtcccaggacaaaatgctgcttccgaagtcgtcggctctgttctaccaaaaactgatcgagaaaaatggatttccgcccctccccgaaaaccaaccgctcgagggtactttcccctgcgacttcgcatggggcgtggtggacaattacatccaagtcagccagctcactaagccgatcagctcgctcaccaagccgtaccac

SEQ ID NO: 15269 - DNA, 1647 bp, synthetic construct; identical to SEQ ID NO: 15268
  misc_feature 1..1647: note = source = /note="Description of Artificial Sequence: Synthetic coding sequence"
  source 1..1647: mol_type = other DNA

SEQ ID NO: 15270 - DNA, 1647 bp, synthetic construct
  misc_feature 1..1647: note = source = /note="Description of Artificial Sequence: Synthetic coding sequence"
  source 1..1647: mol_type = other DNA
atgccagcctccgccccaccccgacgtcctcgaccaccgccgccgagtctctcgttattgctagttctcttgggattgggaggtagacgattaagggctgagccaggtgatggtgctcaaacttgggctcgattctcccggcctccagctccagaggccgccggactcttccaaggaacttttccagatggtttcctttgggccgttggaagcgccgcataccaaaccgagggaggctggcagcaacacggaaagggcgcaagtatttgggatacctttactcatcacccgcttgcgcctccaggagattcacgtaacgcgtcccttccattgggagcaccgagcccgttgcaaccagcaaccggagatgtggctagtgacagttataacaacgtctttagggatacagaggccttgagggagttaggagtaactcattataggttttcgataagctgggcacgtgtgctcccgaatggatccgctggagtgcccaatcgtgagggactacgatattatcgaaggctacttgaacgcttacgtgaattgggcgtgcaaccggtggtgactctttaccactgggatttgccacaacgtcttcaagatgcatatggaggatgggcaaacagggcattggcagatcactttcgtgactacgcggaattgtgcttccgacattttggagggcaagtgaaatattggattactatcgataatccatatgtggttgcctggcacggctacgcgaccggtagactcgctccaggtatccggggtagtccacgacttggatacttggtagctcataatcttcttctagctcacgctaaggtttggcacctttataatacatcgttccgaccaactcaaggaggacaggtttccattgcgctctcgtctcattggattaatcctagaagaatgacggatcactctattaaagaatgccaaaagtcgctagatttcgtgctggggtggttcgccaagccagtttttatcgacggtgactacccggaatctatgaagaataatctttcttcaattttgcctgatttcacagaaagcgagaaaaagttcattaaaggaacagcggacttctttgcgctctgctttggacccacactaagcttccaactgttggatccacatatgaagtttagacaacttgaatcaccaaatttgagacaattgctctcttggattgatttagaatttaaccatccacagattttcatagtggagaatggatggttcgtctcaggaacaacaaaaagggatgatgctaagtatatgtactatcttaaaaagtttatcatggaaaccctgaaagcaataaaattggatggagtagatgttattggatacacggcgtggtcacttatggatggattcgagtggcacagaggatattcgattcgtagaggccttttttatgttgatttcctatcccaggacaaaatgcttcttcctaaatcatcggctttgttctaccaaaagttgattgaaaagaatggatttccaccacttccggaaaatcaacctcttgaaggaacttttccttgtgatttcgcgtggggtgttgtggataattatattcaagtttctcaacttacaaaaccaatttcgtctttaacaaaaccataccat

SEQ ID NO: 15271 - DNA, 1647 bp, synthetic construct; identical to SEQ ID NO: 15270
  misc_feature 1..1647: note = source = /note="Description of Artificial Sequence: Synthetic coding sequence"
  source 1..1647: mol_type = other DNA

SEQ ID NO: 15272 - DNA, 1647 bp, synthetic construct
  misc_feature 1..1647: note = source = /note="Description of Artificial Sequence: Synthetic coding sequence"
  source 1..1647: mol_type = other DNA
atgccggcttctgccccaccgcgcagaccacggccccctccgccctcgctctccttgctgttggtgctcctcggactgggtgggcgcaggctccgcgccgaaccgggagacggagcacagacctgggctcgcttctcgcggccacccgcccctgaggcagccggtctgttccagggaacgtttccggacggatttctgtgggccgttggctccgcagcgtaccagactgagggtggctggcagcagcacggaaagggagccagcatctgggataccttcacccatcatccactcgcaccaccgggtgatagcagaaatgcgtccctgcctctgggagctccgagcccactccagccagcgactggagacgtggcgtctgacagctacaataacgtgtttcgcgacaccgaggctctgcgggaactgggcgttactcactacaggttctccatatcatgggcaagagtcctgccgaatggctcagctggagtgccaaatcgagaaggactgagatactaccgcagactcctcgagcgcctgagagaactgggggttcagcctgtggtgaccctctaccattgggatcttcctcagcggctgcaagatgcctatggtggatgggccaacagggctctcgccgatcactttcgggattacgccgagctttgcttccggcacttcgggggacaggtcaaatactggatcaccatcgataatccatacgttgtggcgtggcacggatacgcgacggggcggctggcgccggggattcgggggtccccgcgcctgggatatctggtcgcgcacaacctgctcctggcccacgcgaaggtgtggcatctctacaatacttccttccgccccactcagggcggacaggtgagcatcgccctctcgtcgcattggatcaacccgaggcggatgaccgaccactcgatcaaggaatgccagaagtcacttgattttgtgctgggatggtttgccaagcctgtgttcatcgatggagattacccggaatcgatgaagaataacctgtcctcgatcttgccggattttactgaatcggagaagaagtttatcaagggtactgctgacttcttcgcgctttgcttcggaccaaccctctcgtttcagctcctggacccgcacatgaagttcaggcagctcgagtccccgaacctgcgacagctcttgtcctggatcgacctcgagttcaaccacccccagatcttcattgtggagaacggttggttcgtgtctggtactaccaaacgcgatgacgcaaagtatatgtactatctgaaaaagttcatcatggaaaccttgaaggctatcaaattggacggcgtggacgtgattggatacaccgcatggtcgcttatggacggcttcgagtggcataggggctactcgattaggcgcggacttttctatgtcgacttcctttcgcaggataagatgctcctgccgaagtcgtccgctctcttttaccagaaactgattgagaaaaacggcttccctcctctgccggaaaaccagccattggagggtacctttccctgcgacttcgcctggggagtcgtggacaattacatccaggtgtcccaattgaccaaaccaatctccagcttgactaaaccgtaccat

SEQ ID NO: 15273 - DNA, 1647 bp, synthetic construct; identical to SEQ ID NO: 15272
  misc_feature 1..1647: note = source = /note="Description of Artificial Sequence: Synthetic coding sequence"
  source 1..1647: mol_type = other DNA

SEQ ID NO: 15274 - DNA, 1647 bp, synthetic construct
  misc_feature 1..1647: note = source = /note="Description of Artificial Sequence: Synthetic coding sequence"
  source 1..1647: mol_type = other DNA
atgccggcgtcggcgccgccgcgtcgaccgcgaccgccgccgccgtcgttatcgctattattagtactactaggtctaggtggtcgacgactacgtgcggaaccgggtgatggtgcgcaaacgtgggcgcgattttcgcgtccgccggcgccggaagcggcgggtttatttcaaggtacgtttccggatggttttctatgggcggtaggttcggcggcgtatcaaacggaaggtggttggcaacaacatggtaaaggtgcgtcgatatgggatacgtttacgcatcatccgctagcgccgccgggtgattcgcgtaatgcgtcgctaccgttaggtgcgccgtcgccgttacaaccggcgacgggtgatgtagcgtcggattcgtataataatgtatttcgagatacggaagcgttacgagaattaggtgttacgcattatcgtttttcgatatcgtgggcgcgagtattaccgaatggttcggcgggtgtaccgaatcgtgaaggtttacgttattatcgacgtctactagaacgtttacgagaactaggtgtacaaccggtagtaacgttatatcattgggatctaccgcaacgtttacaagatgcgtatggtggttgggcgaatcgtgcgttagcggatcattttcgagattatgcggaactatgttttcgtcattttggtggtcaagtaaaatattggataacgatagataatccgtatgtagtagcgtggcatggttatgcgacgggtcgtctagcgccgggtatacgtggttcgccgcgtctaggttatttagttgcgcataatttactactagcgcatgcgaaagtttggcatttatataatacgtcgtttcgtccgacgcaaggtggtcaagtatcgatagcgctatcgtcgcattggataaatccgcgacgtatgacggatcattcgataaaagaatgtcaaaaatcgttagattttgtactaggttggtttgcgaaaccggtttttatagatggtgattatccggaatcgatgaaaaataatctatcgtcgatactaccggattttacggaatcggaaaaaaaatttataaaaggtacggcggatttttttgcgttatgttttggtccgacgttatcgtttcaactattagatccgcatatgaaatttcgacaactagaatcgccgaatctacgtcaactactatcgtggatagatctagaatttaatcatccgcaaatatttatagttgaaaatggttggtttgtatcgggtacgacgaaacgtgatgatgcgaaatatatgtattatttaaaaaaatttataatggaaacgttaaaagcgataaaactagatggtgttgatgttataggttatacggcgtggtcgttaatggatggttttgaatggcatcgtggttattcgatacgtcgtggtttattttatgtagattttctatcgcaagataaaatgctactaccgaaatcgtcggcgttattttatcaaaaattaatagaaaaaaatggttttccgccgttaccggaaaatcaaccgttagaaggtacgtttccgtgtgattttgcgtggggtgtagtagataattatatacaagtttcgcaattaacgaaaccgatatcgtcgctaacgaaaccgtatcat

SEQ ID NO: 15275 - DNA, 1647 bp, synthetic construct; identical to SEQ ID NO: 15274
  misc_feature 1..1647: note = source = /note="Description of Artificial Sequence: Synthetic coding sequence"
  source 1..1647: mol_type = other DNA

SEQ ID NO: 15276 - DNA, 1647 bp, synthetic construct
  misc_feature 1..1647: note = source = /note="Description of Artificial Sequence: Synthetic coding sequence"
  source 1..1647: mol_type = other DNA
atgccggcgagcgcaccacctaggcgaccgcggccaccgccgccttccctgtccctcctcttggtgcttctcggactcggagggagacggttgcgggcagagcccggggacggagcccagacttgggcaagattcagtagaccgcctgcccccgaagcggccggtctgtttcagggtaccttcccagacggattcctctgggccgtgggctcggctgcctaccagaccgaagggggatggcagcaacatggcaagggagctagcatctgggacacgtttacgcatcacccactggccccgccgggggattcacgcaacgcatccctgccgcttggagctccgtccccactgcaaccggcaactggggatgttgcgtcagactcctacaacaacgtattccgcgacaccgaggcgctgcgggagttgggagtcacccattaccgcttctcgatctcctgggcccgggtcctccccaatggaagcgcgggagtcccaaatcgcgaaggcctgcgctattaccgcagactgttggagcggctgcgtgaactcggggtgcagccggtcgtgaccctctaccactgggatcttcctcagagactccaagatgcttacggtggatgggccaaccgggctctcgccgatcacttcagggattacgccgagctctgcttccggcatttcggcggacaggtgaagtactggatcactatcgacaacccgtatgtggtggcctggcacggatacgccactggacggctggcgccagggatcagaggttcaccgcgtcttggataccttgtcgcccacaacctgctgctggcccatgcaaaggtgtggcatctttacaatacctcatttaggccaactcagggaggccaggtgtcgatcgctctgtcgtctcactggatcaatcctcgccggatgaccgatcactccataaaggagtgccaaaagtcactcgacttcgtactgggttggtttgctaaaccagtgtttattgacggcgactaccccgaaagcatgaagaataatctgtcgtccatcctcccggattttaccgaatccgagaagaagttcatcaaaggtaccgccgactttttcgcactgtgctttggaccaaccctcagcttccagttgctggaccctcacatgaagttcaggcagcttgagtcgccgaacctccgacagcttctgagctggattgatctcgaattcaaccacccccaaatctttatcgtcgaaaacggctggttcgtgtctggcactactaagcgagatgacgctaaatacatgtactacctgaaaaagttcattatggaaactctgaaggcaatcaagctggacggggtggatgtaatcggctacaccgcctggtccctgatggacggattcgaatggcatcggggctacagcattcgcaggggactcttctacgtggatttcctgagccaagacaaaatgttgcttccaaagtccagcgcgctgttttaccagaaactgatcgaaaagaacgggttcccccctttgccggagaaccagccactggagggaacctttccctgtgacttcgcatggggagtggtggacaactatatccaagtgtcccagctgactaaaccgatctcgagcctcacgaaaccgtaccac

SEQ ID NO: 15277 - DNA, 1647 bp, synthetic construct; identical to SEQ ID NO: 15276
  misc_feature 1..1647: note = source = /note="Description of Artificial Sequence: Synthetic coding sequence"
  source 1..1647: mol_type = other DNA

SEQ ID NO: 15278 - DNA, 1647 bp, synthetic construct
  misc_feature 1..1647: note = source = /note="Description of Artificial Sequence: Synthetic coding sequence"
  source 1..1647: mol_type = other DNA
atgccagcgagcgcgccgccccggcgcccccgcccaccgccaccgtcgctgagcctccttctggtcctcctgggcctgggaggacgccgcctgcgggccgaaccgggggatggagctcaaacgtgggcgagattctcccgcccacccgcaccggaagctgcgggactcttccagggaacctttcctgacggatttttgtgggcggtcggatcggctgcgtaccagaccgagggagggtggcaacagcacggtaaaggagcgtcaatctgggacaccttcacccaccacccactggccccaccgggagattcccgcaacgcctctctgccactgggtgcgccttccccgctccaaccggcgacgggagacgttgcctcagattcgtacaacaacgtgtttcgagacaccgaagcactcagggagctcggagtgacccattacaggttctccatctcatgggctcgcgtcttgccaaatggatcagccggggtgcctaatagagaggggcttcgctactaccggaggctgctggaaagactgagggaacttggagtgcagcccgtcgtcactctttaccattgggacctgcctcagcgcctgcaagatgcttacggcggatgggccaacagagcccttgcagatcactttcgcgactatgccgaactttgcttccggcacttcggcggacaggtgaaatactggatcactatcgataatccttacgtggttgcgtggcatggatacgcgaccggtcggctggcccctggaattcgggggtcgcctcgcctgggttacctcgtggcacacaatctgcttctggcccatgcgaaggtctggcacctttacaacacctccttccggccgacccaaggaggacaagtgtcgattgccctgagctcgcattggatcaacccacggcgcatgaccgatcactccatcaaggagtgccaaaagtcattggatttcgtcctgggatggtttgccaagcccgttttcatcgacggcgactacccggaaagtatgaagaacaacctctcttccatcctgccagatttcactgaatcagagaagaaattcatcaaaggtaccgcagacttttttgcactgtgtttcggtccaaccctctctttccaactcctggacccgcatatgaaattcagacagctcgagtccccgaatctgcggcagctcctctcgtggatcgaccttgagttcaatcacccacaaatctttatcgtggaaaacggctggttcgtgagcgggaccactaagcgcgacgatgccaaatacatgtactatctgaagaagttcattatggaaaccctgaaggcaatcaagctcgatggtgtggacgtgattggatacacggcctggtcgcttatggacgggttcgagtggcacagagggtacagcatcagacgcgggctgttctacgtggactttctcagccaggacaaaatgctcctgcctaagtcatctgcgctcttctatcagaagctcatagaaaagaacggattcccgcctctccccgagaatcagcctctggaggggaccttcccgtgtgattttgcatggggggtggtcgacaactatattcaggtgtcgcaactcaccaaaccaatctcatcgctgacgaagccataccac

SEQ ID NO: 15279 - DNA, 1647 bp, synthetic construct; identical to SEQ ID NO: 15278
  misc_feature 1..1647: note = source = /note="Description of Artificial Sequence: Synthetic coding sequence"
  source 1..1647: mol_type = other DNA

SEQ ID NO: 15280 - DNA, 1647 bp, synthetic construct
  misc_feature 1..1647: note = source = /note="Description of Artificial Sequence: Synthetic coding sequence"
  source 1..1647: mol_type = other DNA
atgcctgctagcgcgccacctaggaggcccaggcctcccccccccagcctgtctctgcttttagtgcttcttggcctaggaggacgaaggttgcgagccgagcctggggacggcgcccaaacctgggccaggttctcccggcctccagccccagaggccgccggccttttccagggaacattccccgatgggttcttgtgggcggttggatctgccgcgtatcagactgaaggtggttggcaacagcatggcaaaggtgccagtatctgggacacgttcacccaccacccgttggcccctcctggcgatagcagaaatgcctctctgcctttgggagctccctctcccctccagcccgcaacaggggacgttgcaagtgacagttacaataacgtgttccgggacaccgaggctcttagagagttgggcgtcacgcattatagattctctatcagctgggcccgtgtgctgcccaatggcagcgcgggggtgccaaatcgcgagggcctacgctattataggcggctgctggaacgcttgcgggagctgggtgtacagccggttgtgaccctctaccattgggatctgcctcagcgacttcaggacgcatatggtggatgggctaatagagcactcgcagatcacttccgtgactatgcggagttatgtttccgtcatttcggaggccaggttaaatattggataacaattgacaatccatacgtggtggcctggcatggatatgccactgggcgattagcccctggcattaggggttctccaagacttgggtatctggtcgcacacaacctgctgctggcacacgccaaggtgtggcacctgtacaacacatccttccgccctactcagggaggacaggtgtccattgctctttccagtcactggatcaatccacgtcggatgacagatcactccatcaaagaatgtcaaaaaagcctcgattttgtgctgggctggtttgccaagcccgtcttcattgatggcgattaccccgagagcatgaaaaacaacttgagctcgatcctgcctgacttcacagaaagtgaaaagaaattcattaaggggacggctgacttctttgccttatgctttggacccactctttcatttcaattgctggatccacatatgaaatttcggcagctggagagtccgaatctgcgacaattactttcctggattgatttggagtttaatcacccacagattttcatcgtcgagaacggctggttcgtgtcggggaccacaaagagagatgatgcaaagtacatgtactatctgaagaaattcatcatggaaaccctgaaggcgattaagctggacggggttgacgtaattggatacaccgcgtggagcctgatggacggctttgaatggcaccggggctactccatcaggcgtgggctgttctatgttgatttcctcagtcaggacaagatgctgctgcctaagagttccgctctgttttatcagaaattgatagagaaaaatgggttcccacctttaccagaaaatcagccacttgaggggacctttccgtgcgattttgcgtggggtgtggttgacaactatatacaggtttcgcagctcacaaaacccatctctagtcttaccaaaccatatcac

SEQ ID NO: 15281 - DNA, 1647 bp, synthetic construct; identical to SEQ ID NO: 15280
  misc_feature 1..1647: note = source = /note="Description of Artificial Sequence: Synthetic coding sequence"
  source 1..1647: mol_type = other DNA

SEQ ID NO: 15282 - DNA, 1647 bp, synthetic construct
  misc_feature 1..1647: note = source = /note="Description of Artificial Sequence: Synthetic coding sequence"
  source 1..1647: mol_type = other DNA
atgccggcgtcagctccgccacgcaggcctcggccacctcctccgtcgctgtcgctgcttctggtcctgctgggactggggggaaggcggctcagggcagagccgggcgacggtgcgcaaacttgggcccgcttctcgcggccaccagctccagaggctgcggggctgttccaaggcacctttccagacggcttcctgtgggcggtgggaagcgcggcctaccagaccgaggggggctggcagcagcacggcaaaggagcctccatttgggataccttcacgcatcacccgctcgctcccccgggagactcacggaatgcatccttgccgctcggagccccgtcccctttgcaaccagcaactggagatgtcgcatccgatagttacaataatgtgttcagagacactgaagccctccgcgaactcggagtgacccactaccggttcagcatcagctgggcacgcgtgctgcccaatggatccgccggagtgcctaaccgcgaggggctgcgctactaccgccgcctgttggagcgcctcagggagctgggggtccagcccgtggtgaccctgtaccattgggacctcccgcagcgtctgcaagatgcttatggaggatgggcaaatagggcattggcggatcacttccgggactacgcggaactttgcttccgccacttcggaggccaggtcaaatactggatcacgattgacaacccttacgtggtggcctggcatggatacgcaaccgggcggctggcacccgggatccgtggatcccctcgcctgggatacctggtggcccataatctgctcctcgcccatgcgaaggtgtggcacctttacaatacctcgttccgccctactcaaggcggacaggtgagcatcgctctgtcaagccactggatcaatccgagacgaatgaccgaccacagcatcaaggaatgccagaaatccctcgatttcgtgctgggctggttcgccaagccggtgttcatcgatggagactaccccgaaagcatgaagaacaacctgtcatccattctgccggatttcactgagtctgaaaagaagtttatcaaggggactgccgatttcttcgcactgtgctttggtcctaccctctctttccaactgctcgatccacacatgaaattccggcagctggaatcacctaatctgcggcaactgctgtcctggattgacctcgagtttaaccatccgcagatcttcatcgtcgagaacggctggttcgttagcgggactactaagcgggatgatgctaagtacatgtattatctcaagaagttcataatggagactctgaaggccatcaagctcgacggagtggacgtcatcggatacacggcctggtcattgatggatggttttgagtggcacaggggctactcgattagaagaggactgttctacgtcgacttcctgtcccaagacaagatgcttctgccaaagtcctctgcgctgttttaccagaagctcattgagaagaatgggttcccgccactgccagaaaaccaaccgctggaggggaccttcccatgcgatttcgcatggggagtcgtggataactacatccaggtgtcgcagctgaccaagccaatctcgtctctgactaagccataccat

SEQ ID NO: 15283 - DNA, 1647 bp, synthetic construct; identical to SEQ ID NO: 15282
  misc_feature 1..1647: note = source = /note="Description of Artificial Sequence: Synthetic coding sequence"
  source 1..1647: mol_type = other DNA

SEQ ID NO: 15284 - DNA, 1647 bp, synthetic construct
  misc_feature 1..1647: note = source = /note="Description of Artificial Sequence: Synthetic coding sequence"
  source 1..1647: mol_type = other DNA
atgcctgcatctgctcctcctagacgcccaaggccgccccccccatctctgagcctgctgctcgtgctgctcggacttggcggcagaagacttcgtgcggagcccggggatggagcccagacctgggcccggttttcacggcctcccgcccctgaggccgcgggcctgttccagggcacgttccccgacggcttcctgtgggccgtgggctcagccgcataccagacagagggaggctggcaacagcacggcaagggcgcatccatatgggatacatttacacaccatccattggcaccgcccggtgatagcaggaacgcctctctgcctctgggagcacctagccccctgcagccggctaccggagatgtcgccagcgactcatataataatgtcttccgcgatactgaggcactgagggagcttggcgtaactcattatcgtttttcaatcagctgggccagagtactgcccaacggtagcgcgggggtgcccaatagggaaggtctgcggtactatcggcgcctcctggagaggctacgggaactgggggtacagcctgtggtgacactctatcactgggacctcccgcagaggctccaggacgcttatggtggctgggcgaatcgggccctagctgaccactttcgggattacgccgagctctgttttaggcactttgggggccaggttaaatactggatcacaatcgataacccctacgtagtggcttggcatgggtacgcaaccggtagactggcccctggtatccggggttctccacgcctcgggtacttggtagcccacaacctccttctggcccacgccaaagtgtggcatctgtataatacgtcgtttcgaccgacgcaaggagggcaggtgtctatagctctgtcatctcattggatcaaccctcgccgtatgacggaccattccattaaagaatgtcagaagagtctggactttgtcctaggttggttcgctaaacctgtattcatcgacggtgactacccagaatccatgaaaaataatctgtctagtattctgcctgatttcacggagtcagaaaaaaaattcatcaaaggtaccgccgacttctttgccctgtgtttcggaccgacgcttagcttccaactgttggatccacatatgaaatttaggcaactggagagtcctaacctccgtcagctcttaagctggatcgacttggagtttaatcatccccaaatttttatagttgagaatggctggttcgtgtctggtaccaccaaacgggacgacgcaaagtacatgtactacctgaagaaattcattatggaaacactgaaagccatcaaattagatggggtcgatgtgatcggatacaccgcttggtctctaatggatggctttgagtggcatcgcggatacagcatccgaagaggtctgttttacgtggatttcctgtctcaggacaagatgttgcttcctaagtcctcagccctgttctaccagaaattgatagaaaaaaatggctttcctccactccccgagaatcagcctctagaaggaacatttccttgtgacttcgcatggggcgtggtagacaattacatccaggtttcccagctgaccaagcctattagttctctgacaaagccataccat

SEQ ID NO: 15285 - DNA, 1647 bp, synthetic construct; identical to SEQ ID NO: 15284
  misc_feature 1..1647: note = source = /note="Description of Artificial Sequence: Synthetic coding sequence"
  source 1..1647: mol_type = other DNA

SEQ ID NO: 15286 - DNA, 1647 bp, synthetic construct
  misc_feature 1..1647: note = source = /note="Description of Artificial Sequence: Synthetic coding sequence"
  source 1..1647: mol_type = other DNA
atgcctgcatccgcaccacctaggcgtccccggccgcccccaccatcgctgtccctcctcctggtgctgcttgggctgggcggccgtagactcagagcagagcccggggatggtgcccaaacctgggcacgattttcccgacctcctgcacctgaggccgctgggctgtttcaaggcacctttcccgatggttttctctgggcggtgggatcggcagcgtaccagactgaagggggatggcaacagcacggtaagggagcatcgatttgggatacctttacccatcatccactggccccgcctggtgactcccgaaacgcgtctctgccacttggagcaccatcgcctctgcagcccgctactggagatgtcgcctcagatagctacaacaacgtgttccgcgataccgaagcactgagagaactgggcgtgacccattacaggttttcaattagctgggcgcgagtgcttcctaatggaagcgctggggtgcccaacagggaaggactgagatactatcggcggcttctggaacgtctgcgggagcttggcgtgcagcccgtggtcactctgtaccactgggatctgcctcaacggctccaggacgcctacggaggatgggcaaaccgcgctcttgctgatcactttcgagattacgcagaactgtgctttagacactttggtggacaggtgaagtactggattactattgataatccttatgtcgtggcctggcacggatacgcaacgggtagactggcaccaggcattcgcggctcgccccggctgggataccttgtcgcgcataatctgctcctcgcgcacgcaaaagtctggcatttgtacaacacttcgtttcgaccaacgcaaggtggtcaagtgtcgatcgcactttcaagccactggatcaatccccgacgtatgactgatcattccatcaaggagtgtcagaagtcccttgactttgtgcttggttggtttgcaaaacccgtgttcatagatggagattaccctgagagcatgaagaataacctttcaagcattctgcccgacttcaccgagtccgaaaagaagttcattaaaggcactgccgactttttcgccctgtgctttggtccaactctttcgttccaactgcttgatcctcacatgaagtttagacaactggaatctcctaacctgaggcaactgctttcatggatagacctggagtttaatcacccacagattttcattgtggagaatggctggtttgtctctggcactaccaagagagatgatgcaaagtatatgtactatctgaagaaattcatcatggaaaccctgaaagcaataaagctggatggggttgatgtcatcggctacactgcgtggagcctcatggatggtttcgaatggcatagaggttactcgattcgccgaggtttgttctacgttgatttcctctcccaagataagatgctgctgccaaagtcatcggccctgttctaccaaaaacttatcgagaagaacggatttcccccacttcctgaaaaccaaccgcttgagggaacctttccttgtgactttgcatggggagtggtggataactacattcaggtgtcacagctgactaagcctatatcgtctcttactaagccttaccat

SEQ ID NO: 15287 - DNA, 1647 bp, synthetic construct; identical to SEQ ID NO: 15286
  misc_feature 1..1647: note = source = /note="Description of Artificial Sequence: Synthetic coding sequence"
  source 1..1647: mol_type = other DNA

SEQ ID NO: 15288 - DNA, 1647 bp, synthetic construct
  misc_feature 1..1647: note = source = /note="Description of Artificial Sequence: Synthetic coding sequence"
  source 1..1647: mol_type = other DNA
atgccggcgtccgctccaccgcgccggcccaggcctccgccccctagcttgagcttgttgctggtcctgctgggactcggaggacggcggctcagagcagaaccgggcgacggggcgcagacctgggcgcggttctcacgcccgccggctccggaagctgcggggctgttccagggaaccttccctgacggctttctgtgggcagtcggttcagcagcctaccaaacggagggaggatggcagcaacatggaaaaggagcgtctatttgggacaccttcacccaccatccgttggcaccgccgggggactccagaaatgcctcactgccactcggggccccgtctcctctgcagccggccacgggggacgtggcctccgactcctacaacaacgtgtttcgcgacactgaagcactccgggagctcggtgtgactcactaccggttttcaatctcatgggcccgggtcctgccaaatggatccgcgggagtgccgaacagggaaggcctcagatactaccgcaggctgctggaaaggcttagggagctgggtgtgcaaccagtggtgaccctctaccactgggatctgcctcagcggctgcaggatgcgtacggcggatgggccaacagggctctggccgaccacttcagagattacgccgaattgtgcttccgacatttcggaggacaggttaagtactggatcaccatcgacaacccgtatgtcgtggcctggcatggatacgctacgggacggctggctccgggaatccgcggaagcccgcgcctgggttaccttgtggcccataacctgctcctcgcgcacgctaaggtgtggcatctgtacaacacgagcttccgcccgacgcaaggaggacaagtgtcgatcgcccttagcagccactggatcaatccgcgccggatgactgaccactcgatcaaggagtgtcagaagtcccttgatttcgtgctggggtggttcgccaagccagtgttcatcgatggcgactacccggaatcgatgaagaataacctgagctccattcttcctgattttacggagtcggagaaaaagttcataaaggggactgctgatttctttgccctgtgcttcggaccaactctttcgttccagctgttggatcctcacatgaaattccgccaactggaatcacccaaccttagacagctgctgtcctggatcgacctggagtttaaccacccccagattttcatcgtggagaacggttggttcgtgtcaggcactactaagagagatgatgccaagtacatgtattatcttaagaagtttatcatggaaaccttgaaggcaatcaaactggacggggtggacgtgatcgggtatactgcatggtcattgatggacgggttcgagtggcacagaggatattcgatccggcgcggcctcttctatgtcgacttcctgtcgcaggacaagatgctcttgccgaaatcgtcggccctcttctaccaaaagctgatcgaaaagaatgggtttcccccactcccggagaatcagcctctggaaggcaccttcccgtgcgacttcgcttggggagtggtggacaattacattcaggtgtctcagctgaccaaaccaatctcatcgctgactaaaccataccac

SEQ ID NO: 15289 - DNA, 1647 bp, synthetic construct; identical to SEQ ID NO: 15288
  misc_feature 1..1647: note = source = /note="Description of Artificial Sequence: Synthetic coding sequence"
  source 1..1647: mol_type = other DNA

SEQ ID NO: 15290 - DNA, 1647 bp, synthetic construct
  misc_feature 1..1647: note = source = /note="Description of Artificial Sequence: Synthetic coding sequence"
  source 1..1647: mol_type = other DNA
atgccagcttcggctccgcctcgacgcccaagacccccgccgccctcgctctcgttgcttctggtcctcctcgggctcgggggacgcaggcttcgcgctgaaccaggagatggggcacagacgtgggcccggttctcgaggccacctgcccccgaagcagctggcctgttccaaggaacgttcccggatggttttctctgggcggtgggaagtgctgcgtaccaaaccgagggaggatggcaacaacatggtaaaggggcgtcgatctgggatactttcacccaccatccgttggcgccgcccggagacagccggaacgccagccttccacttggagccccaagcccactccagccggcaaccggagatgtggcgtccgactcatacaataacgtgttcagagacactgaagccttgcgggaactcggagtgacccactacaggttttccatctcgtgggcccgggtgttgcccaatgggtcagccggcgtgccgaaccgcgaaggactgcgctactaccgcaggctgctggagcgcctgcgcgaactgggggtgcagccagtggtaactctgtaccattgggatcttccgcaacgactgcaagacgcgtacggtggatgggcgaacagagcactggctgaccattttcgggattacgcagagctgtgtttccgccacttcggaggccaggtgaaatactggatcaccatcgataatccgtacgtcgtggcctggcacggttacgctaccggccgtctggcaccaggaatccgcggaagcccgagactgggctacttggtagcacacaatctgttgctcgctcatgcgaaggtctggcacctgtacaacacttccttccgtcctacgcagggcggccaagtctcgatcgctctgtcgagccattggatcaacccacgcagaatgaccgatcacagcatcaaagagtgtcaaaagtcactggacttcgtgctgggctggttcgccaagcccgtgttcattgacggtgactaccccgaatctatgaagaacaatctgtcatcgattctgccagacttcactgagagcgaaaagaagtttatcaagggaaccgctgatttcttcgccctctgcttcggacccaccctttccttccagctcctcgacccacacatgaagttccggcaactcgagagcccgaacctcaggcagcttctgtcatggatcgacttggagtttaaccatcctcagattttcatcgtggagaacggatggttcgtttccggaactaccaaacgagatgacgccaagtatatgtactaccttaagaaattcattatggaaacccttaaggcaataaagctcgacggtgtcgacgtgatcggttacactgcatggtctttgatggatggattcgaatggcaccgggggtactctatccgcagaggattgttctatgtggactttctgtcccaagacaaaatgctgctgccaaaatcctccgcactcttttaccagaagctgatcgaaaagaatggattccctccgcttcccgagaaccagcctctggaagggacttttccgtgtgacttcgcgtggggagtggtggacaattacattcaggtgtcccagctgaccaagcccattagctcactgaccaagccgtaccac

SEQ ID NO: 15291 - DNA, 1647 bp, synthetic construct; identical to SEQ ID NO: 15290
  misc_feature 1..1647: note = source = /note="Description of Artificial Sequence: Synthetic coding sequence"
  source 1..1647: mol_type = other DNA

SEQ ID NO: 15292 - DNA, 1647 bp, synthetic construct
  misc_feature 1..1647: note = source = /note="Description of Artificial Sequence: Synthetic coding sequence"
  source 1..1647: mol_type = other DNA
atgcccgcttcggcacctccgcgcagacctcggcctccccctccttccctttccctgcttcttgtgttgctcggacttggcggccgcagactgcgggccgaacctggcgatggcgcgcaaacctgggccagatttagccgcccaccagcaccagaggcagccggactgtttcagggtacttttccagacggattcctttgggctgtgggttcggcagcttatcaaaccgaaggtggatggcagcaacatggtaaaggggcatccatttgggacaccttcactcatcaccccctcgcacctcccggggattcgcggaacgcctcacttccactgggagcacccagccctctgcagcccgcgactggagatgtggcctctgattcgtacaacaacgtgtttagagataccgaggcattgcgagaactgggcgttactcattacagattctcgatcagctgggctcgcgtccttcctaacgggtctgcaggtgtccctaatcgggagggtcttaggtattacagaagattgctggagaggctgcgggaattgggagtgcaacctgttgtcactctctatcattgggacctcccacagagactccaagatgcctacggtggttgggccaaccgggcactggcagatcatttccgtgattatgcagaactttgttttaggcactttggaggccaggtgaagtattggattaccattgataacccctacgtggtggcctggcatgggtacgcgaccggaagattggcgcctggcataaggggatcgcctcgactgggctatttggtggcacataacttgcttctggcccatgcaaaggtctggcacctgtacaacacttcgtttaggccaactcagggtggccaagtgtcaattgcactgagctcccactggattaatccgaggcggatgacggaccattccatcaaggaatgccaaaagagcctcgatttcgtgctgggctggttcgcgaagcctgtgtttattgatggggactaccctgagtctatgaagaacaacctgtcctcgattcttcccgatttcactgagtccgaaaagaaattcattaaaggaacggcagatttcttcgcactctgtttcgggccaaccctttcctttcaattgcttgatccgcatatgaagtttcggcaacttgagtcacctaatctgcgccaactcctctcgtggatcgatctcgagtttaaccatcctcagatattcatagtggagaacggttggtttgtgagtggaaccacgaagcgagacgatgctaaatacatgtactacctgaagaagttcatcatggagacgctcaaggcgatcaaacttgatggtgtcgatgtcattggatacaccgcatggtcactgatggatggatttgaatggcatagaggctactccatccgccgcgggctcttctatgtcgacttcctctcccaggacaagatgctcctcccaaagtccagcgcattgttttaccagaaactcatcgaaaagaacggtttcccaccactgcctgaaaaccaaccacttgaaggaacctttccttgtgattttgcatggggagttgtggacaattacattcaagtctcccagctcaccaagccaatctcgtcgttgaccaagccttaccat

SEQ ID NO: 15293 - DNA, 1647 bp, synthetic construct; identical to SEQ ID NO: 15292
  misc_feature 1..1647: note = source = /note="Description of Artificial Sequence: Synthetic coding sequence"
  source 1..1647: mol_type = other DNA

SEQ ID NO: 15294 - DNA, 1647 bp, synthetic construct
  misc_feature 1..1647: note = source = /note="Description of Artificial Sequence: Synthetic coding sequence"
  source 1..1647: mol_type = other DNA
atgcccgcttctgcgcccccgcgtcgccccaggccgcctccgccctccctgagcctgctgctcgtcctgctgggcttggggggccgccgcctgagggccgagccgggagacggagcccaaacgtgggccaggttttctcgaccgcccgcccctgaagcggcggggctttttcagggaactttcccagatggtttcctgtgggctgtgggttctgccgcataccagacagaaggggggtggcagcagcacggcaagggcgcttctatttgggatacattcactcaccatccactcgctcccccaggagatagccggaacgccagcctgcctctgggtgcgccgagccctctgcagccagctaccggcgatgtggcctctgacagctacaacaatgtcttccgcgatacagaggcattaagagagctgggcgtgactcattataggttttcgatctcctgggcccgcgtcctgcccaacgggagcgcgggggtccccaacagagagggtctcagatattaccgccggctgctcgagagattgagagagttaggagtgcagccggtagtcacactgtaccactgggacctgcctcagaggctacaggacgcttatggaggctgggccaaccgcgcgcttgctgatcattttcgcgattatgccgaattatgtttccggcacttcggaggccaggttaaatactggataacaatcgataacccttacgtggttgcctggcacggctacgctacgggtaggcttgctccggggatcagagggagcccgcgcttgggatatctggtggcacataatctactgttagcccatgccaaggtttggcatctgtacaacacgagtttcagacctacacaggggggtcaggtgtctattgccttatcctcccattggattaatcccaggcgaatgaccgatcacagtattaaggagtgccaaaagtccctcgactttgtgctcggttggttcgcaaagcctgtctttatcgatggagactatcccgagtccatgaaaaataacctgtcatcgatcctgcccgacttcacagagtccgagaagaaattcatcaagggcaccgcggacttctttgcactctgtttcgggccaaccctgagtttccaactactggatcctcatatgaagttccggcagctggagtcaccaaacctgagacagctgctgtcatggattgacttggaattcaaccatccccagattttcattgtggaaaatggctggttcgtttcagggaccacgaagagggatgatgctaagtatatgtactacctaaagaaattcatcatggagacgctgaaggcgatcaaactggacggcgtcgacgtgatcgggtacaccgcatggagccttatggatgggtttgagtggcatcggggctattccatccggcgaggcctattctacgtggattttctctctcaggacaagatgcttttgccaaagtccagtgcattgttctaccagaaactgatcgagaagaatggattccctccattacctgaaaaccagccactggagggcacctttccatgtgacttcgcttggggcgtcgttgataactacatccaggttagccagctgacaaagcctatatcctctctaacaaaaccgtaccac

SEQ ID NO: 15295 - DNA, 1647 bp, synthetic construct; identical to SEQ ID NO: 15294
  misc_feature 1..1647: note = source = /note="Description of Artificial Sequence: Synthetic coding sequence"
  source 1..1647: mol_type = other DNA

SEQ ID NO: 15296 - DNA, 3036 bp, synthetic construct
  misc_feature 1..3036: note = source = /note="Description of Artificial Sequence: Synthetic coding sequence"
  source 1..3036: mol_type = other DNA
atgccagcctccgccccgcctagacgcccacgaccgccaccgcctagcctgagtctgctcctggtcctgctgggactggggggtagacgcttgcgtgccgagccaggcgacggagcccagacatgggctagattctccaggccaccggcaccagaggccgcggggctctttcagggcacattcccagacggcttcctgtgggctgtcggctccgctgcctatcagaccgaaggcggctggcaacagcatggtaagggggcctccatttgggacacgttcacacaccacccactcgctcctccaggtgattcgcggaatgcctccctaccacttggcgcaccaagcccgttgcagccagccacaggcgacgttgcttccgatagttacaataacgttttccgagataccgaggccctgagggagctgggggttactcactacagattctcaatcagctgggcgagggttctaccaaacggcagcgcaggcgtgcctaatagggagggattgaggtattatagacggttgcttgagcggctgagagaactgggcgtccagcctgttgttacactgtatcactgggacctgccccagaggttgcaggatgcttacggggggtgggctaacagagctttagctgaccacttccgcgattacgcagagctgtgcttccggcacttcgggggtcaggtcaagtattggataactattgacaacccatacgtcgtcgcttggcacgggtacgcaaccggacgacttgctcccggtatccgcggctctccgcgtctcggctacttggtggctcacaatctcctcctcgctcacgcaaaggtatggcacctctacaacacctcttttagacccacacagggcgggcaggtgtccattgctttgtcctcccattggatcaaccctcgcaggatgaccgaccacagtatcaaggagtgtcagaagtcattggattttgttttgggctggtttgccaagcccgtgttcatagatggtgattatccagaatctatgaagaataacttgagctccatactgcccgattttacagaatcagaaaagaaatttatcaaagggacagccgatttcttcgccctgtgtttcgggccaaccttgagttttcaactactggatccccacatgaaattcagacagctggagtcccccaatctgcgccaacttctctcttggattgacctcgaatttaatcaccctcagatttttatcgtcgagaatggatggtttgtgtctggcaccactaagcgcgatgatgccaagtacatgtactatctgaaaaagttcattatggagactctgaaagctatcaagctggatggggtagacgtgatcgggtatacagcctggtccctcatggacggcttcgagtggcataggggctactccatccggcgaggcctcttctacgtggattttttgagtcaggataagatgctcctgccaaagtcctcagcactgttctaccagaaactgatcgagaaaaatggtttcccacctctgcccgaaaaccagccactggaagggacattcccttgtgactttgcgtggggagtagtggataattacatccaggtggacacaactctgagccagtttacggatttaaacgtgtatctctgggacgtccatcacagcaaacgcctgatcaaagtggacggagttgttaccaagaaaagaaaatcctactgcgtcgattttgcggccattcagccccagattgctttgttgcaggagatgcatgttacccacttcaggtttagcctggattgggcccttatcttgcccctgggtaatcaaagccaggtgaaccacactatcctgcaatattacagatgtatggcttcagaactcgtaagggtcaatatcacccctgtagtagcactgtggcagccaatggcccccaatcagggtctccctagacttcttgcacgacagggggcatgggaaaacccttatactgcactggccttcgcagagtatgcccgactgtgtttccaagagctcggccaccacgtcaagctgtggattactatgaacgagccatacaccaggaatatgacctacagcgctggccacaaccttctgaaggcccacgcgctggcgtggcacgtgtacaatgaaaagttcaggcatgcgcagaatggcaagatcagcattgctttacaggccgactggatagagccagcttgtcctttttctcagaaagataaagaagtggcagagagagtgctcgagttcgatattgggtggcttgccgagccgattttcggttccggcgactatccatgggttatgcgcgattggctgaatcagcggaataatttcctgcttccctatttcactgaagacgaaaaaaaactaattcagggaacgttcgattttttagcgctgagccattacacaacgatactggtggacagcgaaaaagaggaccccataaagtacaatgattatctcgaggtgcaggagatgacagatatcacttggctgaactcacctagccaggttgctgtcgtcccctggggattgcgtaaagttctaaactggctgaagttcaagtacggagacctccctatgtatattatttcaaatggcattgacgatggcctacacgcggaggacgatcagttgcgcgtttactacatgcagaattatattaatgaggcgctgaaggcacatattctcgacggcattaatctctgtggttattttgcctacagcttcaacgataggaccgctccacgatttggactctataggtacgccgccgatcagtttgaacccaaagcttcaatgaaacactatcgtaagatcatcgattccaatggcttcccagggccggagaccctcgaacgcttctgccccgaggagttcactgtatgtactgaatgttcttttttccacactcggaagagtctgctagcattcattgccttcctctttttcgctagcatcatctccctatccctcatcttctactattccaagaaaggcaggaggtcctataag

SEQ ID NO: 15297 - DNA, 3036 bp, synthetic construct
  misc_feature 1..3036: note = source = /note="Description of Artificial Sequence: Synthetic coding sequence"
  source 1..3036: mol_type = other DNA
atgccagcttctgcacctccacgaagaccacgacccccaccaccgtccctgtccctcctcctggttttgctcggactgggtgggcgacggctgagggctgaaccaggcgatggcgcgcagacatgggcaaggttttctcgtccaccagcaccagaagccgcaggcctttttcagggtacgttccctgacggctttctgtgggccgttgggtcagctgcatatcagacagagggaggctggcagcaacatgggaaaggggcctccatctgggacacattcacacaccatcccttggctcctcctggtgattcccgcaacgcatccctgccgttgggagccccttctcctttgcagcctgctacaggggacgtcgcaagtgactcttataataacgtgttccgagatacagaagccttgagggagctgggggtgacgcattaccgatttagcataagctgggctcgagtactgccaaatgggagcgcaggagttcctaaccgagaaggtctgagatactacaggcgactgctcgaaagactgagagagcttggagtccagcctgtcgtcaccctgtatcattgggatttaccccagagactgcaggacgcatacggagggtgggcgaatagagcattggctgaccatttcagagactatgcagaactctgtttccgtcacttcgggggccaggtgaagtactggatcaccattgacaatccttacgtggtggcttggcatggatacgccaccggacgcttagccccagggattcgaggtagcccccgattgggctacctagtagcccataacctgctgcttgctcatgcgaaggtgtggcatctgtataacacctcattcaggcctactcagggcggacaggtgtccatagctttgtcctcacactggataaaccccagacgaatgacggatcactccatcaaggagtgtcaaaaaagtctggattttgtcctgggatggttcgcaaagcctgtttttattgatggcgactatcctgagtctatgaaaaacaacctttcttctattctacccgacttcaccgaaagcgagaaaaagtttatcaagggcaccgcagatttcttcgcgctttgttttggtcccacactttcatttcaattacttgatccacacatgaagttccgccagttggagagccccaacttgaggcagctgctgagttggatagaccttgagttcaatcacccacagatattcattgtggagaacggatggttcgtgtccggcacaacaaaaagagacgatgccaaatatatgtattatttgaaaaagttcatcatggaaactttgaaggcgattaaactagacggggtcgatgtcattggctacactgcatggtccctcatggacggctttgagtggcatcgaggatactctatccgtcgagggctattttacgtggacttcctctcgcaggacaaaatgctgcttccgaaatcctcagccctgttctatcaaaaactcatcgaaaaaaacggcttccccccactgcctgaaaatcaacccttggagggaactttcccctgcgattttgcttggggggttgtggataactacatccaagtggacaccacactgtcacagtttacagacctgaacgtatatctctgggacgtgcaccacagcaagaggctcataaaggttgatggagtagtgaccaagaagcgtaaaagctattgcgtggatttcgcagcgatacagccgcagattgccctgctgcaggaaatgcatgtcactcacttcagattcagccttgactgggctctgatcctgcctctggggaatcagagccaggtcaatcacacaatactgcagtattaccgatgcatggcttctgaactggtcagggttaatataacacccgtggttgccctttggcagcctatggcacccaaccaggggctgccgcgactattagcgagacagggcgcctgggagaacccatacaccgcactcgcttttgccgagtatgctcgcttatgctttcaagaattgggacatcatgtgaaattatggataactatgaacgagccttacacaaggaatatgacatatagcgccgggcacaacctcttaaaggcgcatgccctcgcctggcacgtctacaatgaaaaattccgacacgcgcagaacggtaagatctcgatcgcacttcaggcagactggattgaaccagcatgccctttcagccaaaaggataaggaagtggcagagagggttttggaatttgacatcggctggcttgctgaacctatctttggttccggggactatccatgggtgatgcgggactggcttaatcagagaaataactttctccttccctatttcaccgaggacgagaagaaactcattcaaggaactttcgactttctagcactgtcgcattatacaacgatcctagtggattctgaaaaggaagacccaatcaaatacaacgattacctggaggtgcaggaaatgacagacatcacgtggctcaacagcccaagccaggtggctgtcgtaccatggggtctgagaaaggtgctcaactggctcaagtttaaatacggagacctgcctatgtacatcattagcaatgggatcgacgacggattacacgcggaagatgaccagctgcgagtgtactatatgcagaactatatcaatgaagccctcaaagcacatattcttgacggaataaatctttgtggttactttgcttattcctttaatgatcggacagccccacgatttggtctgtacaggtatgccgcagaccagtttgagccaaaggccagcatgaagcactatcgcaagatcattgatagcaatgggtttcccggaccggagacacttgaacgattttgtccggaagaattcaccgtgtgtaccgaatgctccttttttcacaccaggaaatctctcttggcttttatcgcatttctcttctttgcgtctattatcagcctgtccctgatattctattactccaagaagggcagaagatcttataag

SEQ ID NO: 15298 - DNA, 3036 bp, synthetic construct
  misc_feature 1..3036: note = source = /note="Description of Artificial Sequence: Synthetic coding sequence"
  source 1..3036: mol_type = other DNA
atgccagcctccgcaccccctcgacgtccgcggccaccccctccatccctgagcttactgttggtgttactgggattgggtggtcggcggctccgcgcagaacctggagacggtgcgcaaacatgggctcggttcagccgcccaccggcccccgaagcggcggggttatttcagggaaccttcccagatggattcctctgggctgtcggcagcgccgcttaccagactgagggcgggtggcagcagcacggaaagggagcatccatatgggacacttttacccaccatcctttagctcctccaggtgacagccgcaacgcatcactcccccttggtgccccaagtccactacaacccgctaccggagatgtggcttcagactcttacaacaatgtttttcgggacacggaggccctacgggagctgggtgtgacacactataggttttctatatcatgggcccgagtcctgccaaacggctctgccggtgtgccaaacagagaaggactgcgatattaccgacgtttgctggagcgtctgcgcgaattaggcgtgcagcccgtggttactctttaccactgggacctgccgcaacggctgcaagacgcttatggcggctgggccaacagagctttggctgaccactttcgggattacgcggagttgtgtttccggcacttcggaggacaagtgaagtactggattaccattgataatccctatgtggttgcttggcatgggtacgccaccgggcggcttgcaccaggaatccgaggctcccctcgcctgggatatttggtcgcccacaacctgctgttggctcacgcaaaggtctggcacctgtataacacttcatttcggccaacccagggtggccaggtgtctatcgccctcagctcacactggatcaacccccgaaggatgaccgaccactctattaaagagtgccagaaaagccttgatttcgtgctgggttggttcgccaagcctgtctttatcgatggtgattacccagagtctatgaagaataacctctcgagcattctgcctgacttcaccgagtctgaaaaaaaatttattaaaggcactgctgacttttttgctctctgctttggtcccacgctgagtttccagctccttgatccgcacatgaagttccgccagctcgagtcccccaatttgcgacagttgctgtcttggatcgacctagaatttaaccatcctcagatctttatcgtggaaaacggttggttcgtttctggcacaacaaagcgggatgacgccaagtacatgtactatctgaagaaatttataatggaaaccctgaaagccatcaaactggacggtgttgacgtcatcgggtatacagcctggtccttgatggatggctttgagtggcatcggggctactcgattaggcgaggcctgttctacgtcgactttctttctcaggataagatgctgctgccaaaatcctctgccctgttctatcagaaactaatagagaagaatgggttcccgccactccctgagaaccaaccactggagggaacattcccttgtgatttcgcttggggagtagtggacaactatattcaggtggacacgacattgtctcagtttactgacttgaatgtgtatctgtgggatgtgcaccactctaagaggctgataaaggttgatggtgtggtcactaaaaaacgcaagagctattgcgtggatttcgctgctatccagcctcagatcgcacttctgcaagaaatgcacgtcacccacttcaggttctcacttgactgggcccttattctgcccctcggaaatcagagccaggtgaaccacactatcctgcagtattaccggtgtatggctagtgagctcgtgcgggtgaacatcacccccgtcgttgcattgtggcagcctatggcacctaatcagggcctccctagactgctggccaggcaaggagcctgggagaatccctacactgccctggccttcgctgagtatgcccgtttgtgctttcaggagctaggccaccatgtaaaactttggataaccatgaatgaaccatatacgcgcaatatgacttactcagcgggacacaatttgctaaaagcacacgcgttggcatggcacgtatataatgagaaatttaggcatgcacagaatgggaagatttctatcgccttgcaggcggactggatagagccggcttgtcctttttctcagaaggacaaggaagtggccgaaagggtgctagaattcgacataggatggttggctgagccaatctttggttctggtgactacccatgggtgatgcgggactggctgaatcagaggaacaactttctcctcccctattttaccgaagatgagaaaaaacttatccagggcactttcgactttttggccttgtcccactatacgaccattctggttgattccgaaaaggaggatcccatcaagtacaatgactatctggaggtccaggagatgacagacataacctggctgaattcgcccagccaggtagccgtcgtaccttgggggttacggaaagtgctcaactggcttaaatttaagtacggagatctgcctatgtacattatctctaatggcatagacgacggactgcatgccgaggacgaccagctgagagtgtattacatgcaaaactatattaacgaagccttgaaggcccatatactggacggaatcaacctgtgcgggtacttcgcatactcgtttaatgatcgaacagcaccgagattcgggttgtataggtatgccgccgaccagtttgagccgaaagcgtccatgaagcactaccggaaaattattgactctaatggatttccaggacctgagacactcgagcgattttgtcccgaggaatttacagtctgtaccgagtgtagcttctttcatacccggaagtcactgctcgcgttcatcgcgtttctcttcttcgcatccatcattagcctgagcctgatcttttactatagcaagaagggcaggcggtcctacaag

SEQ ID NO: 15299 - DNA, 3036 bp, synthetic construct
  misc_feature 1..3036: note = source = /note="Description of Artificial Sequence: Synthetic coding sequence"
  source 1..3036: mol_type = other DNA
atgcccgcgagcgcccccccgcgacgaccccggcctcccccccccagcttgagtcttctgctcgttctgttgggacttgggggtcgccgcttgcgggcagagcccggagatggtgcccagacctgggccaggttttcccggcccccagctcctgaagccgccggactctttcaggggacatttcccgacggctttctatgggctgtgggatcagccgcttaccagacggaaggtgggtggcagcagcacggaaaaggtgcgtcgatttgggataccttcacacaccatccgctggccccacccggagacagcaggaatgctagcctgcctctcggggctccctccccactgcagccagccacgggagacgtggcatctgactcatacaataacgtatttcgcgacaccgaggccttgcgcgagttgggcgttactcactacaggttcagcatcagttgggctcgggtgctgcctaacggcagcgcaggagttccaaaccgggagggcctgaggtactaccgcaggctgcttgaacgactgcgggagctaggcgtacagccagtggtgaccctgtaccattgggacctccctcagcgactccaggacgcgtacggagggtgggccaaccgggccctggcagaccatttcagagactacgctgaactctgctttcggcactttggagggcaggtcaagtactggataaccatcgataacccctacgtggtggcctggcacgggtatgccaccgggcggctggcacccgggataagagggagtcctcggctgggatacctggtggcccacaacctgttgctagcgcatgctaaggtgtggcatctatacaataccagcttccggcccacacagggtggccaggtaagcattgcactgtcgtcacattggattaacccaagaagaatgaccgaccactccattaaagagtgtcagaagtctttggacttcgtccttgggtggtttgcaaagccggtgttcatcgacggcgactatcctgaatcaatgaaaaataatctgtcaagcatccttcctgatttcaccgaatccgagaagaagttcattaaaggaactgccgacttcttcgcactctgtttcggacccactctttcctttcagctgttagacccccacatgaaattcaggcaactcgagagtccaaatctcagacagttactgtcctggatcgatttggagtttaatcatcctcagatttttatagtagagaacggatggttcgtgtcaggtaccacaaagcgtgatgatgccaaatacatgtattacctgaaaaagttcattatggagacactgaaagctataaaactagacggagtggatgtgatagggtacaccgcgtggtccctcatggacgggttcgagtggcatagaggctactctatccggaggggccttttctacgtggattttttgagtcaggacaagatgttattgcctaaatcttctgcactgttctaccagaaactgattgagaagaacggctttccacctctgccagagaaccagccattggagggaacatttccttgtgacttcgcctggggagtcgtggataattacatacaggtcgataccaccctctctcagttcaccgacctgaatgtgtacctgtgggatgtgcatcacagcaagcgcctaataaaggtggacggggttgtgacaaagaagaggaagagttactgcgtagactttgccgcaattcagccgcaaatcgcgctccttcaggagatgcacgttacacattttcgcttttcactggattgggctctgatcctacctctggggaaccaaagccaggttaaccatactatattacaatattatagatgcatggccagcgaactggttagggtcaacataacaccagtcgtcgcactgtggcagcctatggcgcccaatcagggactgccccggttactggctaggcagggggcatgggagaacccttataccgcccttgcctttgctgagtatgcaagactctgtttccaggaactcggccatcatgtgaagctgtggataacaatgaatgagccctatactcggaacatgacctactccgcaggacacaacctgctcaaggcgcatgctctcgcttggcacgtgtacaacgagaagtttcgacacgcgcaaaacggaaaaatatccattgcacttcaagctgactggatagagcctgcctgcccattttcccagaaagacaaggaggtggcggagcgggtgctcgagtttgatatcggatggctcgcggagcccatcttcgggtccggtgactacccttgggtcatgcgcgattggctgaaccagaggaacaattttctgctgccgtattttaccgaagacgaaaagaaacttatccaaggcacctttgactttctggcattatcacattatacgaccattcttgtcgattccgagaaagaagatcctataaagtacaatgactaccttgaggttcaggaaatgacagatattacctggctgaactcgccaagccaagtggctgtggtgccatggggcttgcgtaaagttctaaattggctgaagtttaagtacggtgatctaccgatgtatataatcagcaacggaatcgacgacgggctgcacgcagaggacgaccagttacgggtttattatatgcagaactacatcaacgaggccctaaaagcacacattttggacggcattaacctgtgtggctacttcgcttattcttttaacgaccgtaccgctcctagatttgggctgtatagatacgccgctgaccagttcgagcctaaggcctcaatgaagcactaccgtaagatcatagactccaatggttttccaggaccagaaacattggagagattttgtcctgaggaattcacagtttgtaccgaatgctccttctttcatacgagaaagagcctacttgcttttattgcattcctgtttttcgccagtattatttcgctgtctcttattttctattatagcaagaaaggaaggagatcatacaag

SEQ ID NO: 15300 - DNA, 3036 bp, synthetic construct
  misc_feature 1..3036: note = source = /note="Description of Artificial Sequence: Synthetic coding sequence"
  source 1..3036: mol_type = other DNA
atgcctgccagtgccccgccaaggaggccccgcccaccaccgccttccctgtcactcctgcttgtgctcctgggtctcggtggcaggcggcttcgcgccgagccaggggacggtgcacaaacatgggctagattctcacgtccccccgctcccgaagcggcgggtctctttcaaggcaccttccctgacgggttcctgtgggcggtgggatctgccgcttatcaaaccgagggagggtggcagcagcacggtaagggcgcaagcatctgggacaccttcacccatcatcccttggctccgccaggggactctcggaatgcatctttacctctgggagccccaagcccccttcaacctgccacgggggatgtggcatcagatagctacaataacgtcttcagggatacagaagcactgcgggagcttggggtcactcactacaggttttctatttcctgggcccgagtgctgcctaacggttccgctggcgtgcctaatcgagagggactgcggtactaccgacggttgttggagaggttgagggagctcggagtccagcctgtggttacgctttaccactgggatctaccgcagaggctgcaggacgcctatggtggatgggcaaaccgagccctggcagatcatttccgggattatgcggaattgtgttttcgccatttcggaggccaggtaaagtactggataactatcgacaatccatacgtagtggcatggcatggatatgcgacagggaggctcgcgccgggcataaggggctcaccccgcttgggttatctcgtggcgcataacctgctcctggctcacgccaaggtgtggcacctgtataacactagcttccgacccactcagggggggcaggtgtccattgctctcagtagccattggatcaatcctcggaggatgactgatcattctattaaagaatgccagaagtccctggattttgtgctggggtggttcgccaagcccgtgttcattgatggagattaccccgaatcgatgaagaacaatctgtccagcatcttaccggactttactgaatccgaaaagaaattcatcaaggggactgctgactttttcgctctgtgtttcggccccactctatcatttcagctgctcgacccccacatgaaattccggcaactagaatctccgaacctgcgtcagctcctcagctggatcgacttggagttcaatcacccccagattttcatcgtggagaacgggtggttcgtgagtggtacaacaaagcgcgatgatgccaagtatatgtactatctgaagaaattcatcatggaaactctgaaagctataaaactggacggagtggatgttatcgggtacacggcatggtcacttatggacggctttgagtggcatagaggttactctatccgacggggtttgttctacgtggatttcttgagccaggacaagatgctccttcctaaatcctcagccttgttttaccagaaactgatagagaagaacggatttcctcccctgccggaaaatcagcctctggaggggacattcccctgtgacttcgcttggggagtagtcgacaactacatacaggtggacacaaccctaagccagtttaccgatcttaacgtctatctgtgggacgttcatcattccaaacggctgatcaaggtggatggcgtggtgactaagaaaagaaaaagttactgtgtggatttcgcagccatccaacctcagatcgccctgctgcaggagatgcatgttacccattttcggttttcgttggactgggctttaattctgccccttggaaatcaaagccaggtgaaccacaccattctgcagtattacagatgcatggccagtgagttagtgcgcgtgaacatcactcctgtggtggcgctgtggcagccgatggctccaaaccagggtcttcccagactactggccagacagggagcatgggaaaatccgtacactgcactcgctttcgctgagtacgcccgtctatgttttcaggagctggggcaccatgtgaaactgtggattacaatgaatgaaccatatacccgcaatatgacgtacagcgctggtcacaacctcctgaaggcacacgctctggcctggcacgtgtacaacgagaaattcagacatgctcaaaacgggaagatctcaattgcgcttcaggccgactggatcgagccagcctgtccctttagccaaaaggacaaagaggtagccgaacgtgttttagaatttgacattggatggctagccgagccaatctttggatctggggattacccttgggttatgagggattggctcaatcaacggaataatttcctgctgccatacttcaccgaagacgaaaagaaattgattcaagggaccttcgacttccttgccctatcccactacaccaccatcttggtcgactcagaaaaggaggatcccatcaaatacaatgactacctcgaagttcaggagatgactgatattacgtggcttaattctccatcccaggttgcagtcgtcccatgggggttgaggaaagtgttgaactggttgaagtttaaatacggcgacctgccaatgtacataatctccaatggcatagacgatggtttacacgccgaggatgaccagttacgggtctactatatgcaaaattacattaatgaggcactgaaggcccatatcttagatggcattaacctgtgcggttactttgcttatagctttaacgaccggactgcacccaggtttggtctgtatcggtacgcagccgatcagttcgagcccaaagcctcaatgaagcactaccgaaaaatcatcgattcaaatggatttcccggacccgaaaccctggagcgattctgtccggaagaattcacggtgtgcaccgagtgcagctttttccacacccgtaaatctttactggcatttattgcatttctgtttttcgcatctattatatcactttccctaattttttactactctaagaaaggtcggcgatcatacaaa

SEQ ID NO: 15301 - DNA, 3036 bp, synthetic construct
  misc_feature 1..3036: note = source = /note="Description of Artificial Sequence: Synthetic coding sequence"
  source 1..3036: mol_type = other DNA
atgccagcatcagcaccacccaggcggccaagacctccaccgccttcattgagtcttctcctcgtgctgctgggcttgggcggcagacgactccgcgcagaacctggtgatggcgcccagacatgggccaggttttcgaggccacccgctcctgaagctgccggtctgttccagggaacattccctgacggttttttgtgggccgtaggaagcgccgcttatcagacagagggcgggtggcagcagcacggtaagggagcctcaatatgggataccttcacccaccaccccctggcccccccgggtgacagccggaacgcatcactgccgctgggggctcctagccccttgcaacctgctacaggggatgttgcaagcgatagctacaacaacgtgttcagagacacagaggcccttcgtgaacttggcgtcactcattaccgtttctcaatctcgtgggcaagagtactgccaaacggaagtgctggagtccctaatagggaagggctccggtactaccgtcgactcctggaacgtttgagggaactgggggtgcaaccagtcgtcaccctgtaccattgggacctccctcagcgcctgcaggacgcctacgggggttgggccaacagggcgttggctgaccacttcagggactacgccgaactctgcttcagacacttcgggggacaggtcaaatactggattacaatagacaacccttacgttgtggcctggcacggatatgccacagggagactggccccaggcatcagggggtctccacgtctcggatacttagttgcgcataacctcttgctggctcacgcaaaagtgtggcacttgtataacaccagcttccggcccacccagggcggacaggtatccatcgctctctctagccattggattaacccccggagaatgactgatcactcaattaaggagtgtcagaaatctcttgatttcgtgctgggctggtttgctaagcctgtcttcattgatggggattaccccgagagcatgaaaaataatttgtcctcaatcctaccggatttcacagaatcagagaaaaaatttattaaaggaactgcggatttctttgccttgtgttttggcccgacactctcatttcaactgctggaccctcacatgaaattccgacaactagaatctcctaacctgagacagctcctgagttggatcgatctagagttcaatcacccacagatttttatcgtggagaacggctggtttgtgtctggtactaccaagagggatgatgccaaatacatgtattacctgaagaaattcataatggaaactcttaaggccattaagctcgacggcgttgatgtgatcggctacaccgcgtggtccctgatggatggtttcgaatggcaccgcggatactccattcggcgaggtcttttctatgtagacttcctgtctcaggacaaaatgctcctaccaaaaagctcagcattgttctatcagaagcttattgaaaaaaatgggttccccccgctgcctgagaaccagcctttggaaggaacctttccctgcgacttcgcatggggcgtagtagacaattatattcaggtcgacaccactcttagccaatttacagatctcaatgtctatctgtgggatgtccatcatagtaagcgtttgatcaaggtcgacggcgtggtcacaaaaaagcggaagagctattgtgtggatttcgcggcgattcagcctcaaatcgccctgcttcaggaaatgcatgtgacacactttagattctctcttgattgggccttgattctgcctctgggaaaccaaagtcaggtcaaccacaccatcctgcagtactaccggtgtatggctagcgagttggtaagggttaacattacacccgtcgtggctctgtggcagccaatggcacccaaccagggtttaccaagacttctagcacgtcagggcgcttgggagaacccatatactgcgttggctttcgctgagtatgcccgcctgtgcttccaggagttagggcaccacgttaagctgtggatcactatgaacgaaccttacactaggaacatgacctattctgctggccacaatctgttgaaggcccacgccttagcatggcacgtctacaatgaaaaatttcggcacgcacagaatggtaagatctccatagcgctgcaggccgactggatcgagccggcctgtcctttctctcagaaagataaggaggtggcagagcgagtcctagagttcgacattggatggctcgcggaaccaatctttggatcaggggactatccttgggtgatgagggattggctgaatcaacggaacaacttcctgttgccgtacttcactgaggatgaaaagaaactgattcagggcacgttcgacttcctcgctctcagccattacaccactattctggttgactcggagaaagaggaccccatcaaatacaacgactaccttgaagtccaagagatgacagatataacctggttaaactccccctcccaagtagctgtggttccatggggtctgcggaaggtcctcaattggctgaagtttaaatatggtgaccttcccatgtacatcatctctaacggaatcgatgacgggctgcatgcagaggatgatcaattaagggtatattatatgcagaactacattaacgaggcactcaaggcgcacatactcgacgggataaatttgtgtggctattttgcatacagcttcaatgacagaacggcaccgcgatttggtctttaccggtacgcagcggaccagttcgaaccaaaggcgtccatgaaacactataggaagatcatcgactctaacggctttccaggtcctgaaacactggaaagattctgtcctgaagagttcactgtctgcacagagtgttcattcttccatacacggaagtccctccttgcttttatcgcattcttgttcttcgccagtattatttccctctctttaattttctattacagcaagaagggccgccgcagctacaag

SEQ ID NO: 15302 - DNA, 3036 bp, synthetic construct
  misc_feature 1..3036: note = source = /note="Description of Artificial Sequence: Synthetic coding sequence"
  source 1..3036: mol_type = other DNA
atgcctgccagcgccccgccgagaagacctcgcccaccgccgccctccctaagccttttacttgtgttgttggggctcgggggccggagactgagagctgaaccgggtgatggggcacagacttgggcacgattctcaaggccgccagcgccggaagcagccgggttgttccagggcacttttccggatggcttcttatgggctgtcggatcagccgcataccaaacagagggcggttggcagcaacatggaaaaggtgcctctatctgggacacatttacgcatcatccattggcgccgccgggggatagcagaaatgcctcccttcctttaggtgctcctagtccgttgcagccggcaacaggggacgtggcgtcagactcttataataacgtgtttagggataccgaagccttgcgagaactgggtgtcactcattatcggttcagcatatcttgggcaagagtgttgcctaacgggagcgctggagttcctaatagagaaggcctaagatactatcgtagacttctcgaaagactgcgtgaactcggagttcagcccgtcgttacactttatcactgggatttaccccagagactgcaagacgcgtacggtgggtgggcgaacagggctcttgcggatcattttagagattatgcagaactgtgttttagacacttcggggggcaggttaagtattggatcaccatcgacaatccttatgtggtagcgtggcatgggtacgcgacgggtcggctagcgcctggaattcgggggagcccgagattgggatacctggtagctcataatttacttttagcgcatgcaaaagtgtggcatctgtataacacttcatttcggcctacgcagggtggacaagtctctatcgccttatcttctcattggattaaccctcgacggatgacagatcactctattaaagaatgtcagaaaagtcttgactttgtattagggtggtttgcgaaaccagttttcatcgacggcgattacccggaatcaatgaaaaataacctgtcttcaatattgccggattttaccgaatcggaaaagaaattcataaagggcacagctgatttctttgcattatgtttcggcccgacattgagctttcagcttctcgaccctcatatgaaatttagacaacttgagtcgcctaatttaagacaattgcttagttggatagatctggaattcaaccatccgcaaatcttcatagtagaaaacggttggtttgtgtcaggtacaactaaaagagatgatgcaaaatatatgtattatctcaaaaagtttatcatggaaaccctgaaagcgatcaaactagacggcgtcgatgttattggatatacggcgtggtctttaatggatggctttgagtggcatcgtggctattcaattcgtagagggctgttttatgttgactttttgtctcaagataaaatgttgcttcctaagtcctctgccttattctaccagaaattaattgaaaagaacgggtttccaccgttaccggagaatcaacctttagaaggcacctttccgtgcgacttcgcatggggagtagtcgataattatatacaggtcgacacaacattgtcgcaatttacggatctgaacgtctacttgtgggacgtccatcattctaaacgccttattaaagtggatggggtagtaacgaaaaaaagaaaatcatattgcgtcgactttgctgccatccagccccagattgctctcctgcaagaaatgcatgtaacgcattttcgctttagcttagactgggcacttatcctgccattaggcaaccagtcacaggtgaaccatacaattttacagtattaccgctgtatggcaagcgaactcgtgcgtgtaaatataactccggtggttgccctgtggcagccgatggcgccgaaccagggattacctagacttttagctagacagggcgcgtgggagaatccctatacagctttagcctttgcggagtacgcgcgtttatgtttccaggagcttggccatcatgtaaaactgtggatcactatgaacgaaccttacactaggaatatgacgtatagcgctggacataatttgttgaaagcgcatgctttagcatggcacgtatataatgagaaatttagacacgcccaaaacggcaagatatctattgcacttcaggcggactggatcgagcctgcttgcccgttttcacagaaggataaagaagtcgccgaacgggtgctggagtttgatatcggatggctggcagagcctatatttgggtccggtgactatccatgggttatgagggattggttaaatcagagaaataattttcttttaccgtattttacggaagacgagaaaaaactcattcagggaacgttcgattttttggctttgtcacattatacaacaattttagtggatagcgaaaaagaagacccaattaaatacaacgattacttagaggtgcaggaaatgacagatataacttggttgaatagcccttcacaagtagctgtggtgccgtggggtctgagaaaagtcctgaattggctcaagttcaagtatggagaccttccgatgtacataatatctaatgggattgatgatggcctgcacgccgaggatgaccaacttcgggtttactacatgcagaattatataaacgaggccttaaaggcgcatatactggatgggatcaatctgtgtggctacttcgcatattctttcaacgatcggaccgcgcctagattcggactgtaccgctatgcggcggatcaatttgaacctaaggcaagcatgaaacattacagaaaaattatagattcaaacggttttcccggccctgagacgttggaaaggttttgcccggaggaatttacagtttgcactgagtgctcattctttcatacgcgtaagtccttactcgcatttattgcttttttgtttttcgcctcaatcatatccctatcgttaatcttttactactccaagaaaggtaggcgtagctataag

SEQ ID NO: 15303 - DNA, 3036 bp, synthetic construct
  misc_feature 1..3036: note = source = /note="Description of Artificial Sequence: Synthetic coding sequence"
  source 1..3036: mol_type = other DNA
atgcctgcatctgctccacccagaagaccacgtccaccacctccgtctctcagtctgcttcttgtcttgcttggtctagggggtcggagactccgtgcggagccgggagatggcgctcaaacctgggcacgattctcgcgtcccccagcaccagaagccgcgggattgttccaaggaacctttcctgatgggtttttgtgggccgttggttccgcagcttaccaaacagagggaggttggcagcaacatggaaaaggagcttccatctgggacactttcactcatcacccgcttgctcctcccggagattcccgtaatgcaagtcttccactcggcgcaccgtcaccattacagccagctaccggggatgttgcctcagatagctataacaatgtttttagagacacggaggctcttcgtgaactgggtgttacgcattatagattcagtatatcatgggctagagtgctccctaacggatccgctggcgtacctaacagggagggtctcagatactaccgtagattgctcgaaaggctcagagaactgggggttcagcctgttgttactctttatcattgggatctgcctcagcgtttgcaagacgcttacggtggatgggctaacagggcgctcgctgatcactttagggattatgccgaattgtgctttcgtcactttggtgggcaagtcaaatactggattacgatagataacccatatgtagtcgcctggcatggctatgctaccggtcggttggcaccaggaattcgagggtccccaagactcggatacttagttgcccacaacttattactagctcacgcaaaggtttggcatctttacaatacctctttcagacctacccagggtggacaggtctcaattgcactctcaagccattggataaatccaaggcgtatgaccgaccacagcattaaggaatgccagaagagccttgattttgttctcgggtggttcgcaaaacctgtgttcatagacggcgattatcctgagtccatgaaaaataacctgtcctcgatccttccagatttcacggagagtgagaaaaagtttatcaagggtacggctgattttttcgctctatgttttggtcctaccctttcattccaattgctggatccccacatgaaatttcgccaactcgagagtcctaatctgcggcagctactcagttggattgatctcgaattcaatcaccctcagatattcattgtggagaacggatggtttgtctccggcacaaccaagagagacgatgctaagtatatgtactatctaaagaaatttattatggagactctgaaggctataaaacttgacggggtcgacgtgattggctacactgcttggtctctgatggatggctttgaatggcatagaggttactcaatcaggcgcggactattctacgttgactttctctctcaggataagatgttgctgccaaagtcctcagcactgttttatcagaaattgattgagaaaaatggtttcccaccattgccggagaatcaaccgctcgaaggaactttcccatgcgattttgcttggggagtagttgataactacattcaggttgatactaccttgtcacagtttacggatttgaacgtctatttatgggacgtgcatcactccaaacgtttgattaaggttgacggagttgttacgaagaagcgtaagtcttattgcgtcgactttgctgctatccagcctcagattgctctgttgcaggagatgcatgttacacatttcaggttctcacttgattgggcactaatacttccccttgggaaccagtcacaagttaaccacactatacttcaatactataggtgtatggcctcagaattggtcagagttaatataaccccagtggttgctttgtggcagcctatggcaccaaaccaggggttaccaagacttctggctagacaaggagcttgggaaaatccttacacagctttggctttcgctgagtacgctagattgtgttttcaggaattgggtcatcatgttaagctatggatcacaatgaacgagccttatacccgcaatatgacttatagcgcaggacataatttattgaaagcgcatgccttggcttggcacgtttataacgagaagtttaggcacgcccagaacgggaagatttctatagctcttcaggcagactggattgaacctgcatgtccatttagccaaaaggataaggaggttgccgaacgtgtcctagaatttgatattggatggctggctgaacctatcttcggttcaggtgactatccttgggttatgagagactggttgaatcaacgtaataacttcctgctgccttactttacagaggacgaaaaaaaactgattcaggggaccttcgacttccttgcgcttagtcactacactaccatcttggttgattcggagaaagaagacccaattaaatacaacgattaccttgaagttcaggagatgactgatataacttggctcaattccccatctcaagtcgcagtcgtcccctgggggttgaggaaggtgctcaactggctgaaatttaagtacggagatcttccaatgtacataatttcaaacggtattgatgatggacttcatgcggaagatgatcagctgagagtgtattacatgcagaactacattaacgaagcacttaaggcacatattctcgacggaataaatttgtgtggttattttgcttattcttttaacgataggacagccccaagattcggactatacaggtacgctgcagaccagtttgaaccaaaggcatctatgaagcattataggaaaattatagattcaaacggctttcctggtcctgaaacattggagagattctgtccagaagagtttacagtctgcactgaatgctcgttcttccacactaggaaatcattgttggctttcattgcttttctctttttcgcttccattatttctctaagcttgattttctactattcaaaaaagggacgccgttcttataaa

SEQ ID NO: 15304 - DNA, 3036 bp, synthetic construct
  misc_feature 1..3036: note = source = /note="Description of Artificial Sequence: Synthetic coding sequence"
  source 1..3036: mol_type = other DNA
atgcctgcttctgcaccaccccgccgccctcgcccaccaccaccttcgctgtctctactgctggttctactaggcctggggggtcgacggctacgagctgagcctggtgatggggctcagacttgggcgcgcttctcccgaccacctgcccctgaagccgctggtttgttccagggtacgttcccagatggttttctttgggcagtgggtagcgccgcatatcagacagagggagggtggcagcagcatggaaagggtgcaagtatctgggacacattcacccaccaccccctggctccccccggagacagccggaacgctagcctgccgttgggagcccctagcccactgcagcctgctactggtgatgttgcaagcgacagctacaacaacgtttttcgggacaccgaagcactgcgagaactaggggtgacccactaccggttttcaatctcctgggcccgagttctgcctaatgggtccgccggagtccctaatagagaaggcctccgttattacaggcgtcttctcgagcggctccgcgagctgggcgtgcagccagtcgttacactataccactgggatcttccccagcggctgcaggatgcttacggaggttgggcaaaccgagcattggccgaccactttcgtgattacgctgagctgtgtttcaggcatttcgggggtcaagtgaagtactggattacgatcgacaacccatatgttgtggcttggcacggttatgcaactgggaggctggccccaggcattcggggaagccccagactcggctacctggtggctcataatctcctgctggcacatgcaaaggtgtggcatctttacaacactagcttcagaccaacacagggcggacaagtgtcaattgccttgagttcacattggatcaacccccgccgcatgaccgaccacagtatcaaggagtgccagaagtccctggactttgttctcggttggttcgcgaaacctgtgttcatcgacggtgactatcctgagtccatgaagaacaacctaagcagcattcttcctgatttcaccgagtctgaaaagaagttcatcaagggcaccgccgacttcttcgcactgtgttttggccctaccttgtccttccagctcctggacccacacatgaaattccgacagctcgagtcaccaaacctacggcagctgttgtcttggatcgacctggagttcaaccatccccagatcttcattgtggagaacgggtggttcgtgtccggtacaacgaagagggacgatgcaaagtatatgtattacctgaaaaagttcattatggaaaccctgaaggccataaaattagatggtgtggacgtgattggctacaccgcatggagcttgatggacggatttgagtggcaccgcggctatagcattagaagaggacttttctacgtcgacttcctgagccaagacaaaatgctacttccgaaatcaagtgcgttattctaccaaaaactgatagagaaaaacggattcccgccccttcctgaaaatcagcccctcgaaggaaccttcccctgtgactttgcgtggggggttgtggataactatatccaagtggatactaccttgagccagttcacagatcttaacgtctacctctgggatgtgcaccacagtaaacggttaataaaagttgatggagtggtgacaaagaaacggaagtcttattgcgtggattttgccgcaatccagcctcagattgcactccttcaggagatgcacgtgacccacttccggtttagcctggattgggccctgatccttccattgggcaaccaatctcaagtgaatcacacgatcttgcagtattatagatgtatggccagcgagttagtgagggtgaacatcactccggtcgtggcgctgtggcagcccatggcccctaaccagggtctcccccggttgctggcccgtcagggggcatgggagaatccctatactgcactcgcctttgcggaatacgcgcgtctctgtttccaggagttagggcatcacgtgaagctgtggattaccatgaatgagccctataccagaaacatgacctatagtgcaggccataatctcttgaaggcgcacgccctcgcttggcacgtatataatgaaaaattcagacatgctcagaacggtaagatttcaattgcactgcaggcggactggatcgagcctgcctgtccattttcacagaaagacaaggaagtcgccgagagagtcctagagtttgatattggctggttagccgaaccaattttcggaagtggggattatccctgggttatgcgagactggctgaaccaaaggaacaacttcctattgccctacttcactgaagatgagaaaaaattaatccagggcacatttgattttctcgctctgtcccactacacaacgatcttggtggacagcgagaaggaagatcctataaaatacaacgactatctggaagtgcaggagatgaccgacattacatggctgaactctcctagccaggttgccgtcgtgccttggggcctcaggaaagtgctcaattggcttaaattcaagtacggtgatctgcccatgtatatcatcagcaatggcatagacgatgggctacatgctgaggacgaccagctcagagtgtactacatgcagaactatataaacgaagctctcaaagcccacattttggatggcattaacctgtgtggatatttcgcctattctttcaacgatcgaacagcgccccgcttcggactctatcggtacgctgcggatcagtttgagccaaaggcaagtatgaaacattatcggaagatcatcgattcgaatggcttcccaggcccagagactttggagaggttctgcccggaagagttcactgtgtgcacagagtgcagtttttttcatactcgcaagtcgctgttggccttcatagcatttctcttttttgcctcaataatttcactgagtttaattttttactactccaagaagggccggagaagctataaa

SEQ ID NO: 15305 - DNA, 3036 bp, synthetic construct
  misc_feature 1..3036: note = source = /note="Description of Artificial Sequence: Synthetic coding sequence"
  source 1..3036: mol_type = other DNA
atgcccgccagtgcccccccgcgacgaccccggccaccaccacccagcctgtctcttttattggtgttgctcgggctgggcgggcggcggctgcgggctgagcctggtgatggcgcccagacctgggccaggttttcccgtcctcctgcacccgaggccgccggcctgtttcaaggcacgttccccgacggatttctgtgggccgtgggcagcgcggcctatcagaccgaggggggctggcagcagcacggcaagggggcatcaatttgggatacattcacacatcatccccttgccccccccggagattcccgcaacgccagtctgcccctcggggcaccctcccccctccagcctgccacaggagacgtggccagtgattcctataacaacgttttccgcgacactgaagctttgagggagcttggcgtaactcattacagatttagtatcagctgggcccgcgtgctcccaaatggatccgccggcgtgccgaaccgtgagggcctgcgctactaccgcagattgctggagcgcctgcgggaattaggagtccagccggttgtcactctctaccactgggatctcccccaacggcttcaggacgcctacggaggatgggccaatagagcactggccgaccacttccgcgactacgccgaactttgttttaggcatttcggggggcaggtgaagtactggatcacgattgataacccctacgtggtggcatggcatggctatgccaccggacgacttgctcccggtatccgaggctcccccaggctgggttacctcgtggcccataacctactgttggcccacgccaaagtgtggcatctgtacaacacatcttttcgccccactcaaggtgggcaggtgagcatagccctgtcctcacactggatcaaccctaggaggatgacagatcactccatcaaggagtgtcaaaaatccctcgatttcgtgctaggatggttcgccaagcccgtgttcatcgacggcgactaccccgagtccatgaagaataatctgagtagtattctccccgacttcaccgaatctgagaagaaattcattaagggtaccgccgattttttcgcactatgcttcggccctacactgtcctttcagctgctcgatccccacatgaaatttaggcagctagaatcgccaaacctgcgccaacttctctcgtggatagacttggaattcaaccaccctcagatattcatagttgagaatgggtggttcgtgagcgggacaaccaaacgggatgatgctaaatacatgtattacctgaagaagttcataatggaaacactgaaggccattaagctggacggtgtcgacgtgatcggatacacagcatggtccctgatggacggcttcgagtggcacagaggctacagcatccgcagggggctcttttacgtcgacttcctgtctcaggataaaatgctgctccccaagtccagcgccctgttttaccagaagctgatcgagaagaacggcttcccacctcttcctgaaaaccaacccctggagggtaccttcccatgtgactttgcctggggagtagtggacaactatattcaagtcgatactacactgagccaatttactgacctgaatgtctatctttgggacgtgcaccattcaaagaggctgatcaaggtggatggcgtagtgacaaaaaagcgcaagagttattgcgtcgactttgccgcgatccagccccagatcgccctgctgcaggaaatgcatgttacacattttcggttttctctggactgggccctaattttaccgctgggcaatcagagtcaggttaaccataccattctgcagtattaccgctgtatggcttccgaattagtgcgggtcaacattacaccagtggtggcactgtggcaacccatggcccctaaccaaggccttccccgactgctagctcgacagggagcgtgggagaatccgtacactgccttggcctttgccgaatacgctaggctgtgtttccaagaattaggacatcatgtgaagctgtggatcaccatgaatgagccttatactcgtaacatgacatactccgccgggcacaatctgctgaaggcgcacgccctggcatggcatgtgtacaatgagaaatttcgtcacgcgcagaatggtaagatcagtattgcattgcaggcggattggatagagccggcctgtccgttctcacagaaggacaaagaagttgcagagagagtacttgagtttgatatcggttggttggcagaaccaatcttcggcagcggagactacccttgggtgatgcgggattggctcaatcagagaaacaattttctgctaccctatttcaccgaggatgagaagaagctgatccagggcacatttgactttttggctctctcccattatacgaccattctggtcgactccgaaaaggaagatcccatcaagtacaatgattatcttgaagtccaggaaatgacggatatcacttggctaaacagccccagccaggtcgccgtcgtcccatggggtctgcgtaaagtattgaattggctgaaatttaagtatggcgatctgccaatgtatattatttctaacgggatcgatgatggactccacgcagaggacgatcaattacgcgtttattatatgcagaactacattaacgaggctctgaaggcccatattttggatggcatcaatctttgcgggtactttgcttattctttcaatgacaggacagcacccaggttcggcctctatcgttatgccgccgatcagtttgagccaaaggcctccatgaagcactatcggaagatcattgattctaatgggtttccaggcccagagacgctcgaacggttctgcccagaggaattcaccgtgtgtacagagtgcagcttcttccacacgcgcaagagtcttttggctttcatcgctttcctcttcttcgcgtctataatttccctgtctttaatcttttactactcaaagaaaggccgccggagctacaaa

SEQ ID NO: 15306 - DNA, 3036 bp, synthetic construct
  misc_feature 1..3036: note = source = /note="Description of Artificial Sequence: Synthetic coding sequence"
  source 1..3036: mol_type = other DNA
atgccagcttcggccccgcctcgccggcctcggcctccgcccccatcactgtccctccttttggtcctcctcgggctcgggggcagacggctgcgggctgagccaggggacggagcccaaacgtgggcccgattcagccgcccaccagcacctgaggctgcaggcttattccagggaacattccccgatggctttctgtgggccgtgggatcggccgcttaccaaaccgagggtggttggcagcagcacggcaagggtgcttcgatttgggatacgtttacacaccacccactggcccctcccggagactctcgcaatgccagccttcccctgggcgcaccctcaccactacagcctgctaccggggacgtcgcttctgactcctataacaacgtgttccgagacaccgaggccctcagagaactgggagtgacccattaccgattctctattagttgggcgagggtgcttccgaatggaagcgcgggggtgcctaatcgggagggccttcggtattataggcgcctgttagagcggctaagggagctgggagtccagcctgtggtgacgttatatcactgggatctgcctcaaaggttgcaggacgcctacggagggtgggcaaatcgagctcttgccgaccattttagggactatgccgagctctgctttcgacacttcggcggccaagtgaaatactggataacaattgacaacccttatgtggtcgcttggcacggatatgcgaccgggcggctggccccaggcattcgaggcagccctagactgggatatttggtggcgcataacctgttgcttgcccacgcaaaagtgtggcatctctacaataccagctttcggccaacacagggcggacaagtctctattgctctgtctagccattggattaacccacgcaggatgacagatcattcgatcaaagagtgccagaaatcactggacttcgtactgggctggttcgctaagccagtattcattgatggcgactaccccgaaagtatgaagaataatctgagttccatccttcccgatttcaccgagtctgagaagaagttcattaagggcactgccgacttctttgcattgtgctttgggccaactctcagcttccagctcctggatccccatatgaaattcaggcagctagaatcgccaaaccttaggcaactgctgtcctggatagacctggagttcaaccatccacaaatttttattgtggagaacggctggttcgtctcaggcaccacaaagcgagacgacgccaagtacatgtattacctaaagaaatttataatggaaacactgaaagcaatcaagctcgatggagtggatgtcatcggttatacagcttggtcgctcatggacgggttcgaatggcataggggctatagcatcagacgaggactgttttatgtggactttctttcccaagacaagatgttgctgcctaagagtagcgcattgttttatcaaaaactgattgaaaaaaacggttttccaccgctcccagagaatcagcctctagagggtactttcccatgtgactttgcctggggagtggttgataactatatccaggtagacacgacactgtcccagttcaccgacctcaacgtgtatctttgggatgttcaccactcaaaacgtctaatcaaggtggacggagtggttaccaagaagcggaagtcctactgtgtcgacttcgccgccatccagccccagatagctctgttgcaggagatgcacgtgacacatttccgtttcagtctggactgggccctgattcttcctctgggaaaccaaagccaggtaaatcatacaatacttcaatattaccggtgcatggcaagtgaactcgttcgggtgaacatcactccggttgtggctctctggcagcccatggcaccaaaccaggggctcccgagattgctcgcacgtcagggagcctgggaaaatccttacactgcattggctttcgccgaatacgcacgcctctgtttccaagaactaggtcaccatgtgaagctgtggatcactatgaacgagccatacacacgcaacatgacctactccgcgggccacaacttgctgaaggcacacgctctggcatggcacgtttacaatgaaaaatttcgacacgcacaaaatgggaagattagtatcgctttacaggccgactggatcgagcccgcttgcccgttctcacagaaagataaagaagtcgctgagcgagtgctggaatttgacattgggtggctggctgagcctatatttggtagcggtgattatccctgggtgatgagagactggctcaaccaacggaacaatttcctactaccttattttacagaagatgaaaagaagctgatacaaggcaccttcgactttctagctctctctcattacacaaccatcctggtggacagtgaaaaggaagaccccatcaaatataacgactatttagaagtgcaggagatgactgatatcacctggttgaattctccgtcacaggtggcggtggttccttggggcctccggaaagtcctgaactggcttaagttcaagtatggtgacctgcccatgtacataatctcaaacggcatcgatgacggactgcatgctgaagacgatcagttgagagtgtactacatgcagaactacataaatgaagccctgaaagcacacatattagacggaatcaatctttgtggatacttcgcatacagctttaacgatcggaccgcacctaggttcgggctgtataggtatgccgcagaccagtttgagcccaaagcttccatgaagcattaccgcaagattattgactccaatggattcccaggtcctgaaacactggaacggttctgtcctgaagagtttaccgtatgcactgagtgcagctttttccacactagaaagtcattgttggcgttcatcgcgttcttgttcttcgccagcattatttcactgtccctcatattttactattccaaaaaaggcaggcgcagctacaag

SEQ ID NO: 15307 - DNA, 3036 bp, synthetic construct
  misc_feature 1..3036: note = source = /note="Description of Artificial Sequence: Synthetic coding sequence"
  source 1..3036: mol_type = other DNA
atgccggcctccgcaccacccagacgccccagacccccccccccatctctttcactgcttctggtcctgctaggtcttggtgggagacgactccgcgcagaacctggtgatggagctcagacttgggcacgcttttctaggcccccagctcccgaagcggcaggactgtttcaagggacatttccagatggcttcctgtgggccgtcggatcagcggcataccaaacggagggaggatggcaacagcacggaaagggcgcttctatttgggataccttcacccatcaccccctggctcctccaggagacagcagaaatgcttccctgcccctgggggccccatcccccctccagcctgcaacaggagacgtcgcttccgactcttacaataatgttttcagagatactgaagcactgcgagaactgggagtgacccactaccgtttctctattagttgggcacgagtgcttcccaacggctcagctggcgtgcccaatcgggaaggtctgcggtactatcgtcggctcctggaacgccttagggaactgggggtacagccagtggtcaccctgtaccactgggacctgcctcagcggctccaggacgcctacggtggctgggcaaaccgcgctttggccgaccactttcgcgactatgccgagctgtgtttcaggcactttggcggacaggttaaatattggatcaccattgataacccatacgtggtggcctggcacgggtacgctacaggacggttagcccccggaatccggggctcgcctcgcctgggatacctcgtcgcacacaacctgcttctggctcacgctaaagtttggcacctttacaatacttcttttaggccgactcagggaggtcaagtgtcaatcgccctttcaagccattggatcaacccacgaaggatgaccgatcactccatcaaagaatgccaaaagagcttggatttcgttctgggttggttcgccaaaccggtctttatcgatggagactaccccgaatccatgaaaaataacctcagcagcatattgccggactttacagaaagcgagaagaagtttataaagggtaccgccgacttttttgccctgtgtttcggcccgacactgtcattccagcttttggacccccacatgaagtttcgacagctggagagtccaaatctgaggcagcttctgtcgtggatcgatcttgagttcaaccatccccaaatcttcatagtggaaaacggttggtttgtctctggcacgaccaagcgcgacgatgccaaatacatgtattatctgaaaaaatttattatggaaaccctaaaggctatcaagctggacggagtggacgtcatcggatacacagcctggtcactcatggatgggttcgaatggcatcgcggctactcgatccgccgaggcttgttttatgtggatttccttagccaggataaaatgctcttgcctaaaagcagcgctctgttttatcagaaactgatcgagaagaacggattccctccgctccctgaaaaccaaccactcgagggaacctttccctgtgacttcgcctggggagtagttgacaactacatccaggttgacaccaccttgagccagttcacagatctgaacgtgtacttatgggacgtccaccatagcaagaggctcatcaaagttgacggggtagttacaaaaaaacgcaagtcttactgcgtcgacttcgctgcaattcagccccaaatcgctttgcttcaagagatgcacgttacacacttccgcttcagtctggattgggcacttatcctgcccctggggaaccagtctcaggtgaaccacactattcttcagtactacaggtgcatggcaagcgagctggttagggtcaacatcacaccggtggtggccttgtggcagccaatggccccaaaccaaggcctgcctaggctgcttgctagacaaggagcttgggaaaacccctacacagcactggcctttgccgagtacgcacgcctgtgttttcaagaattgggccaccatgtgaagctgtggatcaccatgaacgagccctataccagaaacatgacatatagtgccggacataacctcctgaaagcacatgcgctcgcctggcacgtatataacgagaagttcaggcatgctcagaatggaaagataagcattgctctgcaggccgactggattgagcctgcttgtccttttagccaaaaggacaaggaggtcgctgagcgggtccttgaattcgacatcgggtggttggcagagcccatattcgggagtggcgattacccttgggtaatgcgcgactggctgaaccaaaggaacaacttcctcctcccatacttcactgaggatgagaaaaagctgatacaaggcacgttcgactttctcgcgttaagccactacaccacaattctggtggattcagagaaggaggatcctattaagtataatgattacctggaggttcaggaaatgactgatatcacatggctcaactcgccttctcaagtggccgttgttccatgggggcttaggaaggtgttgaactggttgaagttcaaatacggagacttgcctatgtacatcataagcaatggaattgacgacggactgcacgcggaagatgatcaactgagagtgtactacatgcagaactacatcaacgaggcccttaaggctcatatcctggatggaataaacctgtgtggatacttcgcctattcattcaatgatcgcactgctccaagattcggactttatagatacgctgccgaccagttcgagccaaaggcctccatgaagcattatagaaaaatcatcgattccaacggctttcccggcccggagacactcgaaaggttctgtccggaagagttcacagtttgcaccgagtgtagctttttccataccagaaagtcactgttggccttcattgcatttctttttttcgcaagcattataagcctctccctgatcttttactatagtaaaaaaggacgccggtcctacaaa

SEQ ID NO: 15308 - DNA, 3036 bp, synthetic construct
  misc_feature 1..3036: note = source = /note="Description of Artificial Sequence: Synthetic coding sequence"
  source 1..3036: mol_type = other DNA
atgcccgcgtcggctccccctcgcagacccaggccccctcctcctagtctgtccctcctactagtgctgctgggccttggagggcggcgtctaagagcggagccaggcgatggtgctcagacatgggctcgattctctagacctcctgcccctgaggccgccgggctgtttcagggcaccttcccggatgggttcctctgggctgttggctccgcagcatatcaaaccgaaggaggatggcagcagcacggcaaaggggcttctatctgggataccttcacacaccatcctctggctccgcctggtgactcccgtaacgcgtccttgccacttggagccccctctccgcttcagccagccaccggtgatgtcgcatcggacagctacaacaacgtgtttcgagacactgaggcattgcgggagcttggggtcacacattatcggttcagcatctcctgggcccgggttcttcccaatgggtcggccggcgtgcccaaccgtgagggtctgcggtactaccggcggctgttggagagactgcgggaactgggtgtgcagcccgtggtaaccctctatcattgggatctgccccagcgcctacaagatgcatatggaggctgggctaacagggcactggccgaccactttagagactacgccgagctgtgctttcgccacttcgggggacaggttaaatattggattaccattgacaacccttatgtggtcgcctggcatggatacgccaccggcaggctagctcccggcataagagggtctccaaggctcggctacttagttgctcacaacctcctgttagctcacgctaaagtctggcatctgtacaacacctccttccgacccacccagggcgggcaggttagcatagccctgagctcacattggataaaccctagacgtatgaccgatcactccatcaaagaatgtcagaagtctctggattttgtcctaggatggtttgccaagcccgtctttattgacggggattaccccgagagcatgaagaataatcttagctccattttacctgacttcaccgagtccgagaagaaattcattaaagggactgcggatttttttgcgctgtgttttggacctacattgtccttccaactcctcgaccctcatatgaagtttcggcagcttgagtctccgaatctgagacaattgctgtcgtggatcgatctggaattcaaccatccccagatcttcatcgttgagaacggctggtttgtcagcggcacgaccaagcgtgatgacgccaagtatatgtactacctcaaaaaattcatcatggagactctcaaagcaattaagcttgatggggtggacgttatcggttatacagcatggtccctcatggatgggtttgaatggcacagggggtacagcatcagacggggcctcttttacgtcgacttcctcagccaagacaagatgttgttgcccaaatcctctgccttgttttaccaaaagctgattgagaagaacggattccctcccctgccagagaaccagccgttggaaggcacattcccctgtgacttcgcctggggagtggtggacaattatattcaggtggatactacactatctcagttcacagatctaaacgtctatttgtgggacgttcaccactccaaaagactgatcaaagtcgacggggtggtgaccaaaaaaaggaagtcgtactgcgtggatttcgctgccatccagcctcagattgccctcctccaggaaatgcacgtgacccactttcgatttagcctggattgggctctaatccttcccctgggcaaccagtcgcaggtcaatcacacgattctgcaatactatagatgtatggcatcagagctggttagagtaaacatcacccccgtcgtcgcattgtggcagccgatggcccctaatcagggcctcccccgcctgctggcgaggcaaggggcctgggagaatccctatactgccctcgcgttcgccgagtacgcgcggctttgcttccaggaactcggtcatcatgtgaagctgtggatcacgatgaacgagccatatacgcgcaacatgacatactccgcagggcataatctgctgaaagcacacgccctggcctggcatgtttataacgaaaagttccgccatgcacagaatggaaaaattagcatcgcattgcaagctgattggatcgaacccgcctgtcccttctctcagaaagataaggaggtggcagaaagggttttggagttcgacattggctggcttgcagaaccaatcttcggtagcggcgactacccatgggtgatgagagactggcttaaccagcggaacaactttctactgccctatttcacggaagacgagaagaaactcatccaaggtacgttcgattttctggccctaagtcattatactacaattcttgtagactctgagaaagaagatcccattaagtacaacgattatcttgaggttcaggagatgacagacattacctggctcaactccccaagccaggtggccgttgtgccatggggactgcggaaagtattgaactggctaaagttcaaatacggagatctaccgatgtatatcatctctaatgggatagacgacggcctccacgccgaggacgaccagctgcgggtgtactacatgcagaattatattaatgaagctctaaaagcccacattttggacggcatcaatctatgtggctatttcgcctattctttcaatgacagaaccgccccaaggttcgggctgtatcgttacgctgcagatcagttcgaacctaaagcttccatgaaacattacaggaaaatcatcgactcgaacggatttcccggaccagaaacgttggaacgcttctgccccgaagaattcactgtttgcaccgaatgctctttttttcatactaggaaatccctgcttgcctttatagctttccttttcttcgccagcatcatcagtctgtccctgatcttttattactcgaaaaaagggaggagaagttacaag

SEQ ID NO: 15309 - DNA, 3036 bp, synthetic construct
  misc_feature 1..3036: note = source = /note="Description of Artificial Sequence: Synthetic coding sequence"
  source 1..3036: mol_type = other DNA
atgcccgcttcggctcctccccggcgtccccgtcccccacccccgtcactctctctgttactagttctgctcggtcttggaggtcgacgacttcgagcagagcctggcgacggtgctcaaacgtgggcccgcttttccaggcccccagccccagaggccgcgggactcttccaaggcacgttcccagatggatttctttgggctgttgggtcagccgcatatcagacagagggcggatggcagcagcacggcaaaggcgcctcgatatgggacactttcacacaccaccctttagcgccgcctggtgattcgcgcaacgcaagcttaccactgggggccccatctccactacagcccgccaccggggacgtcgcctcagattcgtacaataatgttttccgcgatacggaggccttgcgtgagctaggcgtaacccattaccgattctcgatttcatgggccagagtgcttcccaacgggtcagccggtgtacctaacagagaaggcctgagatactacaggcgtctactggagcggttgagagaactgggagtccagcccgtcgtgacattgtatcattgggatcttccacagaggctacaggatgcgtacggaggatgggctaatagagcacttgctgaccattttcgtgattacgcggagctttgttttcggcacttcggtggtcaggtcaaatactggatcacaattgataatccttatgtagtggcttggcacggctacgccaccggcaggttggcaccaggtattagagggagtccccgccttggctacttggtggcacacaacctcctactggcgcacgcaaaggtatggcacctgtataacacttcatttaggcccacacaaggtggccaggtgagcattgcgttgagcagccactggatcaacccccggcggatgaccgaccactccatcaaggagtgccagaaatcgcttgattttgtgcttggttggtttgctaagcccgtgtttatcgacggtgattatccggagtccatgaaaaacaacttgtcctcaatacttccagatttcactgaaagcgagaagaaatttatcaagggaacagcagattttttcgctttgtgtttcggccctaccctgagtttccagttgttggatcctcatatgaagttccgccagcttgagtcaccgaacctccggcagcttttgtcatggattgacttggagtttaaccatccgcagatcttcatcgttgaaaacggatggtttgtgtccggtaccacgaagcgcgatgacgctaagtatatgtactaccttaagaagtttataatggaaactcttaaggcgatcaagctcgacggcgtggatgtcattggatatactgcgtggtcactcatggatgggttcgaatggcaccggggctatagcataagacgtggtctattctacgtggatttcctgtctcaagacaagatgctgctgcccaaaagctcggccctgttttatcagaagcttattgaaaagaacggcttccctccattgcctgaaaaccaacctctcgaagggacatttccttgtgatttcgcatggggcgttgtagataattatatacaggtagatacgacactgtctcagttcacagaccttaatgtatacttgtgggatgtgcatcactctaaaagattgatcaaagttgatggggtcgtcactaagaagcgcaagtcatattgcgttgattttgcggccattcagccgcaaatcgccttgcttcaggagatgcatgttactcacttccgattctcattagattgggcgcttattttgcctttgggtaaccagtctcaggtgaaccacactatcttgcagtattatcgatgtatggcttccgaactcgtcagagttaacatcacacctgtagtcgctttgtggcagcctatggctcctaatcaggggctgcctagacttcttgcccggcaaggcgcgtgggaaaacccatacacagcgctagccttcgccgaatacgcgcgtttgtgtttccaggaacttggtcatcacgtgaaactatggatcaccatgaacgaaccatatacacgaaacatgacgtactcggcaggacataacctgctgaaggcgcatgctctcgcttggcatgtttataatgaaaaattcaggcacgctcaaaacggtaagatatcaatagccttgcaggccgattggattgaaccggcgtgcccgttcagccagaaggacaaagaggtggcggagcgtgtcttagagttcgatattggctggcttgccgagcctatcttcggaagtggagattacccatgggtgatgcgtgactggctcaaccagaggaacaactttttactcccttacttcacggaggacgagaagaagcttatccaaggtacttttgactttctcgctctgtcacattacacgacaatccttgtggactctgagaaggaagatccgatcaagtacaacgattatctggaggttcaagaaatgacagatattacctggcttaacagtccgagccaggtggcagtggtgccctggggtctcaggaaggtactaaactggttaaagttcaagtacggcgacctccccatgtatatcatttctaacggcatagatgacggtctccatgcagaggatgatcaactccgtgtgtattacatgcaaaattatattaatgaggcacttaaggcgcacatcctcgacggcattaatctgtgtggatattttgcatacagttttaacgaccgaaccgcgcctaggtttggcctctaccgctacgccgctgatcaatttgagcccaaggcatctatgaaacattaccgaaaaatcatcgactcaaacggtttcccaggccctgaaacgctcgagaggttttgtccggaggagtttacagtgtgtactgaatgctcatttttccatacgcggaaatctcttttagcatttatagcgtttctattctttgcttctataatctccctcagtcttattttctactattcaaagaaaggtcgtagatcttataag

SEQ ID NO: 15310 - DNA, 3036 bp, synthetic construct
  misc_feature 1..3036: note = source = /note="Description of Artificial Sequence: Synthetic coding sequence"
  source 1..3036: mol_type = other DNA
atgccggcttctgcacctccgcgacgcccacgaccacctccgccgtcgctttctcttttgctagtattactagggttgggaggtcgcagattgagagctgaacccggggatggagcccaaacttgggcgcgttttagcaggccaccggctccggaggcagccgggttgtttcaaggaacttttccggatggatttttgtgggccgtcggttctgctgcataccaaacagagggtggctggcaacaacatggcaaaggcgcctcaatttgggacacgtttacccatcatccacttgctccgccaggagattcaagaaatgcttctcttccattgggagccccatctccactgcagccagcgactggagatgtcgcttctgattcttacaacaatgtgttccgagatactgaagcgttgagggagcttggagtaacacactatagatttagcatttcctgggcaagagttttgccaaatggatcagctggtgtgccaaacagagaaggactgcgttactatcggagactactggaacgattgcgtgaacttggagtccaacctgttgtaacattgtatcattgggacttgccacaacgattacaagatgcttacggcggatgggccaaccgggctctggcagatcactttcgggattatgccgagctgtgtttccgtcactttggtggacaagttaagtactggatcaccatcgacaatccatatgtcgttgcatggcatggatatgcaactggaaggctagctccgggtattcgaggttcgccccgtctggggtatttagttgctcacaatctgttgttggctcacgctaaagtttggcacctttacaatacttctttccgtccaactcagggaggacaagtttctatcgcattatcttctcactggattaatccacgacgaatgacagaccactcgatcaaggaatgccagaagtctcttgactttgtgttgggatggttcgctaaaccagtgttcatcgatggggactatccggaaagcatgaaaaacaatctctcatcgatccttcctgatttcacggagtctgaaaaaaagtttatcaaagggactgcggatttcttcgctctatgttttgggcctacactctcttttcaacttctagatccccatatgaagtttagacaacttgaatcacctaatttgagacaattactatcatggattgatctcgaatttaatcatccgcaaatatttatagtcgaaaatggatggtttgtttctggaacaactaaacgtgatgatgcaaagtatatgtactatttgaagaagttcattatggaaactcttaaggctataaagttagatggtgttgatgtcattggttatactgcatggtccttgatggatgggttcgagtggcataggggatactctatcagacgtggactcttctatgtcgatttcctgtcacaggacaaaatgcttttaccaaagtcgagtgcattgttttaccaaaaacttatcgaaaaaaatggattcccaccgttgccagagaaccaaccactcgaaggtacctttccatgcgattttgcctggggagttgtggataactacatacaagtggacaccactctgagtcagttcaccgaccttaatgtatacctttgggatgtgcatcatagtaagaggctcattaaagttgatggtgtggtcactaagaagcgcaagtcttactgcgtggattttgccgcgattcaaccacaaattgcattgcttcaagagatgcacgtaactcatttcagattttcccttgactgggcacttatcttgccgctgggaaatcaatcacaagtaaatcacacaattctgcagtactatcgctgtatggcatcagaactcgtacgggtgaacatcaccccggttgtagcactgtggcaacctatggctccaaaccagggactccctcgcttactggctcgccaaggagcctgggagaatccatacaccgctttagcatttgcagaatacgcgcgtctctgttttcaggaattagggcaccatgtcaagttatggataacaatgaatgagccttacacacgtaacatgacttactctgctggacataacttattgaaagctcatgcgttggcttggcatgtctataatgagaaatttcgtcatgctcaaaatggcaagatatctatcgccctacaagcggactggattgaacctgcgtgcccattcagtcaaaaagacaaagaagttgcagaacgcgtcctggagtttgatatcggctggttggcagagccgatatttggttctggtgattacccgtgggtgatgcgagactggttaaaccaaagaaacaatttcttattaccgtatttcactgaggacgagaaaaagttgatccagggtacattcgactttcttgcactatcccactatacgaccatcttagttgattcagagaaggaagacccaataaaatacaatgattatctagaggtccaggagatgactgatatcacttggctcaatagtccaagccaagtggccgtagtcccatggggacttcgcaaagttctcaactggctcaagttcaaatacggagacttgccgatgtacatcataagtaacggtatagatgatggcttgcacgcggaagatgatcagcttcgcgtatattatatgcagaattacattaatgaggctcttaaagcacatatccttgatggtatcaatctatgtggctacttcgcttacagtttcaacgataggacagctcctcgttttggactttacaggtacgcggccgatcaatttgaacctaaagcatcaatgaaacactaccgaaagatcattgacagcaatggattcccgggaccagagacgctagaaaggttttgtccagaggaatttacagtgtgtactgagtgttctttctttcacactcgcaagtcgctgctggcctttatcgcattcttgttcttcgccagtattataagtcttagcctgattttttattattcaaaaaagggaagacgtagctataag

SEQ ID NO: 15311 - DNA, 3036 bp, synthetic construct
  misc_feature 1..3036: note = source = /note="Description of Artificial Sequence: Synthetic coding sequence"
  source 1..3036: mol_type = other DNA
atgccggcctctgctccaccccggaggccgaggcccccccccccatctctgtctctgttgttggtcctcctgggcctgggggggagaagactccgcgccgagcctggcgatggagcccagacttgggcccgcttttcacgccctccagctcccgaggccgcagggttgtttcagggaacattccccgacggattcctgtgggctgtggggtctgcggcataccagaccgaaggggggtggcagcagcacggaaaaggagcctccatctgggacaccttcactcaccatcctctggcacccccgggggatagtcggaacgccagcctcccgctgggggccccttcccctcttcagcccgccacgggggatgtcgcatcagattcatataacaacgtgttccgggatacagaggcgctgagagaattgggcgtgactcactacagattcagcattagctgggcccgggtgctgcccaacggttccgctggcgtgccaaaccgggaggggctccgctattatagacgcctgctggaaaggctgcgcgagttgggtgttcagcccgtcgtcaccctgtaccattgggatctgcctcagcgcctccaggatgcgtacggcggttgggctaaccgagctctcgccgaccatttcagagattacgccgaactctgtttcaggcattttggagggcaagtgaaatattggatcacaatcgataacccatacgtagtggcttggcatggctatgcaactgggagactggctcccgggattagagggagcccacggctcggctatctcgtggcgcataatctgctgctggcccacgctaaagtgtggcatctgtacaacacctcattcaggcctactcagggtggccaggtgtcaatcgccctctctagtcactggatcaatcctcgccggatgaccgaccattccataaaggaatgccaaaagtctctcgacttcgtcctgggatggttcgccaaacctgtctttatagatggggactaccctgagtccatgaaaaataatctctctagcattctgccagattttacagaaagcgagaaaaagttcattaaagggactgcggacttcttcgcactttgtttcggccctacgctgagctttcagttgctggacccacacatgaagtttagacagctggagagtcccaacctccggcagctgctctcttggattgacctcgagttcaatcacccccagatcttcattgtggagaacggatggttcgtgtcaggtacgactaagcgggacgatgctaagtacatgtactacttgaaaaagttcatcatggaaactctgaaggccattaagctggacggagttgatgtcattgggtacactgcctggtcactcatggacggatttgaatggcatcgcggctattccattcggcggggcctcttttatgtcgactttctgtctcaagataaaatgctcctccctaagtccagtgcccttttctatcagaaacttatagaaaaaaacggctttccccccctgccagagaaccagcctctggagggcacattcccctgtgatttcgcatggggcgtggtcgacaactacattcaagtagataccacgctttctcagtttactgatttgaacgtgtacctgtgggacgtgcatcattccaagcgcctcattaaggtagatggtgtcgtgacgaaaaagaggaagagctattgcgttgatttcgctgccatacagccacagatcgcgctcctgcaggagatgcatgttacgcatttccggttctccctggactgggccctgattctgccactcggaaaccagtctcaggtgaatcacaccatacttcaatactaccggtgcatggcgtcagagctggtgcgcgtgaacattacacccgtggtggcactgtggcaaccgatggcacctaatcaagggctcccacgcctgctggccaggcagggagcatgggaaaatccctataccgctctggccttcgccgagtatgcacggctgtgtttccaggaactgggccatcacgtcaagctgtggatcactatgaatgaaccatacacccgcaacatgacctattcagccgggcacaacttgcttaaggcccatgcccttgcctggcatgtgtacaatgaaaaatttagacacgcccagaatggaaagatttcaatcgccctgcaggccgactggatagagccagcatgccccttcagccagaaagacaaagaagtggccgagcgagtgctggagtttgacatcggctggctggctgagcccatcttcggctcaggtgattacccctgggtcatgcgggactggttgaatcaacgcaacaacttcctgttgccatacttcacagaagacgagaagaaattgatccagggtacgttcgactttctcgctctgtctcactacaccacgatccttgtggactccgaaaaggaggaccctattaagtacaacgactacctggaagtgcaggagatgaccgacattacatggctgaactctccatcacaggtcgccgtcgtgccgtggggactgcgcaaggtgctcaactggcttaagttcaagtatggcgatctcccgatgtacataatctctaacgggatcgatgacgggcttcacgcagaagacgaccagctgagggtgtattacatgcagaattacattaatgaggcactgaaggcacacatcttggatggcatcaacctgtgcggatatttcgcctactcttttaacgacaggaccgccccgcgcttcggcctctatagatatgccgccgatcaattcgagcccaaagcttccatgaagcactaccgcaaaataatcgacagcaatggtttccctgggcctgaaacgttggagcggttttgccccgaggagtttaccgtgtgcacagagtgcagcttctttcatacaaggaagtcattgttggccttcatagcattccttttctttgccagtataatcagtttgagcctgatcttctactacagtaagaagggacgaagaagctacaag

SEQ ID NO: 15312 - DNA, 3036 bp, synthetic construct
  misc_feature 1..3036: note = source = /note="Description of Artificial Sequence: Synthetic coding sequence"
  source 1..3036: mol_type = other DNA
atgccagcctcagctccccctcggcggcccagaccccctcccccctctctttctctgttgctggtcctgctgggcctgggcggcaggcgcctgcgggctgagcctggcgatggggcacagacctgggctcgcttcagtaggcccccggcgcccgaggcagctgggcttttccaaggaacctttcctgacggattcctttgggcagttggatctgccgcttaccagaccgaaggaggctggcaacagcacggcaagggtgcctcgatctgggacaccttcactcaccaccctcttgctcccccgggcgactcgaggaacgctagcttaccactcggagctcctagtccacttcagccagcaaccggggacgtcgcttctgatagctacaacaacgtgttcagggataccgaggccctgcgagaactgggtgtgacccactatagatttagtatctcttgggcccgcgtgctccccaacggctctgctggcgtgccgaaccgagaaggtctcaggtactacaggcgtttgcttgagagactacgagaattaggggtacagcctgtcgtgacgttgtatcactgggaccttccacaaagactgcaggacgcttatggtggatgggccaaccgggccctggctgaccactttcgcgactatgccgagctgtgctttagacacttcggcggccaggttaaatactggattacaatcgataatccctacgtggtggcatggcacgggtacgcaacgggccggctagcccccggcattcgtgggagccctcgcctcggatatttggtggcgcacaaccttctgcttgcacacgccaaggtttggcacctttacaacactagctttcgccccacacaagggggccaagtttcaatcgccttatctagccactggatcaatccccggcgcatgaccgatcacagtatcaaggagtgtcagaagagcctcgattttgtgcttggatggttcgccaaacccgttttcatcgatggagactaccccgaatctatgaaaaataatctttcgtctatcttgcctgatttcacagaatccgaaaaaaaatttattaagggcacagccgacttcttcgcactctgttttggacctacactttcatttcaactcctcgatccacacatgaagtttagacagcttgaaagcccgaatctgaggcagcttctgtcctggatcgacctcgagttcaaccatcctcagatatttatagtagaaaacggctggttcgtctctggcacgacgaaaagagatgacgctaagtacatgtactaccttaaaaagttcataatggaaacgttaaaagctatcaagctggacggagtggacgttatcgggtacaccgcttggtcactgatggatggctttgaatggcataggggctattcaattcggagaggtctgttctatgtggatttccttagtcaagataagatgttacttcccaagtcatcagctttgttctatcagaaattgatagagaaaaatggattccctccattgcctgagaaccaacccttagaagggaccttcccctgcgattttgcttggggagttgttgacaactacatacaagtagacaccactctgagccagttcactgatctcaacgtgtatctctgggacgtacaccattctaagcggttgataaaagtggacggcgttgttactaagaagagaaagtcatactgcgttgattttgctgccatccagccccaaatcgcattactgcaggagatgcatgtgacccatttcagattctctctcgattgggccctcattctgccacttgggaatcagagtcaggtgaaccacacaattctgcagtactatagatgtatggcctcagaattggtacgcgtcaacattacacccgtcgtggcactgtggcagcccatggcccctaaccagggcttaccccgcctgcttgcccggcagggagcgtgggagaatccttatacagccctggcttttgctgaatatgcgcgcctctgcttccaggagcttggccatcacgtgaagctgtggatcaccatgaatgaaccctatactcgcaatatgacatactctgccggccataacctgctgaaagcccatgccctggcctggcacgtgtacaacgagaaattccgtcacgcccaaaatggcaagatttccatcgctctgcaggccgattggattgagccagcctgtcctttctctcaaaaggataaggaggttgccgaacgggtccttgaattcgacatagggtggctggccgagccgatctttggaagcggagactatccttgggtaatgagggattggctgaaccagaggaataacttcctgctgccatatttcacagaggatgaaaagaagttaatccaaggtacctttgacttcctggcgttgtcccactacaccactatcctggttgatagcgaaaaagaggatcccatcaagtacaatgactacttggaggtgcaggaaatgaccgatattacgtggctgaattctccatctcaggtagctgtggtcccctgggggctaaggaaggtgctgaattggttgaagttcaagtacggagatctgcctatgtacatcatatctaacggaattgatgatggactgcacgcggaggatgaccaactgagggtgtactacatgcagaattatattaatgaggcccttaaagcacacatcctggacgggatcaatctgtgcgggtactttgcctactccttcaatgaccgcactgccccaaggttcggactgtatcggtacgccgctgaccagttcgaacctaaggccagcatgaagcattataggaagattatcgattctaatgggtttcctggcccagaaacactggagaggttctgcccagaggaatttaccgtgtgcacagagtgtagcttttttcacactcggaagagccttctggccttcattgcctttttgttttttgctagcattattagcctcagcttgatcttttactactctaagaaggggagacgtagttacaaa

SEQ ID NO: 15313 - DNA, 3036 bp, synthetic construct
  misc_feature 1..3036: note = source = /note="Description of Artificial Sequence: Synthetic coding sequence"
  source 1..3036: mol_type = other DNA
atgccagcctccgctccgcctcgtagaccccggccacctccaccatcactttcgcttcttctcgttctgctgggtcttggcggcagacggttacgggctgagccaggtgatggagcccagacctgggcccgcttttctaggcccccagccccagaagcagccggcctctttcaggggaccttcccggatggatttttgtgggccgttggaagcgccgcatatcaaacagaaggtggctggcagcaacacggtaagggagctagcatttgggacactttcacacaccacccactggcgcccccaggagatagtagaaacgcctctttacccctgggagccccctcccctttgcagccagcaaccggggatgtcgcaagcgactcgtataacaacgttttccgcgacacagaggcattgcgagaactgggtgtgacccactaccgcttctctatctcctgggcccgcgtgcttcctaatggctccgcgggtgtccccaatcgggagggattgcgatactatcggcggttactggagcggttaagagaactcggcgttcagcccgtcgttaccctgtatcattgggacctgccccaacgcctgcaggacgcctacggagggtgggccaaccgggctctggccgatcattttcgtgactatgcggagctgtgtttccgccacttcggcgggcaggtgaaatattggatcaccatcgacaatccatacgttgtggcctggcatgggtatgccacaggccgcctcgctcccgggattaggggcagtccccggctgggctatctggtcgctcacaacttgctcttagcccatgctaaagtgtggcacctgtataacactagttttcgccctacacagggcggacaggtgtcaattgctttgagcagtcactggattaacccaaggcgaatgaccgatcactctataaaggagtgtcagaaatcccttgacttcgtgctgggctggtttgccaagccagtgtttatcgacggcgactaccctgaatccatgaaaaataatttgtctagcatattgcccgattttacagagtccgagaaaaagtttataaagggcacggctgacttcttcgctctctgcttcggaccgaccctctcatttcaattactggatcctcatatgaagttccgacagctcgaatcgcccaacctcaggcagctgctttcgtggatcgatctagaattcaatcacccccaaatatttatcgtcgagaatggctggtttgtgtccgggacaacgaagcgcgacgacgccaagtatatgtactatttgaagaagttcattatggaaactctaaaggctatcaaactagacggcgtggatgtcattggttacactgcatggtctctcatggacggctttgagtggcacaggggatattctatccgacggggattgttttatgtagatttcttatcacaagacaaaatgctcctgccaaaaagttctgccctgttttatcaaaagctcattgaaaaaaatggtttccctcctttaccggagaaccagccactggaaggcacctttccgtgtgacttcgcctggggggtggtagataattacattcaggtcgatacaacattgagtcagttcactgacttaaatgtatatttgtgggatgttcaccacagtaaacgactaattaaggtggacggggtggtaacaaagaaaagaaagtcttactgcgtggacttcgccgctatccagccccagatcgccttactgcaggaaatgcatgttacacacttcaggttttcactcgactgggctttaattctgcccctgggaaaccaaagccaggtgaatcacacgatcttgcaatattaccgctgtatggcgagcgagctcgtgcgggtgaatattaccccagtggtggcactttggcagccaatggcacctaatcaaggactgcctcgcctgttggctcgccagggggcttgggagaacccttacacagctctggccttcgcagaatacgctagactgtgctttcaggagctgggtcatcatgtgaagctttggattacgatgaatgagccctacacaaggaacatgacttatagcgcaggccacaaccttcttaaggcccatgcactagcttggcacgtgtacaacgaaaagttccgccatgcccaaaatgggaaaatctcaattgcactccaggccgactggatagaaccagcctgtccttttagccagaaagacaaggaggttgctgagcgagtgttggaattcgatattggttggttagccgagcctatctttggctccggggactacccctgggtaatgagagactggctcaaccagcggaacaattttctattgccatacttcaccgaagacgagaagaagttgattcaaggcacgtttgactttttggcactaagccactacacaaccatactggtggattctgaaaaagaagaccccattaagtataacgattatttagaggtgcaggaaatgaccgacatcacatggctgaattcaccctcccaggtggcggtcgtgccatgggggttacgaaaggttctgaattggctgaaattcaagtacggcgatctgcccatgtatatcatctcaaatgggatagacgatgggctgcacgccgaggacgaccagctccgggtttattatatgcaaaattatatcaatgaggccctcaaggcgcacatcctggatggaatcaatctgtgcggttattttgcctatagtttcaatgatagaaccgctccaagattcggactgtaccggtacgccgctgatcagttcgaacctaaagcctctatgaagcactatcggaagatcatcgactctaacggctttcctggacccgagactctggagcgcttctgcccagaggagtttactgtatgcacagagtgcagcttctttcatacgcgcaagtctcttctggcctttattgctttcctcttcttcgcatccattatctctttgtccctcatattctattattcaaagaaggggcgccgatcctataaa

SEQ ID NO: 15314 - DNA, 3036 bp, synthetic construct
  misc_feature 1..3036: note = source = /note="Description of Artificial Sequence: Synthetic coding sequence"
  source 1..3036: mol_type = other DNA
atgcctgcttcagctcctcctaggcggccaagacctccacctccttcccttagtctccttctggtgttattggggttaggaggcaggagactgagggctgagccaggagatggcgcacaaacttgggcacggttctctcgcccaccagcccctgaggccgcaggtttgtttcaagggaccttccccgatggatttttgtgggctgtcggcagcgccgcgtaccagacagaaggcggatggcagcagcacgggaaaggcgcctctatttgggatacttttacccatcatcccctggctcctcccggtgattcccggaacgcttctttacctctgggtgctccttccccactccagccagccaccggcgacgtcgccagtgactcatacaataacgtgtttcgggataccgaggcactgcgggaactcggggtgacccattaccgtttttcgattagctgggcacgggttctgccaaatggttccgcgggggtgcccaaccgtgaaggcctgcggtactaccgaaggcttttggaaagattaagagagttgggagttcagccagtggttaccctttatcactgggatttgccccagcggttgcaggacgcttacggtggttgggctaatcgagctctggctgaccacttcagggactatgctgaactgtgttttcggcacttcggaggacaggtcaagtactggattacaatagataacccctacgtcgtggcctggcatggctatgcaacgggacggttggcgcccggcatccgcggatcccccagactgggctacctagttgcacacaatctgttgttggcccacgctaaggtctggcacctgtataatactagttttaggcctacacagggcggacaggtatcaattgccctctcttctcactggatcaacccacgacggatgaccgatcactctattaaggagtgtcagaagagcctggactttgtgctcggctggttcgctaaaccagtattcatcgacggagactatccggagtcaatgaaaaataacctgtccagtatcctcccggattttacggaaagtgaaaagaagttcatcaaaggtaccgctgacttctttgccctctgcttcggccccacgttatcctttcagctgctagatccccatatgaagttccggcagctggagtcacccaacctcaggcagcttctcagctggatcgacttggagtttaaccatcctcagatttttatcgtcgagaatgggtggttcgtgagtgggaccacaaaacgcgatgatgccaaatatatgtattatctgaagaagttcatcatggagaccctgaaagctattaaactggatggcgtggatgttatcggctacacagcatggagcctgatggacggatttgaatggcatcgtggatattctattcggaggggcctcttttatgtggatttcctgtcccaggataaaatgcttctgccaaagagttccgcactgttctaccaaaaattgatcgagaaaaacggattcccacccttgcccgagaatcagcctctggaggggaccttcccatgtgactttgcttggggcgtagtagataactacatccaagtcgacacgacattgagccagtttactgacttgaacgtctacttgtgggacgttcaccactcaaagaggcttatcaaggtcgatggagttgtgaccaaaaaacgcaagtcctattgcgtcgacttcgccgccatccagccccagatcgcccttttacaggagatgcacgtaacgcactttcgcttttcccttgactgggcattaatcctgccgctggggaatcaatcccaggtgaatcatactatcttgcagtactacagatgtatggcgagtgagctggttcgcgtcaacattactcctgtggtggctctatggcagccaatggcaccgaaccaaggtctacctagacttctggctcgccagggcgcgtgggaaaatccttacactgccctggctttcgccgagtatgctcggctgtgttttcaagagttgggccatcatgttaaattatggatcactatgaatgaaccctacacccggaatatgacatacagcgctggtcacaatttgctgaaggcacacgctttggcatggcacgtgtacaacgagaaatttcggcacgcacagaatggaaagatctcaattgcgctgcaggcagattggatcgagccagcctgcccttttagccagaaagataaagaggtcgccgaacgtgtcttagaattcgacatcggctggctcgccgagcccatcttcggctccggagactacccttgggttatgagggactggctgaatcagcgcaacaacttcctgttaccatactttaccgaggatgagaaaaagctgatacagggcacctttgactttcttgcattatctcattatacaaccattcttgtcgattctgagaaggaagatcctataaaatacaatgactatctagaagtgcaggaaatgacagacatcacgtggctaaattcccccagccaggtcgccgttgtgccatgggggctaagaaaggtgttgaattggctgaaattcaagtacggcgatctgcctatgtatattattagtaatggtatcgatgacggcctgcacgccgaagatgatcagctgcgagtgtattatatgcagaactatatcaacgaggctctaaaggcccatattcttgacggaatcaacctctgtggttacttcgcctactcattcaacgaccggactgcacctaggttcggcctgtatcggtatgcggctgaccagtttgaacctaaggcttctatgaaacactatcggaagatcatagacagcaatggatttcccggcccggaaactcttgaacgattttgtccagaagaattcacagtttgtacagagtgttccttctttcacactagaaaaagtttattagccttcatcgcattcctgttctttgccagcatcattagcctgtcactgatcttttattatagtaaaaaaggaaggaggtcgtacaag

SEQ ID NO: 15315 - DNA, 3036 bp, synthetic construct
  misc_feature 1..3036: note = source = /note="Description of Artificial Sequence: Synthetic coding sequence"
  source 1..3036: mol_type = other DNA
atgccagcctccgctcctccccgtagaccaaggccaccccctccaagtctaagtctgctactggtattgctcggcctcggcggccggcgcctacgggccgagcctggggatggtgcccagacttgggcaagatttagccgcccaccagctcctgaagccgcgggtctgtttcagggtaccttcccagacgggttcttgtgggcggtggggagcgccgcttatcagaccgagggtgggtggcagcagcatgggaaaggcgcttccatttgggatacgtttactcatcatccgttagcacctccaggtgacagcagaaatgcctccctcccgcttggtgcaccatctcctttacagccggcaacgggggacgtggcctcggattcctataataacgtcttccgagatactgaggccctgagggagttgggggtaactcactacaggttctccatttcctgggcaagagtgctgccaaatggatctgccggtgtcccaaaccgcgagggcttaaggtactatcgccggctcctggaaaggctgagagaactcggcgtccaacctgttgtgaccttgtaccactgggatctcccccagcgcttgcaggatgcatacggaggctgggcgaatagagccctcgcagatcattttagagattacgcagagctgtgttttcgccactttggaggccaggttaaatactggattactatcgacaacccttacgtcgtggcctggcacggctatgcaacgggccgccttgcaccgggcatacgaggatcacctagattgggctaccttgttgcgcataacctgctgctcgcgcatgccaaggtctggcatctctacaatacatcatttcgccccacgcagggcggccaggtctccattgcgctgagctcacactggataaatccccggcgtatgacggaccattctattaaggagtgtcagaagtcactcgatttcgtgctgggctggttcgccaagcccgtcttcattgatggcgattaccccgagagtatgaaaaacaacctctctagcatattgcctgattttaccgagtcagagaaaaagttcattaaaggcacagccgatttcttcgccctctgcttcggccccacactatcgtttcagttactagaccctcacatgaaattccggcaactcgaatcacctaaccttagacagctcctgtcgtggattgaccttgagttcaatcaccctcagatctttatcgtagagaacgggtggtttgtttccggcacgacaaagagggacgacgctaagtacatgtattatctgaaaaagtttataatggagaccctcaaagctatcaaactcgacggagtcgacgtcattggatataccgcctggtctctgatggatggatttgaatggcatcgaggttatagcattaggcggggactgttttatgtggatttcctctctcaggacaagatgctactccccaaatcctctgctctgttctaccaaaaacttatcgagaaaaatggcttcccacccctccccgagaatcagcccctcgagggcacttttccctgtgacttcgcatggggcgttgtcgacaactatatccaggtggacaccacgctctcccagttcacagacctgaatgtgtatctgtgggacgttcaccactccaagagactgatcaaggtggacggcgtggtgactaaaaaacgaaaatcgtattgcgtggatttcgcagccattcagcctcagatagctctcctgcaggaaatgcacgtgacccattttaggttttctctcgactgggctttgatcctgccactgggcaatcaaagtcaagttaatcatacaatacttcagtactacagatgtatggcctcagagctggtgagagttaacataaccccagtggtggcgctctggcagcccatggcccccaaccagggcttaccgcggctgctggcccgacagggggcttgggagaacccgtacacagctctcgccttcgccgaatatgcccggctgtgcttccaggagctgggacaccacgtgaagctctggataacaatgaatgagccctacactcgcaatatgacttattcggccggacataacctgctgaaggcccatgccctcgcttggcatgtgtacaatgaaaaattccgccatgctcaaaacgggaagatctcaattgcgctacaggcagactggattgagcccgcctgccctttctctcagaaagacaaagaggttgccgaacgggttctagaatttgatataggatggctggccgagcctattttcggtagcggagactatccttgggtcatgcgggattggctgaatcagagaaataactttctgctgccctacttcaccgaagacgaaaaaaagctcattcagggcacctttgatttcttggccctgtcacattatactaccatcttggtggactccgagaaggaagatccaataaagtataacgattatctggaagtccaagaaatgacagacatcacctggcttaacagtccttcacaggtggctgtggtgccatggggtcttaggaaggtattaaactggctcaagttcaaatatggcgacctgcccatgtacattatttcaaatggcatcgatgatggcctgcatgccgaagacgaccaactgagggtgtactacatgcagaactacatcaacgaggccctgaaggcccacatcctggatggcataaatctctgtggttattttgcctatagctttaatgacaggaccgcaccacgattcggcctctataggtacgccgccgatcagttcgagccaaaagcctctatgaaacattatagaaaaattattgacagtaacggcttcccggggcccgaaacactggagaggttctgtcctgaagagttcactgtgtgcaccgaatgctcttttttccacactaggaaatctctgctggcttttattgccttcctcttttttgccagcataatctccctgtccttgatattttattattcaaaaaagggccggagaagttataag

SEQ ID NO: 15316 - DNA, 3036 bp, synthetic construct
  misc_feature 1..3036: note = source = /note="Description of Artificial Sequence: Synthetic coding sequence"
  source 1..3036: mol_type = other DNA
atgccagccagtgctccacctagacgcccacgcccacctcctccatctctcagtcttttgctagtgctgttagggctcggaggccgcagactgcgcgcagagcccggggatggagcccagacatgggcaaggttctcccggcctccggcccccgaggctgcggggctgttccaaggaactttccctgatgggttcttgtgggccgttggctctgccgcttaccaaaccgaggggggttggcagcagcatgggaagggggcctctatctgggatactttcacacaccacccactagctccaccaggcgactctaggaacgcttctctgccactcggggcacctagcccccttcagccagctaccggagacgttgcctctgattcatataacaacgtcttccgggacacggaagcactgcgtgagctaggggttacacattatcgcttcagcatctcatgggcgcgcgtcctgcctaatggttctgctggagtcccaaacagggagggtctgaggtactaccggcggctgctcgaaaggctccgagagctaggcgtgcagcctgtcgtcacactctatcactgggacctgccacagcggctccaggacgcctacggcgggtgggctaaccgcgctctcgcggatcacttcagagactatgccgagctgtgcttcagacattttggtggacaggtcaaatattggatcaccattgacaacccctacgtggtggcttggcatggctacgctaccggtcggctggcccccgggattaggggctcaccccgcctggggtacctggtggctcataatctcctcctcgcccatgccaaggtctggcatctgtataacactagctttcgacccacccagggaggccaagttagtattgccctgagctctcattggatcaacccacgccggatgacggatcactctatcaaggagtgccaaaaaagcctggattttgttttgggctggttcgccaagcccgtctttatagatggcgactacccggaaagcatgaaaaacaatctgtcctcaatcctgcctgattttacagagagcgagaaaaagttcataaagggcacagccgattttttcgctctgtgctttggccctacactttcgttccaattgcttgaccctcacatgaaattccgacaactagagtcccccaaccttaggcagctgttatcctggatcgaccttgagtttaaccacccacaaattttcattgtggaaaacggctggtttgtgagcgggacaacaaagagagacgatgccaagtacatgtactatcttaaaaaattcattatggaaactcttaaggccatcaagctcgatggcgtcgacgtgatcggctatacagcctggtcactgatggacggctttgagtggcaccgcggttactcaatccgaagaggtcttttctatgtagactttctcagccaggacaaaatgctcttgcccaagagtagtgcactgttctaccagaagcttattgagaaaaatggcttcccccccttgcccgaaaaccaacctctggaaggaacatttccctgtgattttgcgtggggcgtggtagacaattatatccaggtggacacaacactgagccaattcaccgatttaaacgtgtatctgtgggacgtgcaccacagcaaaaggctgattaaggtcgatggagtggtgactaagaagcgcaaaagctattgcgtcgactttgccgccatacaacctcaaatagcactactgcaggagatgcacgtgactcatttcagattctcccttgattgggctctaattctccctcttggcaatcagtctcaggtgaatcacaccatcctacagtactacaggtgcatggctagcgaacttgtgcgcgtgaatatcacgcccgttgtggctttgtggcagccaatggcacccaatcagggactgcctcggctgctggcccgccagggcgcttgggagaacccctacacagctctggcctttgcggagtacgcaagattgtgcttccaggagctaggccaccatgtgaaactgtggataactatgaacgagccttacactcgaaacatgacatactccgctggccacaacctgttaaaagcccatgcgctggcatggcatgtgtataacgagaaattccggcacgcccaaaacggcaagattagcatcgccctgcaagccgactggatcgagccggcttgtccattcagtcagaaggataaggaggtggccgagcgcgttctagaattcgacataggctggctagccgaaccaatctttggtagtggggactatccttgggtaatgcgcgactggttaaaccagcgaaataactttctcctgccatattttactgaagatgaaaagaaacttattcagggtacatttgacttcctcgctctctcacattacacaactatcctggtagattcagaaaaagaagacccgataaagtacaatgattacctggaagtccaggaaatgacagacatcacgtggttgaactctccttcacaggtggctgtggttccttggggcctcagaaaggtacttaattggctgaaatttaaatacggtgatctgccgatgtacatcatcagcaatggcatcgatgatggcctgcatgctgaagacgatcagctgcgagtctactacatgcaaaattatataaatgaagccttgaaggcacatattctggatggaatcaatctgtgtggctactttgcctactccttcaatgaccgcacggctcctcggtttggtctttaccgatacgctgccgaccagttcgaacccaaagctagtatgaaacactatagaaagattatcgatagcaacgggttccctgggcccgaaactttggaacggttttgtcccgaggaattcactgtgtgtaccgagtgcagctttttccatacgaggaagtccctcctggctttcatcgcttttcttttcttcgcaagcatcatttccctctcactcatcttctattattccaaaaagggtcgaagatcttataaa

SEQ ID NO: 15317 - DNA, 3036 bp, synthetic construct
  misc_feature 1..3036: note = source = /note="Description of Artificial Sequence: Synthetic coding sequence"
  source 1..3036: mol_type = other DNA
atgcccgctagtgctccgcctagaaggcccaggccccccccaccgagtctatcgctcttgctggtcctcctgggcctaggaggccgccgactacgcgctgagcctggggacggtgcgcaaacatgggccaggttttcgaggccccccgcgcccgaggccgcagggctcttccagggaacatttccagatggatttctctgggctgtgggaagcgcagcctaccagactgagggaggctggcagcagcacggaaaaggcgcttcaatctgggacaccttcacccatcacccactcgctcctcccggagactcaaggaacgcgtcgctccccctgggagccccctctcccctacagcccgctacgggcgatgtggcatccgacagttacaataatgtgtttagggacactgaggctttaagagagttgggagtgacgcactaccgctttagcatctcctgggcccgggtgcttccgaacgggtcagcgggcgtgcccaatcgggagggcttgcgctactatcgccgtctgttggaaaggctgagagagctgggagtgcagcccgtggttactctgtatcattgggacttacctcagcgcttgcaggacgcgtacggaggatgggccaaccgcgcactggctgaccacttccgcgattacgctgaattgtgttttcgccatttcggcggccaggtgaaatactggattaccatcgataacccttacgttgtggcttggcatggctacgctacgggccggcttgcccctggaatacgaggaagtccgcgcctggggtatctcgtcgctcacaaccttctgctcgcacacgccaaggtatggcacctctacaatacatctttcaggccaacgcagggtggccaggtcagcatcgcgctgagttcacactggattaatccccgccgcatgacagaccactccatcaaggaatgccaaaagagccttgactttgtcctgggctggttcgcaaagcctgtctttatagatggcgattaccctgaatccatgaagaacaatctgtcctctatattgcctgattttaccgagtccgaaaaaaagtttataaaggggacagctgacttcttcgcactttgtttcggccctaccctgagtttccaactcctagatcctcacatgaagttccgccagctcgagtcgcccaatctcaggcagcttctgtcttggatagatctcgaatttaatcacccacaaatcttcattgtggagaatggttggtttgtatctggcacaactaagcgggatgatgcgaaatatatgtactacctaaaaaagttcatcatggagacacttaaggctattaaactggatggcgtggacgtgattgggtacacagcttggagtctgatggacggattcgaatggcacaggggatacagcatccgacgcgggctattttatgtagatttcctgtcccaggacaagatgcttctacctaagagctcggcgctcttttaccagaagctgatcgaaaagaacgggtttccaccacttccagaaaaccagcctcttgagggaacgttcccctgcgacttcgcctggggggtagtggataactacattcaggtggataccacattatcacaatttactgatttgaatgtctacctttgggatgtgcatcattctaagagattgattaaagtcgacggagtggtgacaaagaaacgcaaaagttactgcgtagattttgccgcaatccagccacagattgccttgctacaggagatgcacgtgacacactttcgatttagtctggattgggccctgattctgccactggggaatcagtcccaggtgaaccacacaatcttacagtactatcggtgcatggcctctgagttggtcagggttaatatcacaccagtcgttgctttgtggcagcctatggctcccaatcaagggttaccaagacttctggcacggcagggggcctgggaaaatccttatacagcccttgccttcgctgaatatgcccgtctgtgtttccaggagttggggcaccacgtgaagttgtggatcaccatgaatgagccctacaccagaaatatgacctactccgcaggacacaacctactgaaggcacacgccctcgcatggcatgtgtacaacgaaaagttcaggcacgcacagaatgggaagatatcaatcgctctgcaagctgattggatcgaacctgcttgcccgtttagtcaaaaggataaggaggtggcagaacgcgtgctggagttcgatatcggctggcttgccgagcctatttttggctccggcgattatccatgggtgatgcgtgactggttaaaccagcgcaacaactttcttttaccatattttaccgaggatgagaaaaagttgatccagggcacattcgattttctggccttgagccactatactacaatcctggttgactcagagaaagaggatcctattaagtacaacgactatttggaggtgcaggaaatgacggatatcacctggctgaattcaccgagtcaggtagccgtagtcccatggggcttgcggaaagtgctaaactggctcaagttcaagtacggcgacctccccatgtatattatctccaacggaatagatgatggactgcatgccgaagacgaccagttaagggtttactacatgcagaactatataaatgaggctctgaaagcccacatcctggatggtatcaatctctgtggctatttcgcatactcttttaatgaccgaaccgctcctcgcttcgggctgtacagatatgccgcagaccagttcgagcctaaagccagtatgaaacactaccgcaaaatcatcgactctaacgggtttccggggcccgagaccctcgagcggttttgccccgaggaatttactgtctgtaccgagtgctctttcttccacactcgaaaatcgctgctagcttttatcgccttcctgttctttgcttccattatatcactcagccttattttctactactcgaagaagggtaggcggtcttacaag

SEQ ID NO: 15318 - DNA, 3036 bp, synthetic construct
  misc_feature 1..3036: note = source = /note="Description of Artificial Sequence: Synthetic coding sequence"
  source 1..3036: mol_type = other DNA
atgcctgcaagcgcgcccccacgccgaccccgccctccaccaccatccctgtctttacttctggtcctcttaggcctgggtggccgccggctgcgcgctgagcccggcgacggcgcacagacctgggcacgattctcccgcccccctgctcctgaggcagccggcctcttccagggaaccttcccagacggtttcctctgggccgttggctcagcagcttatcagacagaagggggatggcaacagcatgggaaaggcgcctctatatgggatacgttcactcatcatccactggcaccacccggcgattcacgcaatgccagtctccctctgggggcgccgtcccccctgcaaccggccacaggcgacgtggcctcggacagttacaacaatgtatttagggatactgaggccctgcgggagttgggggtaacacactaccgcttttcaatctcctgggcccgggtgctgcccaatgggagcgctggtgtgcccaaccgcgagggtctgagatattacagaaggctgttagaaagactaagagaattaggtgtgcagccagtggtgacattataccactgggacctgccccagcgcctgcaggatgcgtacggaggctgggcaaatcgcgcgctggctgaccactttagggactacgcagagttatgctttcgccacttcggtggccaggtgaaatactggattacgattgataatccgtacgtggtggcatggcatgggtacgctacaggccgattagcccctggtattcggggcagcccgcggctgggctacttagtcgcacataacctgcttctcgctcacgccaaagtttggcatctctacaatacctcattccgcccaacacagggggggcaggtgtcaattgcgctgtcctcacactggattaaccctaggaggatgactgatcattccattaaagaatgccagaaatctttggattttgtactgggctggttcgccaagcccgtgttcatcgacggggactaccccgagtccatgaagaacaacctgagcagtatcctcccagacttcactgagagcgagaagaagttcatcaagggcaccgccgactttttcgctctttgtttcggacctactctgtctttccagctgctagacccgcatatgaagttccggcaactggagtcacctaacctgaggcagctcctgagctggattgacctagagtttaaccacccccaaatttttattgtcgaaaatgggtggtttgtgagcgggaccactaagcgcgacgatgccaaatatatgtactacctcaagaagtttattatggagaccctgaaagccattaaactggatggagttgacgtcatcgggtataccgcatggtcactgatggacgggtttgaatggcaccgcggatactccatccgccgcgggttattctacgtggatttcctatcacaggataagatgttgctgcctaagtcctccgccttattttaccagaaactaattgaaaagaacggattcccccccctgcccgaaaaccagcctctggaaggcacatttccctgcgattttgcatggggagtcgtcgataactatatacaggtggatactaccctgtcccagttcaccgatctaaatgtctatttatgggacgtccaccactcaaaacgactgataaaggtggacggggtggtcacaaaaaaaaggaaatcatactgtgtggattttgccgccatccagccccagatcgccctccttcaggagatgcacgttactcacttccggtttagcctcgactgggcgctgatcctgccactggggaatcagtctcaggtaaaccacaccatcctgcaatactataggtgcatggcttccgagctggtcagagtcaatattacccctgttgtggctctctggcaacctatggcacctaatcagggactgccaagactgctggccaggcagggggcctgggaaaacccctacaccgccctcgctttcgcagagtatgctagactctgctttcaggagttggggcatcatgtgaaattgtggattaccatgaatgaaccatatacccggaatatgacctatagtgcgggccataacctcctgaaagcccacgctctggcttggcatgtttataacgaaaaattcaggcacgcccagaatggaaagatatccattgctcttcaagcagattggatagagcccgcctgcccctttagccaaaaggataaagaggttgcagaacgtgtgcttgaatttgacatcggttggcttgcggaaccaatcttcggctccggagattatccttgggtaatgcgtgactggctgaatcagaggaacaactttcttctgccctatttcacagaagacgagaaaaaactgatccagggaacatttgatttcctggcactcagccactacaccacaatcttggtggactcagaaaaagaagaccccattaagtataacgattacttggaggtgcaggagatgaccgatatcacttggctaaacagcccatcacaggtggccgtggtgccatggggcttgcgtaaagtgctgaactggctgaagtttaagtatggagatttgcccatgtatatcatctcaaatgggattgacgacggactgcacgctgaagatgaccagctcagggtgtactacatgcagaactatattaacgaggcgctgaaggcccatattctagatgggattaatttgtgtgggtacttcgcttactccttcaacgatcgcacggcacccagatttgggttgtataggtatgcggccgaccagttcgagcctaaggcttctatgaaacactatcggaagataatcgatagcaacggattccctggcccagagacattggaaagattctgcccagaggagttcacagtctgtaccgagtgttccttcttccacacacggaagtcactcctggctttcatcgctttcttgtttttcgccagcatcatctccctgtctctgattttctattattctaaaaagggacgaaggtcctataag

SEQ ID NO: 15319 - DNA, 3036 bp, synthetic construct
  misc_feature 1..3036: note = source = /note="Description of Artificial Sequence: Synthetic coding sequence"
  source 1..3036: mol_type = other DNA
atgccagctagcgctcctcctcggcgccctaggcctcctccaccgtctttgtcattgctgctcgtgctgctggggctggggggccgaaggctgagagcagagcccggcgatggggcccaaacttgggcaaggttctcacgtccccccgctccggaagctgccgggctgtttcagggcacattcccagatggtttcctttgggctgttggcagtgccgcatatcaaacagagggcggatggcagcaacacggtaaaggagcgtccatctgggacacatttacacatcaccccttggcaccacctggagactctaggaacgctagtctcccacttggggcacccagtccactccagccggccaccggcgatgtagctagcgatagctataataacgttttcagggataccgaggctctcagagaactcggggtgacgcattaccgattttccatctcctgggcacgggtgctgcctaatggatctgctggagtgccgaaccgtgaggggttgcgttactacagaagactgctggagaggcttcgggaactgggcgtccagccagtggtcaccctttaccattgggacttacctcagcgactccaggacgcttatggcggctgggcgaatcgggccttggccgaccactttagggattacgcggaattgtgttttagacactttggtggacaggttaagtactggataacaatcgacaatccttacgtagtcgcctggcatggctacgcgaccgggcgcctggcacccgggatccgcggaagcccaaggctcggttacctggtggcccataatctgctgctcgcgcacgcaaaggtctggcacttgtacaacacctcgtttcgaccgacacagggcgggcaagtgtctattgccctctcctcacactggataaacccaagacggatgacagaccatagtattaaggaatgccagaaaagtttggatttcgtgctgggctggttcgcgaagccagttttcatcgacggagactaccccgagtcaatgaagaacaacctgagcagtatcctgccagatttcacagagagcgagaaaaagttcatcaaagggaccgccgacttttttgccctgtgttttgggcccacgttgagttttcaacttctcgatccacacatgaagtttaggcaattagagagcccaaacctccggcagcttttatcctggatcgatctggaattcaatcatcctcagatctttatagtcgagaatggctggtttgtgtccggaaccaccaagcgtgacgatgctaagtacatgtattatttgaagaagtttatcatggaaaccctgaaggcgatcaaactggacggtgtggacgtcatcggatatacagcatggagcctaatggacggcttcgagtggcaccggggatacagcatccgtcgaggtctcttctacgtggactttctgtcccaggacaaaatgctcctacccaagtcctctgccctcttttatcagaaactgattgagaagaatggctttccgcctctgccggagaatcagccccttgagggaacatttccatgcgatttcgcctggggcgttgtggacaactatatccaagtggacacgacccttagccaatttactgacctcaatgtctacctctgggacgtgcatcactccaagcggctgatcaaggtcgacggcgtcgtgaccaagaaaagaaagtcctattgtgtagatttcgctgcgattcaaccacagatcgcactcctccaagagatgcatgtgactcacttccggttctccctagactgggccttaatccttcctttaggcaaccagagccaggtgaaccacactatactgcagtattatcggtgtatggcctctgaactcgttcgcgtcaatatcacccctgtggtcgcgctgtggcagccgatggccccgaaccaggggttaccaagacttctggccagacaaggtgcctgggaaaacccatatactgcactggcattcgccgagtacgccaggctctgtttccaggagctgggacatcacgtgaagctgtggatcacgatgaacgagccatacaccaggaacatgacatatagcgcagggcacaatctcctgaaagcccatgcccttgcatggcatgtgtacaacgagaaattcaggcatgcacaaaatggcaagatcagtatagccctccaggccgactggattgagccagcgtgccctttctcccaaaaggataaagaggtcgcagagagagtgctcgagttcgacatcggctggctcgcagaacctatattcggctcaggggactacccttgggtgatgcgggattggctgaatcagcgtaacaacttcctcctcccatattttactgaggacgagaaaaagctgatccagggtacctttgatttcctcgccctttcacactacactaccatcctggtggacagcgagaaagaggatcccatcaaatacaatgattatctagaggtgcaggaaatgacagatattacttggctcaactcaccctcccaggtggccgtggtgccctggggcctacgcaaagtgctgaattggttgaaattcaaatacggcgatctgccaatgtatattattagtaacggaatcgatgatggtctgcacgcagaagacgatcaattgagggtgtattatatgcagaactatattaatgaggcccttaaggcacacattttggacggtatcaatctgtgtggctacttcgcctattcattcaacgatagaactgccccacgattcggcctatataggtatgcagctgatcaattcgagcctaaagcatcaatgaagcactacaggaagattattgatagtaacggtttcccgggtccagagacactggagcgtttttgccctgaagagttcacagtctgcactgagtgctctttcttccacaccaggaagtctctgctcgcttttatcgcctttctgttttttgcatcaatcatttccctctccctgatcttctattattccaagaaaggccgcagaagttacaag

SEQ ID NO: 15320 - DNA, 3036 bp, synthetic construct
  misc_feature 1..3036: note = source = /note="Description of Artificial Sequence: Synthetic coding sequence"
  source 1..3036: mol_type = other DNA
atgcccgcctcagccccgcctagaagacctagaccaccccccccttcgctgagcctcttactggtcctgcttggtctgggcgggcggcgactccgcgctgaaccgggcgacggcgctcagacctgggccagattttcccgtccaccggccccggaagctgcaggcctcttccagggcacatttcctgacggatttttatgggcggtgggtagcgccgcctatcaaaccgaaggaggatggcagcagcacgggaagggagcgagcatttgggacaccttcacacatcatcccctggctccacccggcgattccagaaatgcatctctccccttaggtgcaccttcgccgctccaacctgctacaggggatgtcgctagcgactcatataacaacgtgttcagagatacagaggccctgagagaactgggtgtcacccattatcgcttttccatcagttgggcccgagtgctgcctaatgggtcagctggcgttccaaatcgcgagggcctaaggtactaccggcggcttttagaacggctgcgcgagcttggggtgcagccggtggttaccttgtaccactgggacttaccccaaagactgcaggacgcatacggcggatgggccaaccgagccctggccgatcactttagggactacgcagagctctgcttcagacacttcggagggcaggtaaaatattggataaccattgacaacccgtacgttgtcgcctggcacggttacgccacaggcagactggcgccaggcatccgcgggtctccccgacttggctatctggttgctcataatctgttgttggcgcatgcaaaggtctggcacctctacaacacctcctttaggcccacccagggtggacaggtgtccatcgccctgtctagccactggataaacccgcgacgcatgacagatcacagtattaaggagtgtcagaagtcactcgatttcgtcctcggatggttcgctaaacctgtcttcattgatggggactaccccgaatctatgaagaacaacctgtcatccattttaccggatttcaccgagtctgaaaaaaaatttatcaaaggtactgccgacttcttcgcactgtgcttcggacccaccctgagcttccaactcctcgaccctcatatgaaattccggcagctagaatctccgaatcttaggcagttgctttcttggatagatttggagttcaatcaccctcagatcttcattgtggagaatggttggtttgtgagcggtaccacaaagagagacgacgcgaagtatatgtactacctaaagaaatttatcatggagaccctgaaggccatcaagctggacggcgtggatgttataggttataccgcttggagcctgatggatggattcgagtggcatagaggctatagtatcagacgtggcctattttacgtggacttcctgtcccaggacaagatgcttttgccaaaaagtagtgccttgttttatcagaagctcatcgagaagaatggattcccacctctgccagagaaccagccattagagggaacatttccttgtgatttcgcttggggcgtggttgataattacatacaagtggacactaccctgagccaatttacagacctcaacgtgtatctatgggacgtgcaccattcgaaaagacttataaaggtggacggagttgtcacaaaaaagaggaaatcatattgtgttgacttcgctgctatccaaccacaaatagctctgcttcaggagatgcacgttacccacttccgcttttcgctcgattgggcactcatcttgcccctcggcaaccagtcacaggtgaatcacacgatcctgcagtactataggtgcatggcaagtgaactggtccgcgttaacatcacccccgtggtggcactttggcagcctatggctccgaaccagggcctgcccaggctccttgcgcgacagggcgcatgggagaatccttataccgcactagccttcgccgaatacgctaggttgtgctttcaggagctgggtcaccacgtcaaactatggatcactatgaatgagccgtacaccagaaacatgacctactcggcgggtcataacctcctgaaggcccacgccttggcgtggcacgtgtacaacgagaaatttagacatgcccaaaacggtaagatcagcatcgccctccaggcggactggattgaaccagcttgtccgttttctcaaaaggacaaggaagtggcggagcgggtgctggagttcgatattggttggctcgccgaacccatcttcggcagcggcgattatccttgggtgatgcgcgactggttgaatcagcgaaacaacttccttctgccatattttaccgaggacgaaaaaaagctcattcaggggacctttgactttttggcgctgtctcactacaccaccatactggtggacagtgaaaaggaggatccaataaagtacaatgattacctggaggttcaggagatgacggacatcacctggttgaatagccccagtcaggtggcagtagtaccctggggccttcgcaaagtgctcaattggctgaaattcaagtatggagatctgcctatgtatattatttctaatggcatagacgacgggctacacgctgaggacgaccagttgcgggtttattatatgcagaattacattaacgaggctctgaaagcccacatcctcgatggcatcaacctttgcgggtactttgcatactccttcaacgaccggactgccccaaggttcggactgtacaggtacgcggctgatcagttcgaacctaaggccagcatgaagcactataggaagatcatcgactctaatggtttccctggccccgaaaccctggaacgcttctgtcctgaggaattcaccgtgtgtaccgaatgcagcttcttccatacccgcaagagcctcttggccttcatagctttcctgtttttcgccagtattatttctctgtcccttatattttactactccaaaaaaggacggcgctcatataag

SEQ ID NO: 15321 - DNA, 3036 bp, synthetic construct
  misc_feature 1..3036: note = source = /note="Description of Artificial Sequence: Synthetic coding sequence"
  source 1..3036: mol_type = other DNA
atgccggcgtcggcgccgccgcgtcgaccgcgaccgccgccgccgtcgctatcgctattactagtattattaggtctaggtggtcgtcgactacgagcggaaccgggtgatggtgcgcaaacgtgggcgcgattttcgcgtccgccggcgccggaagcggcgggtctatttcaaggtacgtttccggatggttttctatgggcggttggttcggcggcgtatcaaacggaaggtggttggcaacaacatggtaaaggtgcgtcgatatgggatacgtttacgcatcatccgttagcgccgccgggtgattcgcgaaatgcgtcgttaccgttaggtgcgccgtcgccgttacaaccggcgacgggtgatgtagcgtcggattcgtataataatgtttttcgagatacggaagcgttacgtgaactaggtgtaacgcattatcgattttcgatatcgtgggcgcgagttctaccgaatggttcggcgggtgtaccgaatcgagaaggtttacgatattatcgtcgactactagaacgtctacgagaattaggtgtacaaccggtagtaacgctatatcattgggatttaccgcaacgtttacaagatgcgtatggtggttgggcgaatcgagcgctagcggatcattttcgagattatgcggaactatgttttcgacattttggtggtcaagttaaatattggataacgatagataatccgtatgttgtagcgtggcatggttatgcgacgggtcgtttagcgccgggtatacgaggttcgccgcgactaggttatctagttgcgcataatttactattagcgcatgcgaaagtatggcatttatataatacgtcgtttcgaccgacgcaaggtggtcaagtttcgatagcgttatcgtcgcattggataaatccgcgacgaatgacggatcattcgataaaagaatgtcaaaaatcgttagattttgtactaggttggtttgcgaaaccggtttttatagatggtgattatccggaatcgatgaaaaataatttatcgtcgatattaccggattttacggaatcggaaaaaaaatttataaaaggtacggcggatttttttgcgttatgttttggtccgacgttatcgtttcaattactagatccgcatatgaaatttcgtcaattagaatcgccgaatttacgtcaattactatcgtggatagatttagaatttaatcatccgcaaatatttatagtagaaaatggttggtttgtatcgggtacgacgaaacgagatgatgcgaaatatatgtattatttaaaaaaatttataatggaaacgttaaaagcgataaaattagatggtgtagatgttataggttatacggcgtggtcgttaatggatggttttgaatggcatcgtggttattcgatacgacgtggtctattttatgtagattttttatcgcaagataaaatgctattaccgaaatcgtcggcgttattttatcaaaaactaatagaaaaaaatggttttccgccgttaccggaaaatcaaccgctagaaggtacgtttccgtgtgattttgcgtggggtgttgtagataattatatacaagttgatacgacgttatcgcaatttacggatttaaatgtatatttatgggatgtacatcattcgaaacgtttaataaaagtagatggtgttgttacgaaaaaacgtaaatcgtattgtgttgattttgcggcgatacaaccgcaaatagcgctactacaagaaatgcatgttacgcattttcgtttttcgctagattgggcgttaatattaccgctaggtaatcaatcgcaagtaaatcatacgatactacaatattatcgttgtatggcgtcggaactagtacgtgttaatataacgccggtagtagcgttatggcaaccgatggcgccgaatcaaggtttaccgcgattattagcgcgtcaaggtgcgtgggaaaatccgtatacggcgttagcgtttgcggaatatgcgcgtctatgttttcaagaattaggtcatcatgtaaaattatggataacgatgaatgaaccgtatacgcgaaatatgacgtattcggcgggtcataatctactaaaagcgcatgcgttagcgtggcatgtttataatgaaaaatttcgacatgcgcaaaatggtaaaatatcgatagcgctacaagcggattggatagaaccggcgtgtccgttttcgcaaaaagataaagaagttgcggaacgagtactagaatttgatataggttggctagcggaaccgatatttggttcgggtgattatccgtgggtaatgcgtgattggttaaatcaacgaaataattttttactaccgtattttacggaagatgaaaaaaaattaatacaaggtacgtttgattttctagcgttatcgcattatacgacgatattagttgattcggaaaaagaagatccgataaaatataatgattatctagaagtacaagaaatgacggatataacgtggttaaattcgccgtcgcaagttgcggtagtaccgtggggtctacgtaaagtattaaattggttaaaatttaaatatggtgatttaccgatgtatataatatcgaatggtatagatgatggtctacatgcggaagatgatcaactacgtgtttattatatgcaaaattatataaatgaagcgctaaaagcgcatatattagatggtataaatctatgtggttattttgcgtattcgtttaatgatcgaacggcgccgcgttttggtttatatcgatatgcggcggatcaatttgaaccgaaagcgtcgatgaaacattatcgtaaaataatagattcgaatggttttccgggtccggaaacgctagaacgattttgtccggaagaatttacggtatgtacggaatgttcgttttttcatacgcgaaaatcgctattagcgtttatagcgtttttattttttgcgtcgataatatcgctatcgttaatattttattattcgaaaaaaggtcgacgatcgtataaa

SEQ ID NO: 15322 - DNA, 3036 bp, synthetic construct
  misc_feature 1..3036: note = source = /note="Description of Artificial Sequence: Synthetic coding sequence"
  source 1..3036: mol_type = other DNA
atgcctgcctctgcgcccccccgacggcccagaccaccacccccatctctgagtctattgctggtgctcctaggtctcggtggcaggcgtctgcgagccgagcctggggacggcgctcaaacatgggctagattctcaagacctcccgcccctgaggccgccggcctgttccagggcacttttcccgacgggtttctgtgggcggtaggttccgccgcctatcagacagagggagggtggcaacagcatggcaaaggcgcatcaatttgggatacttttacacaccaccctttggcacctccgggagacagtaggaatgcatctctacctctcggcgcaccttcccccctgcagcccgccacaggcgacgttgcgagcgactcctacaacaatgtcttccgagatacggaagctctgcgtgagctgggcgtgacacactatcgcttctctatcagctgggccagggttctgcctaatgggagcgctggggtcccgaatcgagagggtctgagatattatcgaaggttactggagaggctgagagagcttggcgttcagcccgtcgtcacactctatcactgggatctgccacagagactgcaggatgcttatggggggtgggcgaaccgagctctggctgatcattttcgagactatgccgagctgtgcttccgacattttggagggcaggtcaaatactggatcacaatagacaacccatatgtggttgcttggcacggatatgctacaggccgactggctcctggaattcgaggctcacccagattgggctatctggtcgcccacaacctgcttctcgctcacgcaaaggtgtggcatctctacaatacgtcattccgacccacacagggggggcaggtgtctatcgcattatcttcacactggatcaatccgagaaggatgaccgatcactccattaaagagtgtcaaaagagcctggacttcgtgcttgggtggttcgccaagcctgtgttcatcgatggagattatccagagtctatgaagaacaacttatcttcaattctgcccgactttaccgaaagcgagaaaaaattcataaagggcaccgctgatttctttgctctgtgttttggccccaccctgtccttccagctacttgatcctcacatgaagtttcgacaactcgagagtcctaatttaagacaactgctgtcctggatagatctggagttcaatcatccacagattttcattgtggagaacggatggtttgtgagcggtacgactaaaagggacgatgctaagtatatgtactacctgaagaagttcatcatggaaacactcaaggccattaagctggatggagtagacgtcatcggatacacagcatggtcactgatggatggtttcgaatggcaccgaggctacagtattaggaggggtctcttttacgtggactttctgagccaggacaagatgctgctgccaaaatcttccgctctgttctaccagaagctcattgaaaaaaacggcttcccacctctgcccgaaaaccagcctctcgaagggaccttcccctgcgatttcgcatggggcgtggtcgataactatatccaagtcgacacaacactgtcccagttcactgaccttaatgtatacctgtgggacgtgcatcattcaaaacggctcataaaagtcgacggcgtcgtcactaagaaaaggaagtcctactgtgtagacttcgccgcaattcagcctcaaatagccctgctccaagaaatgcatgtgacacacttcaggtttagtctggactgggccctcatcttgcctctgggtaatcagtcacaagtaaatcataccatcctccagtattacagatgcatggccagtgaactagtgagggtaaatataacacctgtcgtggcgctgtggcagcctatggcccccaaccaaggattgccacgactcctagcacggcagggagcatgggaaaacccttataccgctttagccttcgccgaatatgcccgactgtgcttccaggagctgggacatcacgttaaactgtggatcactatgaatgaaccgtataccaggaacatgacatattccgccgggcataatcttttgaaagctcacgccttagcttggcacgtgtacaacgagaaattccgacacgcccagaatgggaaaatctccatagcccttcaggccgactggattgagccagcctgcccttttagccaaaaagataaagaggttgccgagcgcgtgttagaatttgatattggctggctagcagagcctatcttcggcagcggcgactatccctgggtgatgcgagattggctgaatcagcggaataatttccttctgccatatttcacggaggacgagaaaaaactgattcaggggactttcgacttcctggcactttctcactacaccaccatcttggtggattcagagaaagaggatccaatcaaatacaacgactatctggaagtccaggaaatgacagacattacttggctgaattcacctagccaggtggccgtcgtaccctggggcttgagaaaagtgttgaactggctcaaatttaagtacggcgatctgcccatgtatatcatatctaacgggatcgacgacgggctgcatgctgaagatgatcagctcagggtatattatatgcagaactatatcaatgaggcattaaaagcccacattctggatggcatcaatctctgcgggtactttgcttattccttcaatgaccgcacagcacctcgctttggattgtataggtatgcagcggatcagtttgaacccaaagcatccatgaagcattatcgaaaaatcatcgactctaatggattccccgggcccgagaccttggagagattttgcccagaagaatttactgtgtgtacggagtgcagcttttttcataccagaaagtctttactcgcctttatcgcgtttctgttcttcgcatctataatcagtttaagcctcatcttttattactctaagaagggaagaaggtcctataaa

SEQ ID NO: 15323 - DNA, 3036 bp, synthetic construct
  misc_feature 1..3036: note = source = /note="Description of Artificial Sequence: Synthetic coding sequence"
  source 1..3036: mol_type = other DNA
atgcccgcctcggccccgcctagaaggcctcggccaccaccgccctcactgtctctgctgttggtgctcctagggttgggaggcagacgcctgcgtgccgagccgggagatggtgcgcagacctgggctcggttctccagaccccccgcaccggaagcagcgggtctattccagggcactttccctgacggttttctgtgggctgtgggaagcgctgcctatcaaactgagggtggttggcagcagcacggcaagggggcgtccatctgggacaccttcactcaccatccccttgcgccccctggcgattcaagaaatgcctcgctcccccttggcgctccatctcccctccaaccagcaacgggtgacgtcgcatctgactcctataataatgtatttcgcgacacagaagccctcagagaattgggcgtaactcactataggttttcaatttcttgggcacgggttctcccaaacggatctgctggcgtgccgaatagagaaggactgcgttattatagacggctgctggagcgcctgagggaactgggagtccagccggtggtgacgctttatcattgggacctccctcagaggctccaggatgcctacggtggatgggcgaacagggcgttagcggatcatttccgagactacgctgagttgtgctttaggcattttggcgggcaggtgaagtattggattactatcgataacccgtatgttgttgcatggcacggttatgccacagggcggttggctcctgggatccggggtagcccccgcctgggttatttggtcgcccataatctgctcctcgctcacgccaaggtgtggcatctgtacaatacttcttttaggccaacgcagggaggccaagtgtcgatcgcattgtcctcccattggattaaccctagaagaatgactgatcacagcataaaagagtgccagaagtccctggacttcgtccttgggtggtttgccaaacccgtcttcatcgatggtgactaccctgagtcaatgaaaaacaacctttctagtatcctgccagacttcacagagagcgagaagaagttcatcaaaggaaccgccgacttttttgcactgtgctttgggcccacgctaagtttccagttgctggatccgcatatgaaattcaggcagctcgagtctccgaatctccgccagctcctcagctggattgatttggaatttaatcaccctcaaatcttcatcgtggagaatggttggtttgtctcaggaacaaccaagcgggatgacgcgaagtacatgtactatctgaagaagtttattatggagacactaaaggccatcaaactggatggcgttgacgtgattggctatacagcttggagccttatggacgggttcgaatggcacagaggctatagcattcgtcggggtctgttttacgtcgatttcctgagtcaggataagatgctgctgccaaagagctccgccctgttctatcaaaaactaatcgagaagaatggcttcccgcccttacctgaaaatcaacccttagaggggacttttccttgtgattttgcctggggagtcgtggataattacatccaagtggacaccactttgagccagtttaccgaccttaatgtctatctgtgggacgtgcatcattcgaaaaggctgataaaagtcgacggcgtggttaccaaaaaaaggaagagctattgtgtcgacttcgccgcaatccagccacagattgccctcctgcaggagatgcacgtgactcatttcaggttctcgctggattgggctctgatactgccactgggaaatcaatcccaggtgaaccacacaatcctccagtactacagatgcatggcttcagagcttgttcgggttaacataacccccgtggttgcactatggcagcccatggccccaaaccaggggctgccgcggctgttggcaaggcagggagcgtgggaaaatccctatactgccctcgcgtttgcggagtatgcacgtctgtgttttcaggaactggggcaccacgtgaagttgtggataacaatgaatgaaccatataccagaaatatgacatactcggcagggcacaacctgcttaaagcacacgcgttggcgtggcacgtttacaacgagaaatttcgtcacgctcagaacgggaagatatctatcgccctgcaggccgattggattgagcctgcgtgcccattctcccagaaagataaggaagtcgccgaaagagtgctggaatttgacatcgggtggttggcggagcccatatttgggtctggtgactacccatgggtgatgcgggattggctcaatcaaagaaacaacttcctcctgccttattttactgaagatgaaaaaaagctcatccagggaacctttgacttcctggccttgtctcactacaccaccattcttgtggacagcgaaaaagaggatcccattaagtacaatgactatctcgaagtgcaagagatgactgacatcacctggctcaacagtcctagccaggtggcggtcgtgccatggggtctgcgaaaggtgctaaactggttgaaatttaagtatggcgacctccccatgtatataatatctaatggcatcgacgacggcctccatgccgaggatgaccagctgcgtgtgtactacatgcagaattacattaacgaagcccttaaggcgcatatactagacggtatcaatctgtgtgggtatttcgcctactcgttcaatgaccggacagcgcctaggtttgggctgtatcgatatgcggcagatcagttcgaacccaaagcttcaatgaaacactatcgcaaaatcatcgacagtaacggttttcctgggccggagacactggaaagattctgcccggaagagtttactgtctgtaccgagtgttccttttttcatacgcggaagtcactgttggcgttcatcgccttccttttcttcgcgagcattattagtctcagcctgattttctattatagcaaaaaggggcgccggtcatacaag

SEQ ID NO: 15324 - DNA, 3036 bp, synthetic construct
  misc_feature 1..3036: note = source = /note="Description of Artificial Sequence: Synthetic coding sequence"
  source 1..3036: mol_type = other DNA
atgccagcctccgcccccccccgccggcccaggcccccaccaccctctctttccttattgctggtgctccttggccttggtggacgtcgactacgggctgaacctggagatggtgcccagacctgggcaagattttcacgccctcccgcccccgaagccgccggcctatttcaaggaacttttcccgacggttttctctgggctgttggctccgcagcctatcagacagagggagggtggcaacagcacgggaagggagctagcatttgggacacattcacccaccacccgcttgcacccccaggcgactctcgaaatgcctcactccccttgggtgctcccagcccactgcagcccgcaacaggcgacgtggcttctgatagttacaacaacgtctttcgagacacagaagctcttcgagaactcggcgttactcattaccgtttttctatttcatgggctcgggtcctgccaaatggtagcgccggagtgccgaatagagagggactccgctattatcggcgacttttagagaggttgcgcgagctcggcgtccagcctgttgtcacgttatatcactgggatttgccacagagactgcaagatgcttacggcggttgggccaaccgtgcactggcggatcatttccgggactatgctgagctgtgtttccgacacttcggaggtcaggtgaagtactggatcactattgataacccctacgtggtggcgtggcacggctatgccactggcagactcgctcctggtatccgtgggtctccacgtctgggctacctggtggcacacaatctgctgttggcccacgcaaaggtgtggcatctttacaatacttccttcaggcccacgcagggagggcaggttagcatcgccctcagcagtcactggataaacccccggcggatgactgaccactccatcaaggaatgtcagaagtccctggatttcgtcttgggctggttcgcaaagccagtgttcattgacggtgactaccctgagtcgatgaagaataacctgtctagcatcctccccgattttactgaatcagaaaagaagttcatcaaggggacagcagatttcttcgcgctgtgttttggacccactttgagcttccagctgctggacccccatatgaagtttaggcagcttgagtcacccaacctgcgccagctgctgagctggatcgacctggaatttaatcacccacaaatttttattgtcgaaaacggctggttcgtctcaggcaccacaaagcgcgatgatgccaagtatatgtactacttaaagaagtttataatggagacactaaaggccattaagcttgatggtgtggatgtgatcggctacaccgcttggagcctcatggatggtttcgaatggcaccgtggttactcaatacggcgggggctgttctacgttgactttctaagccaggacaagatgctgctacctaaaagcagtgcattgttctatcagaagctcattgagaagaatgggtttccccccctgcctgaaaatcagcccttggaagggacctttccatgcgacttcgcctggggggtcgtggacaactacatccaggtcgatacgaccctttcccaattcacagacttgaacgtgtatttgtgggatgtgcaccattccaaaaggctgattaaagtcgacggtgtggtcaccaaaaagaggaagtcatattgcgtggactttgccgcaattcagcctcagatcgctctcctgcaagagatgcatgtgactcacttcagatttagtctggattgggccctgattctgccacttggaaaccagtcccaggtgaatcataccatcctccagtactacagatgtatggcttctgagcttgtccgcgttaatataacccccgtggtggccctgtggcagcctatggcacccaaccagggattaccccgcctactcgctcggcaaggggcttgggagaacccttatacggcattggctttcgcagagtacgcccggctgtgcttccaggagctaggccaccatgtcaaactgtggataacaatgaacgaaccatatacccggaatatgacttattccgcaggacacaacctcctgaaggcccacgcattggcatggcacgtgtacaacgaaaagtttagacatgcccaaaacgggaagatctccattgccctgcaggccgattggatcgaacccgcttgcccgtttagtcagaaggacaaagaggtcgcagaaagggtactggagtttgacattggctggctggccgaaccgatttttgggagcggtgactatccatgggtgatgagggactggttgaaccagaggaacaattttcttctaccttacttcacagaagacgagaagaaattgatccaggggacgttcgacttcctggcactcagtcactataccactattctggtggactcagaaaaggaggatccaatcaagtacaatgattatctggaagtgcaggaaatgaccgacattacctggttaaattctcctagccaggtggcggtcgtgccttgggggctcagaaaggtcctgaactggctcaaatttaagtacggggatttaccaatgtacattattagcaatgggatagatgacggcctgcacgcagaagatgatcagctgcgcgtctactatatgcagaactacatcaatgaagctctcaaggcccacatcttggatggcatcaatctgtgcggatacttcgcttactcttttaatgaccggaccgcgccgcggttcggtctgtatcgctatgcggccgaccagttcgagcccaaggctagcatgaagcactatcgcaagattattgatagtaatggttttcccggcccggagacgcttgagcggttttgccctgaggaatttactgtgtgtactgagtgctcctttttccatacaaggaagtccctgttggcctttatcgctttcctcttctttgccagtataatttcccttagcctgatcttctattactcgaagaaagggaggcgctcctataaa

SEQ ID NO: 15325 - DNA, 3036 bp, synthetic construct
  misc_feature 1..3036: note = source = /note="Description of Artificial Sequence: Synthetic coding sequence"
  source 1..3036: mol_type = other DNA
atgcctgcttcagcaccacctcgaagaccaagaccaccaccaccaagtttatcacttcttttagttcttttaggattaggaggaaggagacttcgtgctgagccaggggacggagctcaaacttgggcaagattttctagaccaccagcaccagaagcagctggacttttccaaggaacttttcctgatggttttctttgggcagtaggtagtgcagcttatcaaacagagggaggatggcaacaacatggtaagggagcatcaatttgggacacgtttacacaccatccattagcacctcctggtgatagtcgaaatgcttctttaccattaggtgctccatctccattacaaccagcaacaggagatgttgcatcagattcatataacaacgtttttagagatactgaagctttaagagaattaggagtaacacattacagattttccatttcatgggcaagagttcttccaaatggatccgcaggtgttccaaatagagaaggattaagatattatagacgattacttgaaagacttagagaattaggtgttcaaccagtggttacactttatcattgggatcttcctcaaagattgcaagatgcttacggaggttgggcaaatcgtgctcttgcagatcattttagagattatgctgagttatgctttagacattttggaggacaagtgaaatattggattactattgataatccatatgtagtcgcatggcatggatatgctactggaagattagctccaggaattagaggatctccaagattaggatatttggtagctcataatcttttacttgctcatgctaaagtgtggcatctttataatacaagttttagaccaacacagggaggacaggtatcaatagcattaagttcacattggattaatccaagaagaatgactgatcattcaattaaggaatgtcaaaaatctttagattttgttttaggttggttcgcaaaaccagtttttattgacggagattatccagaaagtatgaagaataatttaagtagtattttacctgactttacagaatcagaaaagaaatttattaagggaactgcagatttctttgctttatgttttggtccaacacttagttttcaacttcttgatcctcatatgaaattcagacaattagaatcacctaatttaagacaattactttcatggatagatttagaatttaatcatccacaaatcttcattgtagaaaatggttggtttgtttcaggaaccacaaagagagatgatgctaaatatatgtattatcttaagaaatttattatggaaacattaaaagctattaaacttgatggagtcgatgtcatcggatatactgcctggtccttaatggatggatttgaatggcatagaggttatagtattagaagaggattattttatgtagattttttatctcaagataagatgttattacctaagtcatcagctttattttatcaaaagttaattgaaaaaaatggttttccaccacttccagaaaatcaacctcttgaaggaacttttccatgcgattttgcatggggagtagttgataactatattcaagttgatactactcttagtcaattcacagatcttaatgtttatttatgggatgttcatcactctaaaagattaattaaagttgatggtgtcgttacaaagaaaagaaaatcatattgtgtggattttgctgcaattcaaccacaaattgcattgttacaagaaatgcatgttacacattttagattttcattagattgggctcttattcttccacttggtaatcaatctcaagttaatcatactattcttcaatattatagatgtatggcttccgaattagtacgtgttaatattactccagttgtggcattgtggcaacctatggctcctaatcaaggtcttccaagacttttggctagacaaggagcttgggaaaatccttatactgctttagcatttgctgaatatgcacgtttatgttttcaagaattaggacatcatgttaaattatggattaccatgaatgaaccatatactagaaacatgacatattcagcaggacataatttattgaaagctcatgcactagcatggcatgtttataatgaaaaatttagacatgcacaaaatggtaaaatttctattgctttacaagctgattggattgagccagcttgcccatttagtcaaaaagataaggaagtagctgagagagttctcgagtttgatattgggtggttagcagaaccaatttttggttctggagattatccttgggttatgagggattggcttaatcaaagaaataattttcttttaccttattttactgaggatgaaaaaaaattaattcaaggaactttcgattttcttgctttaagtcattatacaacaattcttgtagactcagaaaaagaagatccaattaagtataatgattatcttgaagtacaagagatgacagatattacttggttaaactcaccaagtcaagttgcagttgtaccatggggattaagaaaagttttaaattggcttaaatttaaatatggagacttaccaatgtatatcatctcaaatgggattgatgatggtttacatgctgaagacgaccaactaagagtttattatatgcaaaattatattaatgaagcattaaaagcacatatccttgatggaataaatttatgtggatattttgcatattcatttaatgatagaacagctcctagatttggactttatagatatgcagctgatcaatttgaaccaaaagcatcaatgaaacattatagaaaaattatcgatagtaatggatttccaggaccagaaacattagaacgattttgtccagaagaatttactgtttgtactgaatgttcattctttcatacaagaaaatcattacttgcttttattgcatttttattttttgcatcaattataagtctttctcttattttttactatagtaaaaaaggacgaagaagttataag

SEQ ID NO: 15326 - DNA, 3036 bp, synthetic construct
  misc_feature 1..3036: note = source = /note="Description of Artificial Sequence: Synthetic coding sequence"
  source 1..3036: mol_type = other DNA
atgccagcatccgcaccgccacgcagacctcgccctcccccgccctcactaagtctcctgctggtactgctgggcctgggaggtcggcgcctgagggccgagccgggggatggcgcgcaaacgtgggcgcggttctccaggccgcctgccccagaagccgcaggattgttccagggaacatttcccgatggctttctctgggcagttggatcagccgcttaccagacagaggggggatggcaacagcacggcaaaggtgcatccatctgggacacgtttacacatcaccccctggcacctccaggcgacagtagaaacgccagccttccactcggtgccccaagccccctacaacctgcgactggcgacgtagcatccgattcttacaataatgtgtttagggatacggaggctcttagggaactaggtgtaactcactacaggtttagtatctcgtgggctagggtactacccaatggcagcgctggggttccaaaccgcgaaggactcagatattatcgccgtctgctcgaaaggttacgggagttgggggtacagccagtggtgaccctgtatcattgggatttgccacagagactccaggatgcctatggaggctgggctaatagagctttggcagatcattttcgcgactacgcagaactgtgctttcggcacttcggcggacaggtgaaatactggatcacaatcgacaatccgtacgtggtcgcttggcacggatatgccacaggtcgactcgcaccgggtatacgcggcagcccccggcttggatacctggttgcccacaacttattattggcccatgcgaaggtctggcacctgtacaacacaagcttcaggccaacacagggaggtcaggtgagcattgccttgagtagtcattggattaatccaaggaggatgaccgatcattcaattaaagagtgtcagaaaagcctggattttgtgcttggttggttcgctaaacctgtcttcattgatggcgattaccccgagagcatgaagaacaatcttagcagtatcctgcctgacttcactgagagtgagaaaaagttcataaaggggaccgcggatttcttcgctttatgctttggccccaccttatcttttcagctgctcgaccctcacatgaaatttcggcaactggaaagtcctaacttgaggcaactgctcagttggatcgacctggagtttaatcatccccagatttttattgtggagaacggctggttcgtttcaggaacgaccaaacgtgatgatgcaaagtacatgtactatctaaagaaatttataatggagactctaaaagccattaagttggatggcgtcgacgtcattggttacacagcttggtcactgatggacgggttcgagtggcatagaggctatagtatcaggagaggcctgttttatgtcgattttctgagccaggataagatgctcctgcccaaaagttcagctcttttctatcagaagttgattgagaaaaatgggttccctccattgcctgagaaccaacctctggaaggtacatttccctgcgatttcgcatggggtgtagtggacaattacattcaggtggacaccaccctgtcccagttcactgatctcaacgtatacctctgggacgtgcaccatagcaagcggctaataaaagtcgacggagtggtgactaagaagcggaagagctattgcgtggactttgccgcgattcagccacagattgctctcctgcaggagatgcatgtgactcacttcaggtttagcctcgattgggccttaatactgcccttgggtaaccagagccaagtgaatcacacaattctacagtactaccgttgtatggctagcgaattggtacgcgtaaacataactccagttgtcgccctgtggcagcctatggcccctaatcagggacttccaagactgctcgcacgccaaggagcatgggaaaatccttacaccgccttagcattcgctgagtacgcaaggctgtgttttcaggagctaggacatcacgttaaattgtggataacaatgaatgaaccatatacgcggaacatgacatactccgctggacacaatctactgaaggcacacgccctggcatggcatgtatacaatgaaaagttccgtcacgcacagaatgggaaaatcagcatcgccctgcaggctgactggatcgagccagcctgcccgttttctcagaaagataaagaagtagcggagcgagtacttgagttcgacatcgggtggctagcagagcctatctttggcagtggtgactatccttgggtcatgagagactggctcaaccaaaggaataactttttgctcccatacttcaccgaggacgagaaaaaactgattcagggaacattcgacttcttggccctgagccactataccaccatcttggtagactctgagaaagaagatcctataaaatataatgattacctggaggtacaagaaatgaccgacatcacgtggctcaacagcccttcacaggtcgccgttgtgccttggggactccgtaaagtcctgaattggcttaagttcaagtacggtgatcttccaatgtacataatatccaatggaatcgatgacggcttgcacgcagaggacgaccagctacgtgtgtattatatgcagaattatatcaacgaagcactgaaggctcacattttagatggtatcaacctctgcggctacttcgcctactcattcaacgatcggaccgctcccaggttcggcctatatcgttatgccgcggaccagtttgagcctaaagcaagcatgaagcactacaggaaaataatcgattccaacggattccccggcccggaaactttggagcgcttctgccctgaggaattcactgtctgcacagaatgctcattctttcataccaggaagagcttactggcattcatcgctttcttgtttttcgccagcataatcagcttaagccttattttctactacagtaaaaagggcagacggtcgtataag

SEQ ID NO: 15327 - DNA, 3036 bp, synthetic construct; identical to SEQ ID NO: 15318
  misc_feature 1..3036: note = source = /note="Description of Artificial Sequence: Synthetic coding sequence"
  source 1..3036: mol_type = other DNA

SEQ ID NO: 15328 - DNA, 3036 bp, synthetic construct
  misc_feature 1..3036: note = source = /note="Description of Artificial Sequence: Synthetic coding sequence"
  source 1..3036: mol_type = other DNA
atgccagccagcgccccacccaggagaccccgtcctccccccccctccctgagcctgctcctggttctgcttggcctgggaggacgtcgcctcagggccgagccaggagacggcgcccagacttgggctcgtttttcacgcccacccgctcccgaggccgctggcctgttccagggcacatttcccgatggattcttgtgggctgttggttctgctgcctaccaaacagaaggaggctggcagcagcatggtaagggtgcaagcatctgggacacattcactcaccacccccttgcaccaccaggcgactcacgtaacgcctctttgcccctcggagccccatcaccactgcagcccgccacaggagatgttgctagcgacagctataacaacgttttcagggatactgaggctctgcgcgagctcggagtgacacactacagatttagtatctcttgggcacgtgtcctgcccaacggtagcgcaggtgtacctaatagggagggtctccgctactacaggcgtctcctggagcgcctcagagagctgggtgtgcagcctgtggtaactctctaccactgggacctgcctcagaggctccaagacgcatatggcggctgggcaaatagggcactggctgaccactttagggactacgctgagctgtgtttccgccactttggcggacaggtcaaatactggatcaccatcgacaatccctatgtggtagcttggcacggctacgctacaggtagactcgcaccaggcatccgcggtagtccacgccttggctacttggtggcccacaatctgctgctggcccacgccaaggtttggcacctttacaacacttccttccgccctactcagggaggtcaggtttctatagctctttctagtcactggatcaatcccagaaggatgacagaccattccatcaaggagtgtcagaagtccttggattttgtgctgggttggtttgcaaagccagtctttatcgatggcgattacccagagtcaatgaagaacaatttgtcttccatcctgcctgacttcaccgagtccgaaaaaaagtttattaaaggaactgccgacttttttgccctttgcttcggacctactctgagcttccaactgctggacccacatatgaaattcagacaactggaaagtcccaacctgcgccagctcctgagctggattgacctcgagttcaatcacccacagattttcattgtagagaatggatggttcgtgagcggaacaactaagcgtgacgacgctaaatacatgtattacctgaagaagttcatcatggaaacactcaaagctattaaattggacggcgtggatgttatcggttacaccgcttggtctctgatggatggtttcgagtggcatagaggctattctattagaagaggactgttctacgtggatttccttagccaggataagatgctgctgcccaaatcctccgcacttttctaccagaagctgatcgagaagaatggttttccacccctgcctgagaaccaaccacttgaaggtacctttccctgcgacttcgcctggggtgtagttgataactacatacaggttgacactactttgagtcaattcactgaccttaacgtatacctctgggacgttcaccactctaagagactgattaaggttgacggagtcgtcaccaagaaacgtaaatcttattgtgttgatttcgctgctatccaaccacagatcgccttgcttcaggaaatgcatgtaacacatttccgtttcagtcttgactgggcattgattctgcccctgggcaaccagagtcaagtaaaccataccatactgcagtactaccgctgcatggcttcagaactggtacgcgtgaatattacaccagtcgtggctttgtggcagcctatggcccccaatcaaggactcccacgtctgctggcacgccagggagcttgggagaacccatacacagccctggccttcgctgagtatgcaagattgtgcttccaagagcttggccatcacgtgaagttgtggattaccatgaacgagccatacacacgtaatatgacctattccgctggccacaacctgctgaaggcacacgctcttgcctggcatgtctacaatgagaagttcaggcacgctcaaaacggtaagatttccattgctctgcaggccgattggatcgaacctgcttgtcccttcagccagaaggataaggaagtagctgagcgcgtgctggaattcgacatcggctggcttgcagaacccatctttggatctggagactacccttgggtaatgagagactggctcaaccagcgtaacaatttcctgctgccatactttaccgaggacgagaagaagcttatccagggaaccttcgactttctggccctttctcactacacaacaatccttgtagactctgagaaggaagacccaattaaatataacgactatctggaagtgcaggagatgactgacattacatggctgaacagtccctctcaggtagctgtcgtgccctggggtctccgcaaggtgcttaactggttgaaatttaagtacggagacctgcctatgtacatcatctctaatggaatagacgacggactccacgcagaggatgaccagctgagagtgtactacatgcagaactatataaacgaagctcttaaagcccacatcctggatggtatcaacctgtgtggctacttcgcctattcattcaacgacaggactgcccctaggtttggtctttatcgctacgcagccgaccagttcgaacccaaagcttcaatgaagcattaccgcaagatcatagattctaacggctttccaggacccgaaacattggaaaggttctgccctgaagagttcaccgtctgtacagaatgcagctttttccataccaggaaatctcttctggctttcattgcttttttgtttttcgccagcatcatctcactctctctcattttctattatagtaaaaagggtagaagatcatataaa

SEQ ID NO: 15329 - DNA, 3036 bp, synthetic construct
  misc_feature 1..3036: note = source = /note="Description of Artificial Sequence: Synthetic coding sequence"
  source 1..3036: mol_type = other DNA
atgcctgcctctgccccacctaggcgacccaggcctccaccgccgtcactttctctgctgttggttttgctgggcctcggtggccggcgtctccgagccgagcccggggatggcgcgcaaacatgggccaggttttcacgcccccctgcacccgaagccgctgggctctttcagggaactttcccagatggcttcttgtgggcagtcggatccgccgcttaccagaccgagggtggctggcagcagcacggcaagggcgcatcgatttgggacacatttacccaccatccgctggccccgccaggcgactcccgaaatgcctcacttcctctgggcgccccgtcaccacttcagccggccaccggggatgtggccagcgattcctataacaatgtgtttcgtgacacggaggccctgcgggaactgggcgtgactcattataggtttagcatttcctgggcgcgtgtactcccgaacgggtcggcaggcgtgccgaaccgtgagggccttcgatattaccgacggctcctggagcgtctgcgcgagttaggtgtgcagccggttgttacgctgtaccattgggacctgccgcagcgactccaagacgcttacgggggttgggcaaatagggccctggccgatcatttccgcgattacgctgagctctgttttcgtcactttggtgggcaggttaagtactggatcaccatcgataatccatacgtggtggcatggcacggctatgctactggccggttggctccaggaatacgaggtagtccacgcctgggctacttagtggctcacaatctgttactggcccatgctaaggtctggcacttatacaatacgtcgttccgaccgacgcaaggcggccaggtatcgatcgccctgtcgtcccattggatcaacccgcgaagaatgacggaccacagtatcaaggaatgccagaaatcgctggattttgttctgggttggtttgccaagcccgtcttcatcgatggcgattaccccgaaagcatgaagaataatctgagctccatcctaccggacttcaccgagagcgagaagaagttcatcaagggcaccgccgatttttttgccctgtgctttggcccaacgctttctttccaattgctggacccccatatgaagtttcgacaacttgagagcccaaacctacgtcagctactcagctggatcgacctggagttcaaccatccacagatctttatcgttgaaaatggctggttcgtttccggcactaccaagcgagacgacgcaaagtacatgtattacctaaagaagttcattatggaaaccctgaaagccatcaagctcgatggtgtagacgtgattggatacaccgcctggagtctgatggacggatttgagtggcacagaggttacagtattcgacgcggcttgttctacgtggatttcctgtcccaggataagatgctgcttccaaagagctccgcgttattctatcagaaattgattgagaagaacggattcccccccctccctgagaatcagccactcgagggcacgtttccgtgtgatttcgcctggggcgtcgttgataactacattcaggtggacacgacgctcagccagtttaccgacttaaacgtgtacctatgggacgtacaccattcgaagcgactgattaaggttgatggcgtggttaccaagaagcgcaaatcttactgtgtggatttcgcggctatacaaccgcagatagctctactgcaggagatgcacgtgacccactttcgtttcagtttggattgggccctcatcctcccactaggcaatcagagccaagtcaatcacacaattctccagtattaccggtgcatggcatcagagctggtgcgagtgaatattaccccagtggtggccctgtggcagccaatggcccccaaccagggactgccgcgactcctggcccggcaaggagcctgggagaacccctacacggccctagcctttgccgagtacgcccgcctgtgtttccaggagctgggccaccacgtgaagctctggattaccatgaatgagccctacacccgcaatatgacatactcagccggtcacaacctgctcaaagctcacgctttggcttggcatgtgtacaatgagaaattccgccacgcgcagaacggaaagattagcattgcgttgcaggccgactggatcgaaccggcctgtccgttcagccagaaagacaaggaagtcgcggaacgtgttctagagttcgacatcggatggctcgccgaacccatattcggaagcggagactatccctgggttatgagggattggttgaaccagagaaataattttcttttgccatacttcactgaggatgagaagaagctgatccagggaactttcgatttcctggccctctcgcattatacaactatactggttgattccgagaaggaggatccgattaaatataacgattatctggaagttcaggagatgacagacataacctggttgaattctcctagtcaggtggctgtggtcccgtggggtctgcgcaaggtcctgaactggctaaagtttaagtacggtgacctaccaatgtacataatttccaatggcattgacgacggtctacacgccgaagatgatcagctgcgtgtgtattatatgcaaaattatataaatgaggccctaaaggcccacattctcgatggcatcaacctgtgcgggtacttcgcatacagttttaacgatcgaacggcgccaaggttcggtctgtatcgctacgctgcagatcagttcgaaccaaaggcctcaatgaagcactatcgtaagataatcgattcgaacggcttcccaggaccggagacgctagaacgtttttgtccggaggaattcaccgtgtgcactgagtgctctttttttcatacccgcaagtcgctgctggccttcatcgccttcctgttctttgcgtccataatctcccttagtttgatattctactattccaagaagggccgccgaagctataaa

SEQ ID NO: 15330 - DNA, 3036 bp, synthetic construct
  misc_feature 1..3036: note = source = /note="Description of Artificial Sequence: Synthetic coding sequence"
  source 1..3036: mol_type = other DNA
atgcccgcatcagcccccccacgaaggcctaggccaccaccaccaagtctatccctgcttttggtgctcttaggattgggcggtaggaggctgcgcgcggagcctggcgatggagctcagacttgggcacgcttttctcgccccccagcgcctgaagccgctggactgttccagggcacttttccagatgggttcttgtgggcagttggttccgcagcatatcagactgagggcggctggcagcagcacggcaagggggcaagtatctgggatacttttactcatcatccattggcaccgcctggggattcacgcaatgcctctcttcccctcggcgccccctccccgctccagccagccactggcgatgtggcaagtgactcatacaacaacgtgtttcgcgacactgaggcgcttcgagagcttggcgtgacacattacagattcagcatcagttgggcccgcgtactgcccaatggcagcgcaggggtgcccaatagagaaggactgaggtactaccggagactcctggagcgcctacgggagctgggggtgcagccagtggtgacactgtatcactgggatttaccacagcggttgcaagatgcctatgggggatgggcgaacagggcattagcagatcactttcgcgactatgcggagttatgttttagacatttcggtgggcaggtaaaatactggatcactatcgacaacccctatgtcgtagcctggcatggctatgcaactggccgcctggccccggggatacgtggcagccccagactggggtacttggttgcccacaacctccttttagcgcacgcgaaggtttggcacttgtacaacacctcgttccggccaacccaaggcggccaggtgagtatagcacttagctctcattggatcaaccctaggcgaatgaccgatcactcaattaaggagtgtcaaaaatctctggactttgtactcgggtggttcgccaagcccgtgtttattgacggcgattatcccgagtcaatgaaaaataatctttcctcaattctgccagactttacggagtcagaaaaaaaatttattaagggtacagctgacttctttgccctatgctttggtcctaccctgagttttcaactgctggacccgcacatgaagtttcgccaattagaaagtccaaatctgagacagttgctcagctggattgatcttgaatttaatcacccccagatcttcattgtggaaaatggttggttcgtatctggcacaactaaaagggatgatgctaagtatatgtattacctgaaaaagtttataatggagacgctgaaggcaatcaaactggacggagtggacgttatcggctacaccgcttggtcactgatggatggtttcgagtggcacagggggtactccatccgtcggggactattctatgttgatttcctttcccaagacaaaatgttgctcccaaaatcttctgcgctcttttatcagaaattgattgagaagaacggatttcctccactgccagagaatcaacctttggaaggtacgttcccatgtgacttcgcttggggcgtcgtggacaactatattcaagtcgatacgacgctgtctcagtttaccgacctcaacgtgtatctgtgggatgtgcaccactctaagaggctcataaaagtcgatggagtggtaacaaaaaagcgcaaaagctactgtgtggattttgccgccatacagccacagatagccctcctacaggagatgcatgtaacccattttcggttttctctggactgggccctgatactgccgttgggaaaccagtctcaggttaaccatacaatactgcagtattatcgatgtatggcgagcgaattggtgcgtgtgaacattacccctgtggttgctctgtggcagcctatggcgcccaatcaaggcctaccacgtctgctggcacgccaaggggcctgggagaatccttacacagccctggccttcgcagagtatgctcgactgtgctttcaggaactcggccatcatgtgaagctatggatcactatgaacgaaccatatacccgcaatatgacctactctgctggccataatctcctgaaagcacatgcactggcctggcacgtgtataacgagaagtttcggcatgcgcagaatggaaaaatctcgatagccctccaggccgactggatagagcctgcttgccccttcagtcagaaggacaaagaagttgcagagagagtgttggagttcgatatcggttggcttgctgaaccaatctttgggagtggagattacccatgggtcatgcgggattggcttaaccagcggaataacttcctattgccctatttcacagaagacgagaaaaagctcatacagggtacatttgattttctggcactcagtcattacactaccatccttgtggactccgagaaggaggacccaattaagtacaatgactacttggaagtgcaggagatgaccgacatcacatggctaaacagccccagccaagttgcggtggttccctggggactccggaaagtgctaaactggctgaaatttaagtacggggatttaccaatgtatataattagtaatggcatcgatgatggcttgcacgccgaagatgaccagctccgtgtctattatatgcagaattacataaatgaggctctgaaagctcacatactagacggcatcaacctttgcggctatttcgcatattcttttaacgaccggaccgccccgcgattcgggttatacaggtacgctgcagatcaatttgaacccaaggcgagcatgaagcactatcgcaagatcatagatagcaacggtttccctggccctgaaacgttggaaagattttgccctgaggaatttactgtgtgtaccgaatgctcctttttccatactagaaagagcctgcttgccttcattgcttttctcttttttgctagtattatcagcctgtcacttatcttttattactcaaaaaaggggcgccggtcttacaag

SEQ ID NO: 15331 - DNA, 3036 bp, synthetic construct
  misc_feature 1..3036: note = source = /note="Description of Artificial Sequence: Synthetic coding sequence"
  source 1..3036: mol_type = other DNA
atgccagcatccgccccccctcggcggcctcggccacccccaccttccttaagtcttcttctggttcttctgggcttaggaggacgcaggctgcgcgcagaacccggtgatggcgctcagacttgggcaagatttagtagacctcccgccccagaagctgccggcctcttccaaggaaccttccctgacgggttcctatgggccgtaggatctgctgcatatcaaactgagggaggttggcagcagcacggcaaaggcgcctcaatatgggatactttcacccaccaccccctggctccccccggcgacagcaggaacgcaagcctgcctctgggggctcctagtccactgcaacccgcaaccggagatgtcgccagcgatagttataacaacgtttttcgagatacagaagcactaagggaactgggtgtgacacactatcggtttagcattagctgggcccgggtattaccaaacggctccgccggcgtgccaaaccgggaagggctgagatattaccggcgtctgctggagcgcttaagggagctcggcgttcagcccgtggttacactctatcattgggatttaccacagcgcctgcaggacgcctacggcggctgggccaaccgtgcattggctgatcacttccgcgattatgctgaattgtgcttccggcactttgggggccaagtcaagtactggatcactattgataacccttatgtggtggcctggcacggatatgcaaccggtcggcttgcacctggtattcgcggcagtccgcgactcggctacctggttgcccacaatctgctgctggcacacgccaaggtgtggcacctctataacacttccttcaggcccacccaaggcgggcaggtttcaattgcactgagcagccactggatcaatccacgcagaatgaccgaccattctattaaggaatgccagaagtccctggactttgttctgggttggtttgctaagccagtgtttatcgacggagactacccagaatcaatgaaaaacaatctgagcagcatcttacctgactttacagaatccgagaagaagttcatcaaaggcactgccgacttcttcgctttatgctttggccccacactgtcattccagctcttagacccacacatgaagttccggcagctggagtctcctaatctacggcaactcctgagttggatcgacctggaattcaatcacccacagatattcatagtggagaacgggtggtttgtcagcggcaccactaaacgggatgatgccaaatacatgtattatctaaagaaattcattatggagacactaaaggctatcaagctcgacggagtggacgtgatcggctacactgcctggagcctgatggatggcttcgagtggcaccgtggctactctatacgccggggcctcttctacgtggatttcttatctcaggataagatgctgctgcctaagagttctgctttgttctatcagaaattaatagagaagaacggctttccaccactgccagagaatcagccactggagggaacattcccttgtgactttgcctggggagtggtggacaactacattcaggtggatacaacactctcccagttcactgacttgaacgtgtacctctgggatgtgcaccatagcaaaagattaataaaggtggacggggtggtgaccaaaaaaagaaaatcttactgtgttgattttgccgctatacagccacagatcgccctgctgcaggaaatgcatgtcacccatttccgcttctccctggactgggcactgatcctgcccctggggaaccagtctcaggttaatcacacaattctacaatactaccgctgcatggcctccgagctggtccgtgtaaacattacaccagtggtcgctctctggcagccaatggcccccaatcagggtctgccacgcctacttgctcgccaaggtgcatgggaaaatccatataccgctctagcctttgctgagtacgcccggctctgtttccaggaactcgggcaccacgttaagttgtggattacaatgaacgaaccctatactcggaacatgacttacagcgctggccacaatttactgaaagcacacgcccttgcctggcatgtttataacgaaaaattccgacacgcccagaacgggaaaatatcaattgccctccaggccgattggatcgagccagcttgcccattcagccagaaagacaaagaagtggccgagcgggtcctggagttcgatatagggtggctcgccgagcccatcttcgggtccggggactatccctgggtcatgcgtgactggttaaatcagcggaacaactttcttcttccatacttcaccgaggacgaaaagaagctaatccaaggtaccttcgattttctggctctgtcccactacaccactatcctggtggattctgagaaggaggaccctatcaagtacaacgactacctagaggtgcaagagatgactgacattacctggctgaactcaccaagccaggtggccgtagtcccatggggcctgcgtaaggtcctgaactggctcaagttcaagtacggtgacctccccatgtatataatcagcaacgggatagacgacgggctgcatgctgaggacgatcagctacgcgtgtattatatgcagaattacataaacgaagccctgaaagcccatatcctggacggcattaacctgtgtggctactttgcttatagtttcaacgacaggactgctcctcgctttgggctctatcgatacgcagcagatcaatttgagcctaaggccagcatgaagcattatcgaaagataatagacagcaatggttttcccgggcctgaaaccttagagcggttttgcccagaggagttcaccgtgtgcacagagtgttcctttttccacactagaaagtcactactggcttttattgcatttctattttttgctagtataatatctctcagtttgatattctactactccaaaaagggcaggcgaagctataag

SEQ ID NO: 15332 - DNA, 3036 bp, synthetic construct
  misc_feature 1..3036: note = source = /note="Description of Artificial Sequence: Synthetic coding sequence"
  source 1..3036: mol_type = other DNA
atgcctgccagtgccccccctagaagaccccgaccccctcctccaagtctctccctacttttagttctcctgggactgggaggaagacgcctaagggccgaaccaggagatggagcacagacatgggcccgattttctagacctcccgcccccgaggccgccgggctgttccaggggacattccccgatgggttcctttgggctgtaggaagtgcagcctatcagactgagggaggatggcagcagcacgggaaaggagcgagtatttgggatactttcacacatcatcctttggctccccctggggattctagaaatgcttcattaccacttggagctccttcacccctccagcctgccacaggagacgtcgcgtccgattcctacaataacgtgtttcgagatacagaagccttgagagaactcggagtgacacactatcggttttctatatcttgggcaagagttcttcctaacggatctgctggagtgcctaaccgagaagggcttaggtactaccggaggttattggaacgattacgggagttgggggtacagccagtagttacactgtatcactgggatctcccccagcggctccaggatgcctatgggggatgggctaacagagcactggccgatcactttagagattatgccgagctttgctttcgccattttggaggacaagtgaaatactggattactatcgacaatccatacgtcgtggcctggcatggatacgctacagggagactggcacccgggattcgggggtcacctagacttgggtaccttgtagctcataatctgctgctagctcatgccaaagtgtggcacctatataacacatctttcagacctactcagggaggacaggtatccatagccctgtcgtcacactggatcaatccacgccgcatgactgatcattccataaaagaatgtcaaaagtctctcgacttcgttcttgggtggtttgccaaaccagtttttatcgatggggattatccagaatctatgaaaaacaatctatcttctatcctgcccgatttcacggagtcagagaaaaaatttatcaaaggaacagccgacttcttcgccctttgttttgggcctactctctcctttcagctactagaccctcatatgaaatttaggcaactcgaatcaccaaacctcagacagctgctcagttggatcgacctcgaattcaaccatccccaaatttttatagtcgagaacggatggtttgtatctgggactacgaaacgcgatgacgcgaagtatatgtactatctgaaaaagtttattatggaaacattaaaagctataaagctggatggggtggatgtaattgggtatactgcttggtctctgatggacgggtttgaatggcatagggggtattctatcaggcgaggactcttttatgtggatttcttaagtcaggacaaaatgctcctgccaaaatcgtccgctctcttttatcagaaactgatcgaaaaaaacgggttccctcccctgccagagaaccagccccttgaagggacatttccgtgtgattttgcttggggagttgtcgataattatatccaggtcgatactacactgtctcagtttactgatcttaatgtgtacctttgggatgtccatcattcaaagcggttgatcaaagtggacggagttgtaacaaagaaaagaaaatcctattgtgtggatttcgctgctatacagccccagattgccctgctgcaggaaatgcatgtaacacactttcgcttttcattagattgggccttaatcctaccccttggaaaccagtctcaggtcaaccacacaatcctccagtattataggtgcatggcctcggaactcgtacgcgtaaacatcactccagtggtcgccctatggcagcctatggccccaaatcagggattgccccgacttctcgctcggcagggggcctgggagaacccttatacagctttagcgtttgccgaatatgccagactctgcttccaggaactgggacaccatgtgaaactgtggattactatgaatgaaccttatactaggaacatgacttattctgcaggacacaatctcctgaaagctcacgccttggcatggcacgtgtacaatgaaaagttcaggcacgcccagaacgggaaaatctccatagccctacaggccgattggatcgagcctgcatgtcctttctcccagaaagacaaagaagtagcagagagagtcctagaatttgatattgggtggttggcggaacctatatttggatctggagattatccctgggtaatgagggattggttgaaccaaaggaacaatttcctactcccatatttcacggaagacgaaaaaaaactgatccaggggacttttgatttcttagccctttcccattacactacaatccttgtagatagtgaaaaagaagatcccatcaagtataacgattatcttgaagtccaggaaatgacagatattacttggttgaacagtcctagtcaggttgctgtcgtgccttggggactgcggaaagtgttaaactggctgaaattcaaatacggggatcttccaatgtatatcatcagtaatggaattgatgatgggttgcacgctgaagatgatcagctgcgggtgtattatatgcagaactatataaatgaagctctgaaggctcatatcttagatgggatcaacctctgtgggtactttgcatattccttcaacgatcggactgccccacggttcgggctctacaggtacgcagcagaccagtttgaaccaaaagcatctatgaagcactatcggaaaatcattgattctaacggattccccggaccagaaacactcgagaggttttgtcctgaagaatttacagtgtgtacagaatgttccttttttcatactagaaaatcattattagcttttatcgcgtttctattcttcgcctccataatctctttgtcacttatattttactattcgaaaaaagggcggcgctcctacaag

SEQ ID NO: 15333 - DNA, 3036 bp, synthetic construct
  misc_feature 1..3036: note = source = /note="Description of Artificial Sequence: Synthetic coding sequence"
  source 1..3036: mol_type = other DNA
atgcccgcctccgcacctcctcgccgaccccgcccaccacccccgtccctcagtctgttgctcgtcctgctggggttagggggaagaagattgcgtgccgagccaggagacggagctcagacgtgggcgagattttccaggcctcccgcaccagaggccgctggtctttttcagggcacttttccagatggcttcctctgggctgtgggttctgcggcttatcagacagagggcggatggcagcagcacgggaagggggcaagcatctgggacaccttcacccaccatcccctggctcctccgggagacagtaggaatgccagtcttccgctgggcgcaccatcgccattacaaccagccactggcgacgttgctagtgactcttacaataacgtgttcagagatactgaggctttgcgcgaattaggggtgacgcattaccgcttctccatttcttgggcccgggttctcccaaacggaagcgctggcgttcccaaccgggaaggacttaggtattataggcggttgctggaaaggttgagagaactcggcgtccaacctgtggtgacattgtatcactgggaccttcctcagcgactgcaggacgcatatggaggctgggctaatcgcgctctggccgaccattttagggactacgccgaactttgttttagacattttggaggccaggtcaagtattggatcaccatagataacccatacgtggtggcttggcatggttacgctacggggagactggctccggggattagaggatcaccccgcttaggatatctggtcgctcataacctgctcttagcccatgccaaagtgtggcatctgtataatacctccttcagaccgacgcagggaggccaggttagtattgccctgtctagccactggattaatccgcggaggatgacagatcacagtatcaaagaatgtcagaaatcactggacttcgttctggggtggtttgccaagccagttttcatcgatggcgattaccccgagtccatgaagaataacctctcttcgatcctgcccgacttcactgaatcagagaagaaatttattaagggaacagccgacttcttcgctctctgcttcggccctaccctctcatttcagctgcttgatccgcatatgaaattcagacagctcgagagccccaatttgcggcaactgcttagctggatcgacctcgagttcaatcatccgcagatatttatcgtggagaacggctggttcgtgagtggtacgaccaagcgggatgacgccaagtatatgtattaccttaagaagttcatcatggaaaccctgaaggccataaagctcgacggagtagatgtaattggctacacagcttggagtctcatggatggcttcgagtggcacaggggttattccatacgccgtggcctgttctacgttgacttcttgtcgcaggataagatgctgctccccaagtcctcagcccttttctaccagaaactgattgagaaaaatggattccctccccttcctgagaatcagcccttagagggcacctttccctgcgatttcgcctggggtgtggtcgacaactacattcaggtcgacacaacgctgtcacaatttacggacttgaatgtatatctctgggacgtgcaccactcaaagcgcctgatcaaagtggatggcgtggtaaccaagaaaaggaaatcctactgtgttgacttcgccgctatccaacctcagatcgcgctgctgcaagagatgcatgtcacgcatttcaggttttctttggactgggctctgatactgcccttgggtaaccaatcgcaggtgaatcacaccatcctgcagtactaccgctgcatggccagtgaactggtgcgagtgaacattacacccgtagttgccctatggcaacctatggctccaaaccagggacttcctaggctgttggcccgccaaggcgcatgggagaatccatataccgcgcttgcgttcgctgaatatgcaaggctttgttttcaagaactggggcaccacgtgaaactctggatcaccatgaacgaaccttacacacggaacatgacgtactccgccggacataacttgcttaaagctcacgccttagcatggcacgtatataatgagaaatttcgccatgcccagaacggtaagatctcaatcgcccttcaggctgattggatagagccggcctgtccgttcagccaaaaggataaagaagtggcagagagggtactggaattcgatatcggatggttggccgaacctatctttgggagcggggattacccatgggtgatgcgagactggttaaatcagcggaacaacttcttactcccctatttcactgaggatgagaagaaactgatccagggtactttcgatttccttgcattgagtcattacaccaccattttggtcgatagcgaaaaagaggatccaattaagtataatgattatctggaggtacaagagatgaccgacattacctggcttaatagcccatcccaggtggcagtggtcccttggggcctgagaaaggtgcttaattggctgaagttcaaatatggggacctgcctatgtatatcatctcaaatggcatcgatgacgggctgcacgctgaagacgatcagcttagggtttactatatgcaaaactatattaatgaggcattgaaagcccacatacttgacggcattaacctctgcgggtacttcgcatatagcttcaatgaccggaccgcgccaagattcggcctgtatcgatacgcggcggaccaatttgagcccaaggcgtcaatgaagcactaccggaaaataatcgactcaaatggattccctggcccagaaactttggaaagattttgtcccgaggaatttaccgtctgtaccgagtgctcattctttcacacacgaaaatcattgctggcctttatagccttcctgttctttgctagtattatatctctatctctcatcttttactacagcaaaaaagggaggagatcttataag

SEQ ID NO: 15334 - DNA, 3036 bp, synthetic construct
  misc_feature 1..3036: note = source = /note="Description of Artificial Sequence: Synthetic coding sequence"
  source 1..3036: mol_type = other DNA
atgcccgcaagtgcaccaccacgtagaccacgaccaccacccccttcgctgtccctcctgctagtattactcggcctggggggccggagactgcgtgccgaacccggtgatggtgcgcaaacctgggccagattcagtaggccaccagcccccgaggcagctggtttgtttcagggcacgtttccagacgggtttctctgggcggtaggcagcgccgcttatcagaccgaaggcgggtggcagcaacacggaaagggggcctccatttgggacacattcacccatcaccctctcgcacccccgggggattcccgcaacgcgtccctgcccctaggtgccccatcacccttgcagcctgctaccggtgacgtggcctcagactcctacaacaacgtgttccgcgacacagaggctctacgcgagcttggcgtgacccactatcggttctctatcagttgggcccgggttctccccaacgggagtgccggggtgccgaatagagaaggcctccgatattatagacgcctgctcgaaaggcttagagaactgggcgtgcagcctgtagttacgctgtatcattgggatttgccgcagcgtctacaggatgcctacggtggttgggcaaatcgcgccctggcagaccatttccgcgactacgcagaactctgcttccggcatttcggtgggcaggttaaatattggattactattgataacccgtacgtggtggcttggcacgggtatgctactggtagactggcgcctgggatccgaggatccccacgcctcggatatctcgtggctcacaatctcctgctggcgcacgccaaggtatggcacctgtacaacacttccttcagacccacccagggaggacaagtgtccatcgcactgtccagccattggataaaccccagaaggatgacagaccatagcattaaggaatgccagaagtctctagactttgtactgggttggttcgccaagccggtcttcatagacggtgattaccctgaaagtatgaaaaacaatctctcctccatactcccagattttaccgagtccgagaaaaagttcattaagggaaccgccgatttcttcgccctgtgcttcggaccgactttgtctttccaattactagatccacacatgaaatttcggcagttggagtctcccaacctgcgccagctgctctcgtggatcgatctcgagtttaaccacccccagattttcattgttgaaaatgggtggtttgtgtccgggactacaaagagggacgatgcgaagtacatgtattacctaaaaaaatttatcatggaaaccttgaaggccattaaactcgatggagtggatgttatcggttacactgcttggtccctgatggatgggttcgaatggcatcgcggctattctatccgtcgcggcctgttttacgtcgattttctgagtcaagacaaaatgctcttgcctaagtcttccgccctcttttatcaaaaattaattgagaaaaacgggttcccacccttgcccgagaatcagcccctggagggcacatttccttgcgattttgcctggggtgtggtggataattacattcaggttgatacgaccctttcacagtttacggatcttaacgtctacttgtgggatgtgcaccatagcaagaggctgatcaaggttgatggcgttgttactaagaaaagaaaaagttattgcgttgacttcgccgctatacagcctcagatcgcactgctgcaggagatgcacgtaacacacttccgcttttctcttgattgggcccttatcttgcccctgggtaatcagagccaggtgaaccatactattctgcaatattatcggtgtatggcctctgaacttgtccgggtcaacattacaccagtcgtggctctctggcagccaatggctcccaatcaaggcctaccaagactgcttgcacgacaaggtgcctgggagaatccctacaccgctctagcttttgcggagtatgctcgcctctgcttccaggaactcggccatcacgttaagttgtggatcacaatgaatgagccgtatactaggaatatgacttattccgctggacataacctgctcaaagcccacgccttagcttggcacgtttacaatgagaagttccgccacgctcagaatgggaagatctcaatagccttgcaggcggattggatcgaaccggcttgccccttctctcaaaaggataaggaagtggcagaacgcgtgctcgaatttgacattggttggctcgcagaaccgatattcgggtcaggcgactacccttgggtcatgcgggattggctgaaccagcgtaacaattttctccttccatactttaccgaagacgagaagaaattaattcagggcacatttgattttcttgcattgagccattataccactattctggtcgacagtgagaaggaagacccaatcaaatataacgattacctcgaagtgcaggaaatgaccgacataacctggctgaatagtccaagtcaggtcgccgttgtcccctggggcctacgcaaggtgctcaactggctgaagttcaagtatggcgacctgccaatgtatatcatctcgaacggaattgatgacggcctgcacgccgaggatgatcagctgcgagtgtactacatgcaaaactacattaatgaggctctaaaggcccacatcctagatggcatcaacctatgcggctacttcgcatactcattcaatgaccgtaccgcccctaggtttgggctttatcgttacgcagccgatcaatttgaacccaaagccagtatgaaacactaccggaaaatcattgactcaaatggattccctggtcccgaaacacttgaaaggttctgccctgaagagtttaccgtgtgcactgagtgttctttctttcacacccgaaaatctttactcgcgttcattgctttcctttttttcgcctccataattagtctctcgctgattttttattactccaagaaggggcggcggagctacaaa

SEQ ID NO: 15335 - DNA, 3036 bp, synthetic construct
  misc_feature 1..3036: note = source = /note="Description of Artificial Sequence: Synthetic coding sequence"
  source 1..3036: mol_type = other DNA
atgccggcttcggccccaccgaggcgcccacgtcctccgcctcctagcctcagcttgcttctagtgttgcttggcctaggtggtagaagattgagagccgaacctggagacggagcacagacctgggccaggttcagccgcccccctgcacctgaggccgccggtctgtttcaagggacctttcctgatggatttttatgggctgtcggctctgcagcctatcaaacagagggaggatggcaacaacatggaaagggagcctctatctgggacaccttcacgcaccaccctcttgcacctcctggggactccaggaacgccagccttcccttgggcgcccccagtcctctgcaacctgctaccggagatgtagccagcgatagctataacaacgtgtttcgggacacagaggcgcttcgggagcttggagtgacacattaccggttttccatctcatgggctcgggttctgccaaacggctcagcaggagttcctaacagagaaggcctgaggtactatagaagattgcttgagagattgagggaactcggcgtccagcccgtggtgacgctttatcattgggacttgcctcagagacttcaagatgcttatggcggttgggccaaccgcgcacttgccgatcacttccgggattacgcagaactatgttttagacactttggaggccaagtgaagtactggattacaattgacaatccatacgttgttgcctggcatggatacgctaccggcagactggctccaggcatcagagggtctccgaggctcggatacctggtggctcacaacctcctgctggctcacgctaaagtttggcatctgtacaacacttcatttaggcctacccaaggaggacaggtttccatcgccctgtcaagtcattggattaacccaaggcgtatgaccgaccacagcatcaaggagtgccagaaatctttggacttcgtgttgggctggtttgccaaaccagtgtttattgatggggattaccctgagtccatgaaaaataacctgagttcaatcttgcccgacttcacagagtcagagaagaagttcatcaagggcaccgctgattttttcgcgctttgttttggccccacacttagcttccaactgttagatccacatatgaaattcagacagttggaatcgcctaatttgagacagctgctgagttggatcgacctggagtttaaccacccacagatcttcatcgtggaaaatggatggttcgtgtctggaactacaaaacgcgacgatgccaaatacatgtactacctcaagaaatttattatggaaaccctgaaagctatcaagttggacggagtagatgttattggctacacggcatggtctttgatggatggctttgaatggcaccggggctattccatccgcaggggtctattctacgttgactttctaagccaggataaaatgcttctccccaaaagcagtgccctcttttaccagaagttaatcgagaaaaatggctttcctccccttccggagaatcagccacttgagggaacatttccctgtgattttgcttggggcgtcgtcgataactatattcaagtggacaccacactgtcacaattcacggatctgaatgtgtacctgtgggatgtgcaccattccaagaggcttataaaggtggatggggtggtcaccaagaaaaggaagtcttactgcgtcgacttcgcagcgatacagccacagattgctctcctgcaggaaatgcacgtaacacattttaggttttctctagactgggctctgatactgcctcttggaaatcaatcccaagttaatcacaccatcctccagtattacaggtgcatggcttcagaactggtgagagtaaacattacaccagtggtagcactgtggcaaccaatggctccaaatcagggactcccgagattactggctcggcagggcgcttgggagaacccttataccgctttagctttcgccgaatacgccagactgtgcttccaagaactgggccaccacgtgaaactgtggatcactatgaacgagccatataccagaaatatgacttatagcgccggccacaatctgctcaaagcacacgcgctggcttggcacgtctacaacgagaaattcagacacgcgcagaatgggaagatctcaatcgcccttcaggccgattggatcgagccagcatgtccctttagccagaaggataaggaagtggctgagcgggtcctggagttcgacatcggctggctggccgaacccatcttcggatccggtgactacccttgggttatgagagattggctgaaccaacgcaacaactttctcctgccctactttaccgaggacgagaagaagctgattcagggaacctttgatttcttggctctttctcattatactaccattctcgtagactcagagaaggaagaccctattaagtacaacgactacctggaggttcaggaaatgaccgacataacttggctgaacagccctagtcaagtcgccgtggtcccttggggattgcgcaaggtcctgaactggctgaagttcaaatatggggacttgccgatgtacattattagcaacgggatcgatgacggtctgcacgcagaggatgaccagttgcgggtttattacatgcaaaactacattaacgaggctctgaaggcacatatcctcgacggaattaacctctgcgggtattttgcgtacagctttaacgaccggacagcgcctaggttcggcctctaccgctacgcagccgatcagttcgagccgaaagccagcatgaagcattacaggaaaatcatagattccaatggattcccgggcccagaaacccttgagagattttgtcccgaggagttcacagtctgcaccgaatgcagttttttccacaccaggaagagcctgctggcatttattgcttttctcttttttgccagcattatcagcctcagcttaatcttttactacagcaagaaaggcaggagaagctacaaa

SEQ ID NO: 15336 - DNA, 3036 bp, synthetic construct
  misc_feature 1..3036: note = source = /note="Description of Artificial Sequence: Synthetic coding sequence"
  source 1..3036: mol_type = other DNA
atgcccgcttctgcccctccacgccgcccgcgccccccaccgccttcactgtcccttctactcgtactcctggggctaggaggcagacgcctccgtgccgaaccaggcgacggcgcccagacatgggctcgattctccagacctcccgctccagaggcggccgggctttttcaggggacgtttccggacggttttctttgggccgtggggtccgccgcctaccagacggaaggagggtggcagcagcacggaaaaggagcgtctatttgggacacctttactcaccatcctttggccccgccaggagattcccggaatgcttctctccccttgggtgccccttcaccactgcagcccgccactggggatgtggccagcgactcttataataacgtgttcagagatacggaagcactcagggagcttggtgtcacccattaccgcttttctatttcatgggctagggttttgcctaatgggtccgcaggggtccctaatcgcgagggactgagatattatagacggctactcgagcggcttcgagaactgggcgtacagccagtggttacattgtatcattgggatttgccacaaaggttacaggacgcatacggtggctgggcgaacagagccctggccgatcacttcagagactatgccgagctgtgttttcgccacttcggcggacaggtcaaatactggataactatcgacaacccgtatgttgtcgcgtggcatgggtacgccaccggccggctggctccaggcatccggggcagtcctaggctgggatatttggtggctcacaatctgctcctggctcacgcaaaagtctggcacttgtacaatacgagcttccgtccgacgcaaggagggcaggtctccatcgccttgtccagccactggatcaatcctagaagaatgactgatcattcaatcaaagagtgtcaaaagtctctggactttgtgttgggctggttcgccaaacctgtgttcatcgacggcgactacccagagtctatgaaaaacaatctctcatcaatcctacctgacttcaccgaatccgaaaaaaagttcatcaagggaacagccgattttttcgctctgtgctttggacctacattgtccttccagttgctggacccgcacatgaaattccgccagctggagtccccaaatttgaggcagctgttaagctggatcgacctagaatttaatcacccgcagatcttcattgtagaaaacggttggtttgtctcgggcaccacaaaacgagatgacgccaagtacatgtactatctgaaaaaattcatcatggagacactcaaggccatcaagctggacggcgtcgatgtgatcggctatacagcctggtctctgatggatggcttcgaatggcaccgggggtacagcattcgacgcgggcttttctatgtggatttcctgtcccaggataagatgcttctgccaaaatccagcgccctgttttaccagaagcttatagagaagaacggttttccccctctccccgagaatcaaccacttgagggcacttttccctgtgactttgcgtggggagtcgtagataactacattcaggttgatacgacgctgagtcaattcactgacctcaacgtctatctgtgggatgtgcaccatagcaaacggctgatcaaagtggatggggtagtgacgaaaaagcggaagagctattgtgtagacttcgccgctatccagccacagatcgctctcctccaagagatgcatgtcactcatttcaggttcagcttagactgggcactgatactgcccctcgggaaccaatctcaggtcaatcacactattctccagtactaccgctgcatggcttcagaacttgtgagggttaacattactcctgtggtggctctgtggcagccaatggcgcccaaccagggactccctcgcttgctggcccggcagggggcgtgggagaacccttatacggcactggccttcgcagagtacgctcgactgtgttttcaggagcttggtcaccacgtgaagttatggatcacgatgaatgagccctacaccaggaacatgacttactctgcgggacacaacctgttgaaggcgcacgccttggcgtggcacgtgtacaatgagaagtttcggcacgcccaaaacgggaagattagtatcgccttacaggccgactggattgaacctgcatgcccatttagtcagaaagacaaggaagtggctgagcgcgtcctggaattcgatatagggtggctagcagaacctatatttggcagcggagattatccttgggttatgcgagactggctgaatcaacgtaataatttcttgctgccgtacttcacagaagacgagaagaaactgatccaaggaacgtttgatttcctcgccctgtcccactatacaaccattttggtcgatagcgagaaagaagaccccatcaagtacaacgactaccttgaagttcaggagatgacggacattacctggctgaattccccttcccaagtcgccgtagtgccatggggcctgcgaaaggtgttaaactggctcaagttcaagtatggagatttgcccatgtacatcatcagcaatggaattgacgatggactgcatgctgaagacgaccagctgcgagtgtattatatgcaaaactacataaacgaagccctgaaggcacatatcttggacggcatcaatctgtgcggctacttcgcctactcttttaacgacagaaccgcgcccaggttcggactgtacagatatgccgcagaccagttcgagcccaaagcttctatgaaacattaccgcaaaatcatcgattcaaacggctttcctgggccagaaaccctggaacgcttctgccccgaggagtttactgtgtgcaccgagtgcagttttttccacacccgcaagtctctgctggcctttattgctttcctattctttgctagcatcatatccctgtcactgatattttattattcaaaaaagggtcggagaagttataag

SEQ ID NO: 15337 - DNA, 3036 bp, synthetic construct
  misc_feature 1..3036: note = source = /note="Description of Artificial Sequence: Synthetic coding sequence"
  source 1..3036: mol_type = other DNA
atgccagccagtgcgccccctcgcaggccacgccccccccctccctcactcagtctccttttggtgctgttgggtctcggcggcagaaggcttagagctgagcctggggatggggcacagacctgggccagattttctaggcctccagcaccagaagccgcgggactctttcaggggacatttccggatggttttctgtgggccgtcgggtcagcagcctaccagactgagggaggttggcagcagcatggcaagggcgccagtatttgggatacatttacacatcatccgctcgcgccacccggggacagtagaaacgctagtctgcctcttggtgctcccagtcccctgcagccggctaccggtgacgtcgcgagcgacagttacaacaatgttttccgggatactgaggcactccgcgagctgggggtgacacactatcggttctcaatctcttgggcccgggtgctcccgaatggctccgccggcgttccaaaccgagaaggccttagatattataggagactccttgagaggttgagagaactgggtgttcagccagtagtgacactgtatcattgggacctcccacagaggctgcaggacgcctatgggggatgggcaaaccgggctctggccgaccacttccgggattacgctgaactgtgtttccgccactttggcggccaggtgaaatactggattaccatagataacccatacgttgtggcctggcatggctacgctaccgggcggctggcccctggcatcagaggatcaccgagattggggtatcttgtggcacacaatcttctgctggcacacgccaaggtgtggcatctgtacaataccagcttccggccgacacaggggggtcaggtgtctattgcactcagctcccactggattaatccaagacgcatgactgaccacagtattaaggaatgccaaaagtccctcgattttgttctggggtggttcgccaaacccgtgttcattgacggagattaccccgaatctatgaagaataatctgagcagcattctgcctgatttcaccgaatccgagaaaaagttcatcaaggggacagccgattttttcgctttgtgttttgggccaacgttgtcatttcagctgctggatcctcacatgaagtttcgccaactggagtcccccaatttgaggcagctgcttagctggatagatttggaatttaatcacccccagatttttatcgtagaaaatggctggttcgtcagtgggaccactaagagagacgatgccaagtacatgtattaccttaagaagttcatcatggaaaccctgaaggcaatcaagctcgacggcgtagatgttattggctacacagcatggagcctgatggatggcttcgagtggcaccgaggttacagtattcgccggggattgttttatgtggattttcttagtcaagacaagatgttgctgcccaagtcctccgccttgttctaccaaaagctcatagagaaaaacggtttccccccactccccgagaatcagccactggaagggacctttccctgtgattttgcctggggagtggtggataactatatccaagtcgatactacgctgagccagtttacagacctcaatgtgtacctctgggacgtccaccacagcaaaaggctgattaaagtggatggagttgtaaccaagaaaagaaagagttactgtgtggatttcgctgcgatccaaccgcaaatcgcattgttgcaggagatgcacgtgactcattttaggttttctctggactgggccctgattctccctttggggaatcagagccaggtcaaccacaccatactccaatattacaggtgtatggcttctgaacttgtcagggtgaatattacaccagtcgtggccctgtggcagccaatggcccctaaccagggcctccctcggctgttggctcgccagggggcatgggaaaacccatacacagctcttgctttcgcagagtacgctcgactgtgtttccaagaactgggacaccatgttaaactctggatcaccatgaacgaaccatataccagaaatatgacgtattcagctgggcataatctgctgaaggctcatgcactggcttggcatgtgtataatgagaaattccgccacgcccagaatgggaagatcagcatcgctttgcaggccgattggatcgagcctgcctgcccattcagccagaaggacaaggaggttgccgaacgcgtgctcgagtttgacatcggatggctcgctgagcctatttttggttctggggattacccatgggtgatgagggattggctgaaccaaaggaataactttctcctgccttactttactgaggacgaaaaaaaactcatccaaggaacatttgacttcctcgccctgtctcactataccaccattctggtggactctgaaaaggaggaccccattaaatacaatgactacctcgaggtgcaggagatgaccgatattacgtggttgaacagtccatcacaggtcgccgtggtaccatggggacttagaaaggtgctcaattggctgaagtttaaatacggggacctgcccatgtacatcatttcaaacggaatagacgatggcctccacgcggaggatgatcagttgagggtgtactatatgcagaactatataaacgaggccctcaaggcgcatatcctggacggtataaatctctgtggctacttcgcatattcttttaatgaccggactgccccccgcttcggtctctatcgctacgccgcagaccagtttgaacccaaagcaagcatgaaacactacagaaaaatcatagacagcaatggatttcccggcccggagaccctggaaagattctgccccgaggaatttacagtgtgtacggaatgttcctttttccataccagaaagtctctgctggcattcatcgcttttctgttttttgcatctattatcagtctctccctcatcttttactacagtaagaagggaaggcggtcttacaaa

SEQ ID NO: 15338 - DNA, 3036 bp, synthetic construct
  misc_feature 1..3036: note = source = /note="Description of Artificial Sequence: Synthetic coding sequence"
  source 1..3036: mol_type = other DNA
atgcccgccagtgcccctccgagacgtcccaggcctcctccgccctcactgagcctccttctcgttttgctgggcctgggtggcaggcgcctgcgcgccgagcccggcgatggcgcacagacatgggcccggttcagccgcccaccagcccctgaagctgctggactgttccaggggactttcccagatggctttctgtgggccgtgggcagcgctgcctatcagacggaggggggttggcagcagcacgggaaaggcgcaagcatctgggatacttttacacaccacccactggccccaccgggagattcccggaacgcatccctccctctcggcgccccctccccgctccagcctgctacgggggatgttgcgtctgatagctataataatgtctttcgggataccgaggctctccgcgagcttggggtcactcactatcgcttcagcatcagttgggcgcgcgtattgcctaacggatccgctggtgtcccgaaccgggaaggcctgcgctattaccggaggcttcttgagcgactgcgagaactaggcgtgcagcctgtggtgaccctctatcactgggatctcccacagcggctacaggacgcttatgggggatgggccaacagagctctggcagaccatttccgggattatgccgaactctgttttcggcacttcggaggccaagtgaagtattggatcacaattgataacccatacgtagtggcctggcacggatacgccactggcagattggcaccgggaatccggggcagtccccgcctaggctatctggtcgctcacaatctgctgcttgcccacgccaaggtgtggcatctgtacaacacaagttttcgacccacccagggtgggcaggtgtctatagctctgagttcgcactggataaacccaagacgcatgaccgaccattcaattaaggagtgtcagaaatctttggatttcgtgctgggttggtttgccaagcctgtgttcatcgatggggattaccccgaatcaatgaaaaataacctaagttctatactccctgattttactgaaagcgaaaaaaagttcataaagggcaccgctgatttttttgccctgtgcttcggacccacactcagtttccagctgttggacccccacatgaagtttcggcaactggaatcacctaatctccgtcaactcctcagttggatcgatctggaattcaaccacccacagatttttatagtcgaaaacgggtggttcgtgtccggcacaactaagagggatgacgctaagtatatgtactacctgaaaaaatttattatggagacgctcaaggcgattaaactggatggcgtggacgtgatcggatatacggcatggagtttgatggatggattcgaatggcaccggggttatagtatccggagaggcctgttttacgttgactttctgtcccaggataagatgttactcccaaagagctccgccctcttttaccagaaactgatagaaaaaaacggctttccgcctctccctgaaaaccagccattggaaggcaccttcccctgcgatttcgcttggggcgtggtcgataactatattcaggtggacaccacactgtcgcagttcacggaccttaatgtttacctatgggatgtgcatcattcgaagaggctgatcaaggttgatggagttgtgaccaagaagcgcaagtcttactgcgttgactttgcagcaattcagcctcagatcgccctacttcaggaaatgcacgtaactcattttaggttctctttggactgggccctgattttgcccctcggtaatcagagtcaggtgaatcacaccatccttcagtactaccgatgtatggctagcgaacttgtgagggtgaatattaccccagttgtcgctttatggcagcctatggctccaaaccagggcctcccacggctgctggcccgccagggcgcttgggagaacccctataccgctctagcgttcgccgagtacgcgcggttgtgctttcaagaacttggacatcatgtcaaactctggattacgatgaacgaaccatatactcgtaatatgacttacagtgccggccataacctgttaaaggcccatgcacttgcctggcatgtgtacaatgaaaagtttagacacgctcagaacggcaaaatttccatcgccctgcaggctgactggatagaacccgcgtgccctttcagccagaaggataaagaggttgctgaacgggttctcgaattcgacatcgggtggctagctgagccaatattcggctctggcgactatccctgggtaatgcgagactggttgaaccagagaaacaactttctgctgccctattttactgaagacgagaaaaaactaatccagggcacctttgatttcttggccctttcacattacaccaccatcttggtcgatagtgagaaagaggacccaatcaagtacaacgattatctcgaggttcaggaaatgaccgacatcacctggctgaatagtccctctcaagtggcagtggtcccctggggactgagaaaggttctgaactggctaaaattcaagtatggcgacttgccaatgtacatcatttctaacgggatcgatgacgggctacacgcggaggatgaccagctgagagtgtactacatgcagaactatattaatgaggccctaaaagcccatatcctggatggaatcaacctctgcgggtattttgcctattcgttcaatgaccgaacagcgccaaggttcgggctttatagatatgcagctgatcaattcgagcctaaagctagcatgaagcattatagaaagatcatcgactctaatggttttccgggacccgaaaccctggaacgcttctgcccagaagagtttacagtgtgcacggagtgcagtttctttcacacccgcaaatctctgcttgcttttattgcctttctctttttcgcgagcattataagtctgtctctgatattttactattccaagaaaggccggcgctcgtataag

SEQ ID NO: 15339 - DNA, 3036 bp, synthetic construct
  misc_feature 1..3036: note = source = /note="Description of Artificial Sequence: Synthetic coding sequence"
  source 1..3036: mol_type = other DNA
atgccagcatccgcccctccccggaggccccgcccgccccccccatctttatccctattgttagtgttgcttggactaggagggcggaggctgagggccgaacccggggacggggcccagacatgggcccgcttttctcggcctccagctcccgaggccgcaggactatttcaggggactttccctgatgggttcctttgggccgtcggatcagccgcatatcagacagaaggagggtggcaacaacacggaaaaggggcttcaatctgggatacatttactcaccatcccctcgccccccctggagattcacgtaacgcatccctgcctctaggggccccctcacctctccagcccgcaacaggagatgtggcttctgactcatataacaacgtgttcagggatacagaagctctccgggaacttggggtgacacactatcggttctctatctcatgggcgcgggtcctcccaaacgggtcagccggagtacctaacagggaagggctacggtattatcgaagactccttgaaagactgagggaactcggggtccagcctgtagtgacactttatcactgggatctccctcagcgcttacaggatgcttatgggggatgggcaaaccgggccctcgctgatcatttcagagattatgcagaattatgctttcgacatttcggaggacaggtgaaatattggatcacaatagataacccatatgtcgtggcatggcatgggtatgccacaggaaggctagcacctgggatacgagggtccccacggcttgggtaccttgtggctcacaatctcctcttagctcatgcaaaagtgtggcacttgtataatacttctttccgccccacacagggagggcaggtgtccatagctctatcctcgcattggattaatccaagacgcatgacagaccattctatcaaagagtgtcagaaatcattggactttgtgctggggtggtttgctaaaccagtcttcattgatggagattaccctgaatccatgaaaaataatctttcttcaattcttccagattttacggaatctgaaaagaaattcataaaaggaactgccgactttttcgcactatgcttcggacccacactgtcgttccagctgctggatccacatatgaagtttaggcagctggaatctccaaatctgcgccagcttctctcctggatcgaccttgagtttaatcatccccagatctttattgtagagaatggatggttcgtatcagggactacaaagcgagatgacgcgaaatatatgtactatcttaaaaagttcatcatggagacactgaaagctatcaaactggacggggtcgatgtgatcggatatacagcttggtctctcatggatggattcgaatggcatcgagggtatagtataagacgggggctgttctacgtagattttcttagtcaggataagatgctcttgccaaagtcttccgctctgttctatcagaaactaatcgaaaaaaacggatttcctcctctgcccgaaaatcagccacttgaagggactttcccctgcgatttcgcatggggagttgttgacaattacatccaggtggatacaactctaagtcagtttacagatctgaacgtctacttgtgggatgtacatcactctaaacggctcataaaagtggacggagtggtgacaaagaaaaggaaatcgtattgtgttgatttcgccgctatccagccacaaatagcccttcttcaggaaatgcacgtgacacattttcggttcagtcttgattgggccctgatcctgcccctaggaaaccagtcacaggtcaatcacactatcctccagtactatagatgtatggcctcagaactggtaagggtgaacatcactccagtggtggctttgtggcaacctatggctcctaaccagggactccctagacttctagcccggcagggagcttgggaaaatccttatacagcccttgccttcgcagagtatgccaggctttgcttccaagaattgggacaccacgtgaaactctggatcactatgaacgaaccctatacacgcaatatgacttattccgcaggacacaatctcctaaaagctcatgctcttgcatggcacgtttataatgaaaaattcagacatgcacagaacgggaaaatttctatagccctccaggcagattggatcgaacccgcttgtccattttctcagaaggataaggaggtggccgaaagagtactggaattcgatataggatggctagcagaaccaatctttggatctggggattatccttgggtaatgagggactggcttaaccagcgcaacaacttcttgttgccttattttactgaagatgagaaaaaattgatacaggggacattcgacttccttgccctctcacactacactacaatattagtcgattcggagaaagaggatcctatcaagtataatgattatctagaagtccaagagatgacagatatcacatggttgaactctccctcccaggtagccgtggtcccttgggggctacggaaagtcctcaattggctcaagttcaaatacggggatctgcctatgtatataatatctaacgggatagatgacggactacacgccgaggacgatcagctcagggtatattacatgcagaactacatcaatgaggccctgaaggctcacattctcgatggaattaacttatgcggatattttgcgtattcgtttaacgatcggactgcccctcgctttgggctgtatcggtacgctgcagatcagttcgaacccaaagcttcaatgaagcattacaggaaaatcatagattctaacgggtttccagggccagaaactctcgaaaggttctgtcccgaagaatttacagtatgtactgagtgttccttttttcatacacgcaaaagtctcctcgccttcatcgcgttcctcttcttcgcgtctattatcagtctgtcactgatcttctattattctaaaaaagggcggcggtcctataaa

SEQ ID NO: 15340 - DNA, 3036 bp, synthetic construct
  misc_feature 1..3036: note = source = /note="Description of Artificial Sequence: Synthetic coding sequence"
  source 1..3036: mol_type = other DNA
atgccagcctctgctccgccgagacgcccaaggccacccccgccgagcctgtcgctgctcctcgttctgctaggcctgggcggtcgcaggttacgtgccgaaccaggtgatggggcccagacttgggctaggttttcacgccctccggcaccagaggcggcaggtcttttccagggtactttcccggatggttttctgtgggctgttggtagcgcggcataccagacagagggaggctggcagcagcatgggaagggggcatccatctgggatacttttactcaccacccgctggcgccgccaggagactcacgcaacgctagcctgccgctgggcgcaccgagcccgctgcaacctgcaaccggcgacgtggcctctgactcatacaacaacgtatttagagataccgaagcactgcgcgagctgggcgtgactcattaccgtttttccatttcctgggcacgcgtactgccgaacgggtcagcgggcgtaccgaatagagagggactacgttattacaggcgcctgttagaacgcctgcgggagctgggcgttcagccggtagtcacactatatcactgggacctgccacaacgcctgcaggacgcctatggcgggtgggcgaatcgcgcactggcagatcacttccgcgactatgcggagctgtgttttagacactttggtggtcaggtgaagtactggataactattgataatccatatgtggtggcatggcatgggtatgccacgggtcgactggctccaggcatcaggggatccccacgactggggtaccttgtggcacacaatctactgctggctcacgctaaagtgtggcacctctataataccagtttccgtccaacgcaaggaggacaagtgtcgatagcgctgtccagccactggattaacccgagacgcatgaccgaccattccattaaagaatgccagaagagcctcgatttcgtcctgggttggtttgccaagcctgttttcatcgacggcgactacccggaaagcatgaaaaacaatctgagctccattcttccagatttcaccgaaagcgagaagaagtttattaaaggtactgccgatttcttcgcgctctgtttcgggccaaccctgagcttccagctgctcgacccgcatatgaagtttcgacaactggaatccccgaacctacgacagctgctaagctggatcgacctagaattcaaccatcctcagatctttatagtggagaacggttggttcgtgagcggcaccactaagagagacgacgccaaatatatgtactatctcaagaagtttatcatggaaactctgaaagcaataaaactggacggcgtggatgttatcggctataccgcatggagcttaatggacggctttgaatggcaccgcgggtatagcatccggcgggggctgttttacgtcgacttcttgtcccaggacaaaatgttgctgccgaaaagcagcgccctcttctatcagaaactgattgagaaaaacggttttccaccactgccggaaaaccaaccgctcgaagggacctttccatgtgattttgcatggggtgtggtggacaactatattcaagtggacaccaccctgagtcagttcactgacctgaacgtttacctgtgggatgtgcaccatagcaagcgcctgataaaagtagacggcgtggtcaccaaaaaacgcaagagctactgtgtcgactttgccgcgatccagccgcagatcgcccttttacaggaaatgcatgtcacacacttccgcttcagcctcgactgggccctgatcctaccactgggtaaccagtctcaagtcaaccacaccattctgcaatattaccggtgcatggcaagcgagttggtccgagttaacatcacaccggtagtggcgctgtggcagcctatggcgcctaaccaaggtctgccaaggcttctggcaagacagggtgcttgggagaatccctataccgcattggctttcgcggagtatgccaggctgtgctttcaggaattgggccatcacgtgaagctgtggatcaccatgaatgagccttatacccgtaacatgacgtactcagctggccacaatttgttgaaagcacacgcactggcatggcacgtgtacaacgagaagttccgccacgcacagaacggaaagattagcattgcactgcaagcagactggatcgagccagcttgcccattttctcagaaggataaggaggtggccgagcgcgtgcttgaatttgatatcggctggctggctgagccaatttttggtagcggcgactacccttgggtcatgcgtgattggctgaaccaacgcaataactttctgctcccgtactttacggaagatgaaaaaaagctcatacagggcactttcgattttctggcgctgtcgcattacaccacgattctggtcgacagcgaaaaagaggatccaattaagtataatgactaccttgaagtccaggaaatgacggatatcacttggctgaatagcccaagccaagttgcagtcgtcccctggggtctgcgcaaggttctgaactggctgaaatttaagtacggggatctcccaatgtacatcatcagcaatgggattgacgacgggcttcatgcagaagatgatcaactgcgcgtctattacatgcagaactatatcaacgaggccctcaaggcccacatcctggatggcataaacttatgcggttattttgcctatagcttcaacgacagaaccgcgcctcgctttggtctctatagatatgcggccgaccaatttgagccaaaagcgagtatgaaacactatcgtaagataattgatagtaacggattcccaggcccggagactctggaacgcttctgtcctgaggagttcaccgtctgcaccgagtgctccttcttccataccagaaaaagcctgttggcattcattgcgtttctgtttttcgctagcatcatttcactgtcactcattttctactactccaagaagggccgccgctcttacaag

SEQ ID NO: 15341 - DNA, 3036 bp, synthetic construct
  misc_feature 1..3036: note = source = /note="Description of Artificial Sequence: Synthetic coding sequence"
  source 1..3036: mol_type = other DNA
atgcccgccagtgcccctccgaggcgacctagaccgccacctccttccctgtccttgctgctggtcttgctgggtctggggggccggcgcctcagggcagagccaggtgatggtgctcagacttgggccaggtttagcaggcccccggctccagaagccgctgggctgttccaaggtacattccccgatggcttcttgtgggctgtgggaagcgcggcttaccagacagaggggggctggcagcaacatgggaagggtgcatctatctgggacaccttcacccaccaccccctcgctccacccggcgacagtcgaaacgcaagcctgcccttgggtgcccccagccccctgcagcctgccacaggcgatgtggccagcgactcttataacaacgtgtttcgggatacagaggccctgagagaactcggggtgactcactatcgctttagtatctcctgggcacgcgtccttcccaacggatccgccggagtcccaaacagagaggggctgcggtactatagacggctgttggagagacttagagagctcggggtccagccagtggtaaccctgtatcactgggacctcccacagcgactgcaggacgcctacggaggctgggcaaatcgcgccctggccgatcacttccgggactacgccgagttgtgcttcagacactttggtgggcaagtgaaatactggatcaccatcgataacccgtacgtggtcgcctggcacggatacgcgacggggaggctggccccgggcattcgcggttccccgcgcctggggtatctggtagcccacaacttgctcttggcacacgctaaagtgtggcacctgtacaatacgtcatttcgacctacacagggagggcaagtctctattgccctgtcctctcactggataaatccaagacggatgaccgatcactccattaaggaatgccagaaatcattggacttcgtcctgggctggttcgccaagcccgtattcattgacggagattatcctgaaagtatgaaaaacaatctgtcttccatcttgcccgattttacagagagtgagaagaaatttattaagggaacagccgatttcttcgcactgtgtttcggtcctactctctctttccagctgctggatccccacatgaaattccggcaactggagagccctaatctgcggcaacttttgtcatggatagacttggaatttaatcatccacaaatatttatcgtggagaacggttggttcgtgtcagggacaacaaaacgcgacgatgctaagtatatgtactacctcaagaaattcattatggagaccctcaaggcaatcaaattggacggagtggacgtgatcgggtatacagcgtggtcactgatggacggcttcgagtggcataggggatacagcatccggcgggggttgttctatgtggacttcctctcccaggacaagatgctgctgcctaaatccagtgccctgttctatcagaagctcatcgagaagaatggattcccaccgcttccagagaatcagccgctggaggggacattcccatgtgactttgcgtggggggtggtagataattacattcaggttgataccacactgtctcagttcaccgatcttaatgtatacctgtgggacgtgcaccattccaaacgactgattaaggttgatggcgtggtcacaaagaaacggaaatcatattgcgtggacttcgcagcaatccagcctcagatcgccctgctgcaggagatgcacgttactcacttccgattttcactggactgggccctgatcctgcccttggggaatcagtcccaggttaaccacacgatcctgcagtattataggtgcatggcctctgagctggtacgggtgaatattacacctgtggttgcactctggcagcccatggctcctaatcaggggctgcctagacttttggcccgacagggggcttgggagaatccctatacggctctcgctttcgctgagtatgctcgcctttgctttcaggaactcggccaccacgtgaaactttggatcacgatgaatgagccctatacaaggaacatgacgtatagcgcgggccacaacctcctcaaagctcacgctctggcctggcatgtctacaacgagaaattcagacacgcccagaatgggaaaatctccattgcattgcaggccgattggatagagcccgcatgcccgttcagccagaaagataaggaggtagccgaacgggtcttggagtttgacattggctggctggccgagccgatcttcgggtctggcgattatccttgggttatgagggactggctcaaccaacgcaataatttcttgctgccctacttcacagaggatgagaagaaactcatccaaggaacattcgacttcttggcactttcccactataccacaatcctggtcgattcagagaaggaggatcctatcaaatacaacgactacctcgaggttcaggagatgaccgacatcacctggctgaattccccgtctcaggtcgctgttgtgccctggggcctgaggaaggtactgaattggttgaaatttaagtacggcgatctgcccatgtatataatctctaacgggatcgacgatggcctgcacgcagaggatgatcaactgagggtgtattacatgcagaactatattaatgaggccctgaaggcccatatcttggatgggattaacttgtgcggatacttcgcctactcatttaatgatcgaactgccccccgctttggcctgtacaggtatgctgctgatcagttcgaacctaaggctagcatgaagcattacaggaagataatcgacagcaacgggtttcccggacctgagacattggaaaggttctgtccagaggagttcactgtttgcacggagtgcagcttcttccatacccgaaaaagcctgctggcgtttatcgcttttctgttttttgcttctataatatctctcagtttgattttctactattctaagaagggaaggcgctcatacaaa

SEQ ID NO: 15342 - DNA, 3036 bp, synthetic construct
  misc_feature 1..3036: note = source = /note="Description of Artificial Sequence: Synthetic coding sequence"
  source 1..3036: mol_type = other DNA
atgccggccagcgctcctcctaggaggccccgacctccacccccctctctgtcactgctcctcgtgctgctcggattgggtggacggcgtctccgggccgagcccggcgacggggcccagacatgggccaggttttccagaccacctgccccagaagctgctggactttttcagggaacgtttccagacggctttctatgggctgtgggcagcgcagcttatcagacagagggcggctggcagcagcatggtaagggagcctccatttgggatactttcacccatcaccctctggccccgcctggcgactctcgaaacgccagtctaccactgggcgctccatctcccttgcagccagccactggggatgtggcctccgatagctataacaacgttttcagagacacggaagcattgcgggaactgggggtgactcattaccgcttctcgattagctgggcaagagtgctcccaaacggaagcgctggagtacccaatcgtgagggtctgagatattaccggaggttgctggagcggcttcgggaactgggggtccagccagttgttacactgtaccactgggacctgccacagcggcttcaagatgcctacggcgggtgggctaatcgcgcgctagctgatcacttccgggactatgctgaactttgctttagacacttcggggggcaagtgaaatattggattacgattgataatccttacgtggtcgcctggcacggctatgccacaggccggctggcccctggaattagaggttctcctcgactgggctatctcgtagctcacaatctcctcctggcgcacgctaaagtatggcacctctacaataccagcttcaggccaacccagggaggacaagtgagcatcgcactgtccagccactggatcaatccacgtcgtatgaccgaccactcaatcaaagagtgccagaagagtttggacttcgttctaggttggtttgccaaaccggtctttatagacggggattatcctgagagtatgaagaataacctttcctccattctgcccgactttacagagagcgagaagaagtttataaaggggactgctgacttttttgctctctgttttggccccacactgagttttcagctgctagatcctcacatgaaatttcggcagctagaaagccctaatctgagacagctgttaagctggatagacctggaatttaaccacccgcagatctttatcgtcgagaacggatggttcgtaagcgggacgacaaagcgcgatgacgcgaaatatatgtattaccttaagaagtttatcatggagacactcaaagcgataaagttggacggggtggacgtcataggatatactgcctggtcattgatggacgggttcgaatggcaccgcggttattccatccgccgaggcttgttctatgtggatttcctgtctcaggacaagatgctccttcccaaaagctccgcacttttttaccagaaattgatagagaagaacggatttcccccactgccagaaaatcagcccctcgagggtactttcccctgcgacttcgcctggggggtagttgataactacatccaggtcgataccacacttagccagtttaccgatctaaatgtatacctctgggacgtgcaccattcaaaaaggttgatcaaggtagacggagtcgtaaccaaaaagaggaagagttactgcgtggatttcgctgccatacaaccccagatcgcattactgcaggaaatgcacgtgacgcacttcagattcagcctagactgggctttaatccttccccttggaaaccagtcacaggttaaccatactattctacagtactatcgctgcatggcaagcgaactggtacgagtcaacatcaccccagtggtagctctctggcagcctatggctcctaatcagggtctcccaagactgctggcccggcagggtgcctgggaaaatccctatacagcactggcatttgctgagtacgctagattgtgtttccaggaattagggcaccacgtcaaattgtggatcacgatgaatgagccttatacaaggaacatgacctactcggccggccacaaccttctcaaggcccatgccttggcatggcatgtttataacgagaagttccggcacgcgcaaaacgggaagatctctattgccctgcaggcggactggattgaacctgcatgtccctttagtcagaaagacaaggaggtcgcggaacgggtgctagagtttgatattgggtggctggcggagcccattttcggatccggagactacccttgggtgatgagagattggcttaatcagaggaataactttctcctcccttactttactgaggatgagaagaaactgatccagggaacctttgacttcttagcactgagtcattatactacaatcctggtcgattctgagaaggaagaccctatcaagtacaatgattacttggaagttcaggaaatgaccgatattacctggttaaactcacccagccaggtcgccgtcgtgccttggggacttcgaaaagttttaaattggctcaaatttaagtacggggatcttcccatgtacatcattagcaacggcattgatgacggcttgcacgcagaagacgatcaactcagagtgtactatatgcagaactacatcaacgaagctcttaaggcacatattttggacgggattaacctatgcgggtattttgcgtactctttcaatgatcgcaccgcgccaagatttgggctgtacagatacgcagctgaccaattcgaacctaaggccagcatgaagcactaccggaagattattgactccaacgggttccctggacctgaaactctggagaggttctgccccgaggagttcacagtctgcactgaatgttcttttttccatacgcggaagagtttgctcgcgttcattgcttttctgttctttgccagcatcatcagcctctcactgatcttttattatagcaagaaagggcggcgaagttacaaa

SEQ ID NO: 15343 - DNA, 3036 bp, synthetic construct
  misc_feature 1..3036: note = source = /note="Description of Artificial Sequence: Synthetic coding sequence"
  source 1..3036: mol_type = other DNA
atgccggcgagcgccccgccgcgtcgcccgcggccaccaccgccgtccctgtccctgctcctcgtgctccttggtctgggaggcagacggctgcgcgccgaaccaggagatggcgcacagacttgggcgagattctccagaccgccagccccggaagcggcgggactgttccagggcacctttccggacggattcctgtgggccgtcgggtcggcggcttaccagactgagggaggatggcaacagcacggcaagggcgcctcgatctgggatacttttacgcaccatccacttgctcccccaggagacagcaggaacgcatcattgcccttgggagccccttcgccgttgcaacccgccactggtgacgtcgcgtcggatagctataacaacgtgtttcgcgacactgaagcactcagggaactcggagtgactcactaccgcttcagcatctcgtgggctcgggtcctccccaacggctcggccggagtgcctaatcgcgaagggttgcggtactaccggcggctcttggagcggctgcgggagcttggggtccaaccggtggtgaccctgtaccattgggacctgccgcagaggctccaggatgcctacggtggttgggctaaccgggcactggcagaccacttccgggattacgcggaactctgctttcggcatttcggaggacaagtgaagtactggatcaccatcgacaatccatatgtggtcgcttggcacggttacgccaccggtaggcttgcgccgggaattagaggatccccgcggctgggatacctggtggcgcataatctgctgctggcccacgcaaaggtgtggcatctgtacaataccagctttcgccctacccaggggggacaggtgtcaatcgctctgtcgtcgcattggattaacccaagacggatgaccgaccattccatcaaggagtgccagaagtctctggacttcgtgctcggatggttcgccaagccggtgttcatcgacggagactaccctgagtcgatgaagaacaatctcagctcaatcctcccggactttaccgaatccgagaaaaaattcatcaagggaaccgccgatttcttcgccctgtgcttcggaccgactctgtcattccagctgcttgaccctcacatgaagtttagacagctggagtcaccaaacctgagacagttgctgagctggatcgacttggagtttaatcacccgcagatcttcatcgtggaaaacgggtggttcgtgtcaggaaccaccaaacgggatgatgccaaatatatgtactatctcaagaagttcattatggaaaccctgaaggccatcaagctcgatggcgtggacgttatcgggtacactgcctggtcgctgatggacggatttgaatggcatagaggttactcgatccgaagaggcctgttctacgtggacttcttgtcgcaggataagatgctgctccctaagtcgtctgcgctgttctaccaaaagttgatcgaaaagaacgggttcccaccgcttcccgagaatcagcctctggagggcactttcccatgcgacttcgcgtggggtgtggtggacaactacatccaggtggacactacgctctcccaatttacggacctgaacgtgtacctgtgggacgtgcaccactccaagcgcctgatcaaggtggacggcgtcgtcactaagaagaggaaatcctactgtgtggatttcgctgcaatccaaccacagatcgcactgctgcaggaaatgcatgtgacccacttcaggttcagcttggattgggcgctcattctgccgctcggaaaccagtcccaagttaatcataccatcctccaatactatcgctgcatggcgtcagagctggtacgcgtcaatatcaccccggtcgtggcgctgtggcaaccgatggcaccgaaccaaggactgccacgcctgttggcccgccagggggcatgggagaacccctacacggcgctggccttcgccgaatacgccagactttgtttccaagaactgggccatcacgtcaaactgtggatcactatgaacgagccttataccaggaacatgacttactccgcaggccacaacctcctgaaagcacacgccctggcttggcatgtctacaacgaaaagttcagacacgcccagaatggaaagatcagtattgctctccaggctgactggatcgaaccggcctgccctttctcacagaaggacaaagaagttgccgagcgcgtgctcgagtttgatattggatggctcgcagagccaatattcggatcgggggactacccttgggtgatgagagattggctgaaccagcgcaataattttctcctcccttacttcactgaggatgaaaagaaactgatccaaggaactttcgacttccttgctctttcacactacaccaccatcctggtcgattcggaaaaggaagatcccattaaatacaacgactacctcgaagtccaagaaatgactgatattacctggctgaactccccatcccaggtggccgtggtgccttggggcctccgaaaggtgctgaattggctcaagttcaaatacggagatcttcccatgtacatcatcagcaacggcatcgacgatggcctgcacgccgaggatgaccagctgcgcgtctactacatgcaaaactacatcaatgaggcgctgaaagcccacatcctggacggtatcaacctgtgcggatacttcgcgtacagctttaacgaccgcaccgccccgcgctttgggctctaccgctacgctgcggaccagtttgaaccgaaagcatccatgaagcattaccggaaaattatcgatagtaatggcttcccgggccctgagactctcgaacgcttctgtccagaagaattcaccgtctgcacggagtgctccttcttccacactcgcaaatcccttctggctttcattgccttcctctttttcgcatcaatcatctcgttgagcctgatcttttactacagcaagaagggacgacggagctacaag

SEQ ID NO: 15344 - DNA, 3036 bp, synthetic construct
  misc_feature 1..3036: note = source = /note="Description of Artificial Sequence: Synthetic coding sequence"
  source 1..3036: mol_type = other DNA
atgcccgcatccgcccccccgcgccgccctagacctccgccccccagtctctcgttgttgttggtcctgctcggactcgggggtcgccggctccgagcagaacccggcgacggtgctcagacctgggcacggttctcccgcccacctgcccccgaggccgcaggactgttccagggcaccttccctgacggcttcctttgggcagttgggagcgcagcctaccagaccgaaggcggatggcaacaacacggtaagggtgctagcatctgggatacattcactcatcatcccctcgcaccccccggggattcccgtaatgcttctttgcctctcggcgcgcccagtccgctccagcccgccactggggatgtcgcaagcgactcttacaataacgtcttccgtgacactgaggctctccgcgagctgggtgttacccattaccggttctccatcagctgggctcgagttcttcctaacggctctgccggtgtcccgaatcgtgaaggcctgcgctactatcggcgtcttctggagcgcctccgtgagcttggcgtccaacccgtggtcaccctttaccactgggacttgccccagcgtctgcaggatgcttacggcggttgggccaatcgggctctggcggaccatttccgtgactatgctgagctatgcttccgccatttcggtggacaggtcaagtactggatcaccattgacaacccgtacgtggtcgcctggcatggctacgctacaggccgactagctcctggtatccgtggctctccccgcctcggctacctcgtcgctcataatctccttctggctcacgccaaggtatggcacctctacaatacaagtttccgccctactcagggtggccaggtctcgatcgcgctgagctctcactggatcaaccctcgtcgcatgaccgatcactctatcaaggagtgtcaaaagtccctcgatttcgtcctcggctggttcgcaaagcctgtgttcattgacggcgactaccccgagtccatgaagaacaacctgagctccatcctcccggacttcaccgaatcagagaagaagttcatcaagggaaccgccgatttctttgccctctgctttggccctactctgagcttccaacttctggacccacatatgaagtttagacaactggaatcgccgaacctgcgtcaactgctctcttggattgatctggagttcaaccacccacaaatcttcattgtcgaaaacggctggttcgtcagcggcaccaccaagcgggacgatgctaagtacatgtactatctcaaaaagttcatcatggagacccttaaagcgattaagcttgacggtgtcgacgtcatcggctacactgcttggtctttgatggacggcttcgaatggcacagagggtacagcatccggcgaggcctcttctacgtggatttcctgagccaggataagatgttgctgcccaaatccagcgccttgttctaccaaaagctgatcgaaaagaacggatttccgcctttacccgagaatcagccgctcgagggtacgttcccctgtgacttcgcttggggagtggtggataactacatccaagtcgatacgaccttaagccagttcactgacctcaacgtgtacctttgggacgtccaccactctaagcgtctcatcaaggttgacggcgtcgtcaccaagaagcgcaagtcgtactgtgtggactttgcggcgattcagccccagattgccctgctgcaagagatgcacgtcacccacttccgcttctctcttgattgggctcttattctgcccctcggcaatcagtcgcaggtcaatcatacaattttgcagtactaccgctgcatggcctcggagctcgtgcgggtaaacatcacccccgtcgtcgcactgtggcaaccgatggcgcctaaccagggcctcccccggttgctcgcccggcagggcgcttgggaaaacccctacaccgccctagccttcgccgagtacgcccgtctgtgcttccaggagctggggcaccatgtgaagctttggatcacgatgaacgagccctacacccgtaatatgacgtactccgcaggccacaacctgctgaaggctcacgctcttgcctggcacgtatacaacgagaagttccgtcacgctcaaaacggtaagatcagtattgcgctccaggctgactggatcgagccagcgtgccccttctctcagaaggataaggaggtggccgaacgcgttctggaattcgatattggatggctcgcagagcccatcttcggatccggtgactacccgtgggtgatgcgtgattggctgaaccagcgtaacaattttcttctgccctacttcaccgaagatgagaagaagcttatccagggcacctttgacttcctcgctttgtcccattatactactatcttggtagattcggagaaggaagatcctatcaagtacaacgattacttggaagtgcaggaaatgacagatataacctggctcaattcgccctcccaggtcgccgtcgtgccctggggactgcgtaaggttctcaattggctcaagttcaagtacggcgaccttcccatgtacattatctccaatggtatcgatgatggcctccatgcagaggacgaccaactgcgcgtttactacatgcaaaactatattaatgaagcacttaaggctcacatcctcgatggcatcaatttgtgcggatacttcgcctacagcttcaatgacagaactgcaccccgctttggcctctaccgttacgccgccgaccagttcgagcctaaggcctccatgaagcattaccgcaagatcatcgatagcaatggattccctggacccgagaccctcgagaggttttgcccggaggaattcacagtttgtaccgaatgctccttcttccacacccgtaagtctctgctagcatttattgccttcctcttctttgcgtccataatctccctgtccctgattttctactattctaagaagggcaggagaagttataag

SEQ ID NO: 15345 - DNA, 3036 bp, synthetic construct
  misc_feature 1..3036: note = source = /note="Description of Artificial Sequence: Synthetic coding sequence"
  source 1..3036: mol_type = other DNA
atgccagctagcgcaccaccgcggcggcctcgacccccacccccaagccttagcctgctgctggtgctcctgggtttaggaggtcggcggctgagagcggaacccggcgacggcgctcagacatgggcgcgcttttcacgaccacctgcccccgaggcagcaggattgttccagggaacctttcctgatgggtttctgtgggcggtcggaagcgcagcttatcagacggagggaggatggcagcagcacggtaagggggcctctatttgggacacgttcactcaccatccattggcccccccaggggactctcgtaatgcgtcactgccgctgggcgcccctagtcccctgcagcccgcaacaggggacgttgctagtgactcatacaacaatgtatttagggataccgaggcactgagggagctgggcgtcacacattacaggttctcaatcagctgggccagggtcctgcctaacggctccgctggagtcccgaatcgggaaggactcaggtactaccggcgcctactggaaagacttagggagctgggcgttcagcctgtggtgactctctaccactgggaccttccccaacgcttgcaggacgcttatggcggatgggctaaccgcgcattggccgatcactttcgagattacgcggagctctgctttcgtcactttgggggccaggttaaatactggattacgatagataatccctatgtggtcgcctggcacggttatgcaaccgggaggcttgcaccgggaattagaggctcgccgagacttggctatctggtggcacacaatctgcttctggcccacgctaaggtctggcacctgtataacacaagctttcgtccgacacagggcggtcaggtgtctatcgctctatctagtcactggattaaccctcgcaggatgaccgatcacagcattaaggagtgtcagaagtcattggacttcgtgctcggatggttcgccaagcctgtgtttatagatggtgactaccctgagtcaatgaagaacaatttaagtagtattcttccggacttcaccgagtcagagaagaaatttattaaagggacagctgactttttcgccttatgcttcggaccaactctcagcttccagttgctggatcctcacatgaagttccgacaactagagtcccccaatctgcgtcagctgctgtcgtggatagacttagagttcaatcatccccaaattttcattgtcgagaacggatggttcgtatctggaaccaccaagagggacgatgcaaagtacatgtactacctgaaaaagtttatcatggaaaccttaaaggcaatcaagctggatggtgtggatgtgataggttatacagcatggtccctgatggacggctttgagtggcaccgtgggtatagcatccgtcggggattattttatgtggactttctgtctcaagataaaatgctgctgccgaagtccagtgccctgttttatcagaagttgattgagaagaacggattcccacctctgcctgagaaccagcccctggaaggtacatttccatgtgatttcgcgtggggcgtagtggacaactatatccaagttgataccaccctgtcccaattcacggacctgaatgtttatctgtgggacgtgcatcactccaaacggcttatcaaagttgatggggtggtgacaaagaaaaggaaaagctattgtgtggacttcgccgctatccaacctcaaatcgctttgcttcaggagatgcacgtgacacacttccgattctctctggattgggccctcatcctcccactgggaaaccaatcccaagttaaccatactattttacagtattatagatgcatggctagtgagctggtaagggtgaacataactcctgtggtggcattgtggcagccaatggcccccaaccagggcctgccccgcctgctcgcccggcagggtgcctgggagaacccttacaccgcccttgcttttgctgagtacgctcgcctgtgctttcaggagcttggccatcacgtgaagttgtggattactatgaatgaaccgtacacacgcaacatgacctactccgctggacataatttgctgaaggcccacgctctcgcctggcacgtgtataatgagaagttccggcatgcgcagaatggcaagatcagcattgcattgcaagctgactggattgagcccgcctgtccattttcccaaaaagacaaagaggtcgctgaacgagtactagagttcgacataggatggcttgccgaacctattttcggctcaggcgattacccatgggttatgagagactggctgaaccaaagaaacaatttcttgctcccctacttcaccgaagatgagaagaagttgatccagggcaccttcgatttcctggctctgtcacattacaccaccatactcgttgactcagaaaaagaagatcctatcaagtacaacgactatctggaggttcaggagatgacagacatcacctggctgaatagtccttcacaggtggctgttgttccttggggattgagaaaagtgctgaattggttaaagtttaaatacggtgatctccccatgtacattatatccaacgggattgatgatggcctgcacgccgaggatgaccagctcagggtttattatatgcagaactacattaacgaagcattgaaggctcacatcctggacggcatcaacttatgtggatattttgcctattcttttaacgatcgcacggctccacgctttgggctctacagatatgccgcagatcagttcgaaccgaaggcctcaatgaaacactaccgcaaaatcattgactccaacggatttcctggacctgaaacccttgaacgtttttgcccagaagagtttacagtgtgtaccgagtgttcattctttcacacccggaagtccttattggcttttattgcattcctctttttcgccagtatcatcagcctgtccctgatattttactattcaaagaaggggagacgctcctataag

SEQ ID NO: 15346 - DNA, 3036 bp, synthetic construct
  misc_feature 1..3036: note = source = /note="Description of Artificial Sequence: Synthetic coding sequence"
  source 1..3036: mol_type = other DNA
atgcctgcgagcgccccccctcggagacccaggccccctccccctagcctgagcctattactggtgcttcttggccttggcggcagaaggcttcgcgccgagcctggcgatggagcccagacgtgggcccggttctcgcgacccccagcccctgaggccgccgggctgtttcagggtacctttccagacggtttcctctgggccgtgggctccgctgcttatcagaccgagggaggctggcagcaacacgggaagggcgcctccatatgggacacattcacacaccacccactggcccccccaggagactctcggaacgccagtttaccgctcggggctcccagccccctgcaacccgccacgggcgatgttgcaagcgactcttataacaatgtgtttagggatactgaggctctgcgcgagctcggggtgactcattatcgcttctccatctcatgggctagggtcctgcccaatgggtctgccggagtcccaaatcgagaagggttacgctattaccgccggctgctcgagaggttaagagaattgggtgtgcaacccgtggttactttatatcattgggacctaccccaacgactgcaggatgcctacggagggtgggcaaatcgggctcttgcagaccactttagggattatgctgaactttgctttagacattttggaggacaggtaaagtattggataaccatcgataacccctacgtggtggcctggcatggatacgccacaggccggctcgctccggggatccggggcagccctagactcggttacctggtggctcacaacctcctgctggcccacgctaaagtctggcatttatataacacgagctttcggccaacacagggcggccaggtgtcaatcgcactgtcctcccattggatcaatccaaggcggatgaccgaccactccatcaaagagtgtcaaaagtctctcgactttgtgctggggtggttcgcaaagcctgtgtttatcgatggcgattaccccgaatccatgaaaaataacttgagctctattttgccagactttacagaaagcgagaaaaaattcataaagggcacagcggacttctttgcactgtgctttggccctaccttaagctttcagctgctggatccacacatgaaattcaggcagctggagtcccccaacttgcggcaactccttagctggatcgacttagagtttaatcacccccagatcttcatcgtggagaatgggtggttcgtatcaggaactacgaagcgagatgacgcaaagtatatgtattacctgaagaaattcatcatggaaacactcaaggccataaaattggacggagttgatgtcatagggtatactgcatggagtctgatggatgggttcgagtggcacaggggatactctattcgacgtggccttttttatgtcgattttctgtctcaggacaaaatgctgcttcctaaatcatctgcacttttttatcagaagttgatcgaaaaaaacggctttcctccccttcccgagaaccaaccgctggagggtacattcccatgcgactttgcctggggagtggtagataattacatacaggtcgacacaacactttcccaattcacagacctcaatgtgtacttgtgggatgtgcaccacagcaagcgccttattaaagtggatggcgtagtgacgaaaaagcgaaaatcgtactgtgtggatttcgcagcgatccaaccccagatcgcccttctgcaagaaatgcatgtgacacactttcggttcagcctggactgggctttgattttgccccttgggaatcagtctcaagtgaaccatactatcctgcagtactatcgctgcatggcatcagagctggtgcgagtgaacataacgccggtcgttgctctgtggcagcccatggcccccaatcagggcttgccaagactgcttgccaggcagggagcctgggagaatccatataccgccctggcattcgcagaatatgcaagactctgttttcaagagttgggccaccatgttaagctctggattacaatgaatgagccgtatacccgcaatatgacgtatagtgctggccataaccttttgaaagcccacgccctggcgtggcacgtctacaacgagaaatttcgccatgcccaaaacggcaagatatcaatcgcgctacaggcagactggattgaaccagcatgtcccttttcccagaaggataaagaggtggcagaacgggttcttgaattcgacatcggatggctggccgagccaatctttgggtcaggggattacccatgggtgatgcgcgattggctcaatcagcggaataacttcctgttgccctatttcacagaggacgaaaagaagcttatacaggggacttttgattttctggctctctcccattacactaccattctcgttgatagcgagaaggaggatcctatcaaatataacgactatctggaggtccaggagatgacagacatcacgtggctgaattccccgagccaggtcgccgtagtcccctggggcttgcgcaaagtactcaactggctaaagttcaaatatggcgatctgcctatgtatataatttctaacggaatcgacgacgggctgcacgccgaggacgatcagctcagggtgtattatatgcagaactacatcaatgaggcgttgaaagcccacatactggacggcatcaatctgtgcggctatttcgcatacagtttcaatgaccgaaccgcacctcgctttggcctgtaccggtatgcagccgaccagttcgagcctaaggcatcgatgaagcactataggaaaatcatcgacagcaacgggttcccaggtcctgagactctggagcgcttttgccctgaagaattcacggtctgcacggagtgctcattctttcacacacgcaagtcattgctggcgttcatcgccttcttgttcttcgccagtattatttccctttccttgatattctactattccaagaagggaagacgctcctacaaa

SEQ ID NO: 15347 - DNA, 3036 bp, synthetic construct
  misc_feature 1..3036: note = source = /note="Description of Artificial Sequence: Synthetic coding sequence"
  source 1..3036: mol_type = other DNA
atgccagcatccgcccctccgaggcgcccccgcccgccacccccgtcacttagtctcctgctggtgttgttgggacttggtggaagacgccttagagccgagccgggcgatggcgcacagacctgggctcgcttcagtaggccaccggccccagaggctgctggcttgttccagggtactttcccggacggcttcctgtgggcagtgggctccgctgcataccaaacggagggaggctggcagcagcacggaaaaggcgcctctatttgggataccttcacgcatcatccccttgccccccccggtgacagcaggaatgcttctctcccgctgggcgctccgtctcccctgcagcccgccaccggcgacgtggcctccgattcctataacaatgtgttccgcgacacagaggcattgagggagcttggcgtgacgcactacagattcagcattagttgggctcgcgtgctgcccaacggcagcgcaggcgttccgaatagagaaggcctgaggtactatcgcagactgctggagagactgagggaacttggcgtacaacctgtggtaactctgtaccattgggatttgccacagcgcctgcaagacgcctacggcggttgggccaatagggcacttgccgaccattttagagactacgccgaattgtgctttcgccattttggaggacaggtgaaatactggataacaattgacaacccatatgtggtcgcatggcacggttacgctaccggacgcctggctcctggcatcaggggttcacccagactgggttacctggtggcgcataacctgttgctggcgcatgctaaggtgtggcatctctacaatacatcatttagacctacccagggaggacaggtcagcatagccttgtccagccactggataaaccccaggcgcatgaccgaccacagcatcaaggaatgccagaagtccttggactttgtcctgggttggtttgccaagcctgttttcatcgacggtgattatcccgagagtatgaaaaacaatctctcctctattctgcccgactttacggaaagtgagaagaaatttattaagggtacggcagatttttttgccctttgcttcggacctactttgtctttccaactcttggatccacatatgaaatttaggcagcttgagagcccaaacctgcgccagctcctctcctggatcgacttggagttcaaccatccccagatcttcattgtcgaaaatggttggttcgtgtctggaaccaccaagagagatgacgctaaatacatgtactaccttaagaagttcatcatggaaactctcaaggccataaagctggacggcgtcgacgtgattggttacactgcatggagcctcatggacggatttgagtggcacaggggctactctataaggagaggactgttttacgtcgattttttgtcccaggacaaaatgctcctccccaagtctagcgccctcttctatcagaaactgatcgagaagaacggtttcccccctcttccagagaatcagcccctcgagggaacgtttccatgtgacttcgcgtggggtgtcgtcgataactacatccaagtagacacaacactgtctcagttcactgatcttaacgtctacctgtgggatgtccatcatagtaaacgcctgataaaggtggacggtgtggtgacaaagaaaaggaagtcctattgcgtggactttgctgccatccagcctcagattgccttgttgcaggaaatgcatgtcacgcactttaggttctcccttgactgggctctgatcctgccgcttggtaaccaaagccaggtgaatcataccatcttgcaatattaccgctgcatggcctcagagctcgttcgcgtgaatattaccccagtagtggccttgtggcagccaatggcccctaatcagggccttccaagacttctggctcgccagggagcctgggagaatccctacacagcactcgctttcgcggagtacgccagactgtgctttcaggaactgggtcatcacgtgaaactctggatcactatgaatgagccatacactaggaacatgacctactctgctggccataacctgctgaaagctcacgccctggcctggcatgtctataatgagaagttcaggcacgcgcagaacggtaagatatcaattgctctgcaagcggattggatagagcccgcatgtccgttttcacagaaagacaaggaggttgcagagcgcgtcctggaattcgatattggttggctggcagagccgatcttcggaagtggtgactacccttgggttatgcgcgattggctgaaccagaggaataacttcttgttgccttacttcaccgaggatgagaaaaagctgatacagggcactttcgacttccttgcgctgagccactatacaacgattctcgtggactccgagaaggaggaccctataaagtacaacgactacctggaagtgcaggaaatgactgacatcacatggctcaattctccctctcaagttgcggtcgtgccctggggactcagaaaagtgctgaactggcttaagttcaagtatggtgatttgcctatgtacatcatcagtaatggcattgacgatggcctccacgccgaggacgaccagttgcgcgtgtattacatgcaaaattacatcaacgaggctctcaaagcgcacatcctggatggaatcaacctgtgcggctatttcgcatattcctttaacgatagaaccgccccccgctttggtttgtaccgctacgctgctgaccaatttgagcccaaggcctctatgaagcactacaggaaaatcatcgatagcaacggttttcctggtcccgaaactctcgagcgcttctgccccgaggagtttacagtgtgtaccgagtgctcctttttccacacaaggaagtctttgctcgcttttatagcgttcctcttctttgcttctattattagcctgtctttgatcttctactactcaaagaaaggtaggagaagctacaag

SEQ ID NO: 15348 - DNA, 1320 bp, synthetic construct
  misc_feature 1..1320: note = source = /note="Description of Artificial Sequence: Synthetic coding sequence"
  source 1..1320: mol_type = other DNA
atgggacccccaggatccccctggcagtgggtcactctgctgctgggactgctactgccaccagctgcccctttctggctcttgaacgtgttgttccctcctcacactacccccaaagccgaactgtccaatcatactcggccagtgatcttagtgccgggctgcctcggaaaccagctggaggcgaaactggataagcctgatgtggtgaattggatgtgctaccgcaaaacagaggacttttttacaatatggctcgatctcaatatgtttctgccacttggagtcgactgctggatcgataacacacgggttgtgtacaaccgctcttccggactggtgtctaacgcccctggggtgcaaattagggtccccggctttggtaagacctattctgtcgagtacctggacagcagcaaattggccggatacctgcataccctggttcaaaacctcgtgaacaacggctacgtcagagacgagacagtcagagccgctccatacgactggcgcctcgaaccgggacagcaagaggaatactatagaaagctcgctggtctggtggaggagatgcatgcggcctacggtaaacctgtcttcctgattggacactccttgggatgtctccatctgctgtacttcttactccgacagccacaagcatggaaagatcggtttattgacggatttataagtctgggtgccccatggggcggcagcatcaaaccaatgttggtgttggcatcaggagacaaccaaggcataccaataatgtcctcgatcaagttaaaagaagaacaacggattacgacgacatcgccttggatgtttccctcccggatggcgtggcctgaagaccacgtgttcatatcaacacccagttttaattacactggaagagacttccagaggttcttcgctgacttgcacttcgaggagggttggtacatgtggctgcagtcaagagatctactagctggccttcctgcccccggagtcgaggtgtattgtctctatggtgtcggcctgcctacaccacgaacatacatatatgatcacggttttccatacacagatcctgtcggtgttctttatgaagacggggatgatactgtggctacacggtccaccgagctgtgtggcctgtggcaggggcggcaaccccaacccgtccacctgcttcccttgcatggcattcaacatctcaacatggtattttcaaatctcactttggaacacataaacgctattcttctcggagcctaccgccaggggcctcccgcaagtcccacagcaagtcccgaaccacccccccctgaa

SEQ ID NO: 15349 - DNA, 1320 bp, synthetic construct
  misc_feature 1..1320: note = source = /note="Description of Artificial Sequence: Synthetic coding sequence"
  source 1..1320: mol_type = other DNA
atgggaccgcctggaagcccttggcagtgggtgactcttcttctgggccttcttctgccgcccgcagcacctttctggctgcttaacgtcctttttcctcctcacacgacccctaaggcagaactgtcgaatcatactcgaccggtgattctggtgccgggatgtttgggcaaccaactcgaggccaagctggacaagcccgatgtggtgaactggatgtgctatcgtaagaccgaggacttctttactatctggctggaccttaacatgttccttcctcttggagttgattgttggattgataacactagagtcgtgtataatcgctcatctggcttggtcagcaacgctcctggtgtgcaaattcgagtgccgggctttggtaagacttactcggtggaatacctggactcctcaaaactggccgggtacctgcatactctggtccaaaatctggtgaacaacggttacgtgcgggacgaaactgtccgcgcggcgccatacgattggcgtctggaaccaggtcagcaagaagaatactatcgaaagctggcaggcctggtggaggagatgcatgccgcctacgggaagcccgtgtttcttattgggcattccctgggctgcctgcatctcctctactttctgcttagacagcctcaggcctggaaggatcggttcattgatggcttcatttctcttggagccccatggggagggtcgataaaaccaatgctggtccttgcgtcgggagacaatcagggcatccctatcatgtcatcgatcaagctgaaggaggagcaaaggattaccaccactagcccatggatgtttccgtcccggatggcatggcctgaggatcatgtattcatctcaactccttcgtttaactacactggccgtgattttcaaagatttttcgcagatcttcacttcgaagaggggtggtacatgtggctgcagagcagggacctgctcgcaggtctgcccgcacccggggtcgaagtgtattgtctttacggagtcggactccctaccccacggacctacatctacgatcatggatttccctatactgatccagtcggagtgctctacgaagatggagatgataccgtggcaactagatcgactgaactgtgtggtctttggcaagggaggcagccacagcctgtgcatcttctgcctctccatggcattcagcacctgaacatggtgttctcaaacctcaccctcgaacatatcaacgcgattcttttgggtgcttaccggcaaggaccccccgcctcgcccaccgcatcacccgaaccgcccccacctgaa

SEQ ID NO: 15350 - DNA, 1320 bp, synthetic construct
  misc_feature 1..1320: note = source = /note="Description of Artificial Sequence: Synthetic coding sequence"
  source 1..1320: mol_type = other DNA
atggggccccctggaagcccgtggcaatgggttacacttctcctgggtttgctgcttcctccggcagctcctttctggctcctgaacgtactctttcccccgcacaccacccccaaggccgagctgagcaatcatacgcgccctgtgattctggtcccggggtgtctgggaaatcagctagaggccaagctggacaagcctgacgtggtgaattggatgtgctacaggaagaccgaggacttctttactatttggctggacctgaacatgttcctgccactgggtgttgactgctggatagataacaccagggtggtatacaaccggtccagcggcttagtctctaacgcccctggagtccagatcagggtgccaggtttcggtaagacctatagtgtagagtatcttgatagcagcaaattagctgggtacctgcataccctggtgcagaatcttgtcaataacgggtatgtccgagacgaaacagtgagagcagccccctatgactggagactcgaacccggccagcaggaagaatactatagaaaactggccgggctagtcgaagagatgcacgcagcttatgggaaacccgtgtttctgattggacatagtttggggtgtctgcatcttctgtacttcctcctccggcagccgcaagcctggaaggatcgttttatcgacggcttcatttcactgggcgctccctggggaggcagcattaagcctatgctcgtactggccagtggtgacaaccagggaattcccattatgtcgtcaattaaactgaaggaagagcaacgtattactactacaagcccgtggatgttcccaagccgcatggcctggcctgaggaccacgtgttcatcagtacgccctcttttaattataccgggcgggactttcagcgcttcttcgctgatctccatttcgaggaaggttggtacatgtggctgcagagtagagatctgctggcgggcctgccagcaccgggcgttgaagtctattgcttatatggagtcggtctacccacccctagaacctatatttacgaccatggcttcccctacacagacccagtaggtgtcctgtacgaagacggagacgatacagtggctactcggtccactgagctttgcggtctttggcaaggccgtcagcctcaacccgtccacctgttgccgttgcacggaattcagcatctgaacatggtctttagcaaccttacactcgagcacattaacgcgatcctgctgggggcttatcgacagggcccccccgctagcccaacggcgtctcctgagcctcctccacctgag

SEQ ID NO: 15351 - DNA, 1320 bp, synthetic construct
  misc_feature 1..1320: note = source = /note="Description of Artificial Sequence: Synthetic coding sequence"
  source 1..1320: mol_type = other DNA
atgggacctcccggcagtccgtggcagtgggtgaccctgctacttggactgctgctccctcctgcagcacccttctggctcctcaacgtcctgtttccccctcacacgacccctaaggccgagctctctaaccacacgcggccagtcatcctcgtgccgggatgtctcggcaaccagctggaggcaaagctcgacaaaccagatgtggtcaattggatgtgttatcggaaaacagaggactttttcaccatttggctggatctgaatatgtttctccccctgggcgtcgattgctggatcgacaatacacgagtggtttataaccgctcctcaggcctcgtgtcgaatgcaccaggggtgcaaattagggtgcctggctttggaaaaacttatagtgtcgagtacctagattctagtaaacttgccggatatctccatacactggtgcaaaacctagtgaacaacggttatgtgagagacgagactgttcgcgctgccccttatgattggcgcctggagccaggtcagcaggaggagtactacagaaaactcgccggtttggtcgaagagatgcatgctgcgtacggaaagccggtgttcctgattggccacagcttggggtgcctgcatttattatacttcttgctaaggcagcctcaggcatggaaggacaggttcatagacggattcatctccctcggcgcaccctgggggggcagcatcaagccaatgctggtgctggcctccggcgataatcaagggattcctataatgtcatccataaagctaaaggaagagcaaagaattacaacaacctccccatggatgtttcccagccggatggcttggccagaggatcatgtattcataagcaccccctcctttaattatacgggacgagatttccaacgttttttcgcggacctgcatttcgaggaaggctggtatatgtggcttcagtcgcgcgacctcctcgctggtctcccagccccaggagtggaagtatactgtctgtacggcgtgggtctcccgactcctcggacctatatctatgaccacgggtttccatataccgacccagttggggtgctttacgaagacggtgacgacaccgtggctactaggagtaccgaactctgcggtctttggcaaggccgccaaccacagccagttcatctcttacccctgcacggtatccaacatctgaacatggtattctctaacctcactctggaacatattaatgccattttgcttggggcttataggcaaggcccacctgctagtcctacagcatctcccgagcccccccctcccgaa

SEQ ID NO: 15352 - DNA, 1320 bp, synthetic construct
  misc_feature 1..1320: note = source = /note="Description of Artificial Sequence: Synthetic coding sequence"
  source 1..1320: mol_type = other DNA
atgggcccaccaggcagcccatggcaatgggtcaccctgttgcttggccttctgctgccccccgctgctccattctggttgctgaatgtgctgtttccaccccacacaacccccaaggccgagctctctaatcacacaagacctgtaatcctggtgccagggtgcctggggaaccaactggaggcaaagcttgacaagcccgacgtggttaactggatgtgttaccgcaagacggaagatttcttcaccatctggctggatctgaacatgtttctgcctcttggcgttgactgctggatcgacaacacacgagtggtgtacaacaggagctcgggtctcgtgagtaatgctcccggcgtgcagatccgggtcccagggttcgggaaaacatacagcgtggaatacctggactccagcaagctggcagggtacttgcacacactggtccagaatctcgtgaataacggctatgtgcgggacgaaacagtgcgagccgccccctacgattggcgactggaacccggccagcaggaggaatactatcgcaagcttgcgggcttggtggaggaaatgcatgccgcctacgggaaacccgtgttcctgatcggacacagcctgggatgccttcatctcctgtatttcttattacggcagccccaggcctggaaggatcgtttcattgatggattcatctccttgggggccccatggggcggatctatcaaacccatgctcgtcctggcctctggggataaccagggcatacctataatgtcatccatcaaattaaaagaggagcagcggattactactaccagcccatggatgtttcctagccgcatggcctggccagaggaccacgttttcataagcactcccagtttcaattacactgggcgagacttccagcgcttcttcgccgacctgcatttcgaggaaggttggtacatgtggctgcagtcccgagaccttttggcgggattgccagcccccggcgtcgaggtgtattgcctttatggtgtcggcttgccaacaccgcgcacctacatatatgatcatggctttccctacaccgaccccgtcggggtgctctatgaggatggtgatgacacagtcgctacaagaagcaccgagctatgcggtttgtggcagggcaggcagccccagcctgtgcacctgctccccctgcatggaattcaacatctgaacatggtgttcagcaacctgactcttgagcacattaacgcgattcttctgggtgcttaccgccaggggccccccgcgtctcctacagcttcgcccgaacctcccccaccagaa

SEQ ID NO: 15353 - DNA, 1320 bp, synthetic construct
  misc_feature 1..1320: note = source = /note="Description of Artificial Sequence: Synthetic coding sequence"
  source 1..1320: mol_type = other DNA
atggggcctccaggctccccgtggcaatgggtgacgttgctcctcggactgctgctcccacctgctgccccattctggttgctgaacgtcctgttcccaccccataccactccgaaagcagagctgtcgaaccatactcgtcccgtcattctggtcccgggatgcctgggcaaccagctcgaggccaagctcgacaagccggatgtcgtgaactggatgtgctaccggaaaactgaggatttctttaccatctggttggaccttaacatgtttctgccattgggagtggattgctggatcgacaacactagagttgtgtacaaccgatcttcagggcttgtgtccaatgcacctggagtccaaattcgcgtgccgggattcggaaaaacttattctgtcgagtacctggactcatctaagctggccgggtacctccacacgcttgtgcagaatctcgtgaataacggatacgttagagacgagactgtgcgggcagcgccatatgactggagactcgaacctggacagcaagaagaatactacagaaagctggcggggttggttgaagaaatgcacgctgcgtacgggaagccggtgttcttgatcggacatagcttgggttgcctgcacttgctgtactttctccttcgccaaccccaagcgtggaaggaccggtttatcgacggtttcatcagccttggagccccgtggggaggatcgatcaagcctatgctggtgctcgcttccggggacaaccagggtatcccgataatgagctccattaaactcaaggaagaacagcgcatcaccaccaccagcccttggatgtttccatcccggatggcttggcccgaggaccacgtgttcatctcaaccccttcgttcaactacactggacgggacttccaaaggttcttcgcagacctgcacttcgaagaaggatggtacatgtggctccagagccgcgatctgctcgcagggctgccagctccgggagtcgaagtgtactgcttgtacggtgtcgggcttccaactccccgcacgtacatctatgaccatggttttccgtatactgatcccgtgggcgtcctgtacgaggatggagacgatactgtcgcgacccgctcaacggagctctgcggactctggcagggccgccagcctcaacctgtgcacctgcttccgctgcacggaatccagcacctcaatatggtgttctcgaaccttactctcgagcatatcaatgcaattctcctgggagcctaccgccagggtccacctgcctcacccacggctagcccggaaccacctccaccggaa

SEQ ID NO: 15354 - DNA, 1320 bp, synthetic construct
  misc_feature 1..1320: note = source = /note="Description of Artificial Sequence: Synthetic coding sequence"
  source 1..1320: mol_type = other DNA
atgggtccacctggttcgccatggcaatgggttaccctgcttctggggctcctgctgcctccagcagcaccattttggctcctcaatgtcctgtttcctcctcatactaccccaaaagccgaactgtcgaaccatactcgtcctgtcatcttggtccccggttgtctcggaaatcagttggaagcgaagctggacaaaccagacgtggtgaattggatgtgttaccgtaagaccgaggatttctttaccatttggctcgacctgaatatgttccttcctcttggggtggactgttggattgacaatacgcgcgtggtgtacaatcgatcgagcgggcttgtttccaacgcccccggagtgcagattcgtgtaccaggttttggaaagacttactcggtggaatacctggatagctcaaagttggcggggtacttgcataccctggtgcaaaatcttgttaacaacggttacgtgagagacgaaacggtgcgtgcagcaccgtacgattggcgcctcgaaccaggacagcaagaagaatactaccgaaaactggctggccttgtggaagagatgcacgcagcatacggcaagccggtgtttctcatcggtcacagcctgggatgcctgcatcttctttactttctccttagacagccacaggcttggaaagaccggtttatcgatggattcatttcacttggagcgccatggggtggttcgattaaacccatgcttgtcctggcgagcggcgacaaccaagggatccccatcatgtcctccattaagttgaaagaagaacagagaataactaccacctcgccttggatgtttccatctcgaatggcctggccagaggatcatgtctttatctcaaccccctccttcaattacaccggcagggattttcaacggttcttcgcagatcttcattttgaagaaggctggtatatgtggctgcagtcgcgtgatctcctggcgggtttgcctgcacctggagtggaagtgtactgtttgtatggtgtggggcttcctacccctcgcacctacatttacgatcatggtttcccatacaccgaccccgtgggggtcctgtacgaagatggagacgacaccgtcgcgactagaagcacggagctgtgtggactgtggcaagggagacaacctcagccagtgcatctcctgcctctccatggaatacaacaccttaacatggtcttttccaaccttaccctggaacacataaacgcaatcctgctgggagcctacagacagggcccaccggcatcgcctactgcttcgcctgaacctcctcccccggag

SEQ ID NO: 15355 - DNA, 1320 bp, synthetic construct
  misc_feature 1..1320: note = source = /note="Description of Artificial Sequence: Synthetic coding sequence"
  source 1..1320: mol_type = other DNA
atgggaccgccgggatcgccctggcagtgggtcactttgctgctgggattgctgcttcctccggcagcgccgttctggttgcttaacgtcctgtttcctcctcatacgactcccaaggcggagctgtcgaaccataccaggccggtgatcctcgttccaggctgcctgggcaaccagctggaggcgaagctggataaaccggacgtggttaactggatgtgttacagaaagactgaagatttcttcactatctggctcgacctcaacatgttcctgcctctgggtgtggactgctggatcgataatacgagagtggtgtataaccgcagctcgggactcgtgtcaaacgctccgggcgttcagattagagtcccaggattcggaaagacctactccgtagagtatctcgattcgtccaagctggcaggatatctccacactctggtgcagaaccttgtgaataacgggtacgtccgggacgagactgtgcgcgcagcgccgtacgattggcgcctcgaacccgggcaacaggaagaatactaccggaagctggccggactggtcgaggaaatgcatgctgcgtacggaaagccggtctttctgatcggacatagccttggttgtctgcacctgctgtatttcctgctgcgccagccacaggcctggaaagatcgcttcatcgatggtttcatatcactgggagctccgtggggcggatccatcaaaccgatgctggtgctcgcttcgggtgataaccagggcatcccgatcatgtcgagcattaaactgaaggaagaacaacgcatcactaccacctccccgtggatgttcccgtctcgcatggcatggccggaggaccacgtgttcatttccactcctagctttaactacaccggtagggacttccagagattctttgccgatctgcatttcgaggagggctggtacatgtggcttcagtcgcgggacctgctcgcgggcctccccgcgcccggagtcgaagtgtactgcctgtacggggtcggcttgcctacgccgcggacttacatttacgaccacggatttccgtacactgacccggtgggagttctgtacgaggacggagatgatacggtggcgacgagatcaaccgaactttgcggactgtggcaaggccgccaaccgcaaccagtgcatctgctgcctctgcatgggatccagcatctgaacatggtgttctctaacttgaccctggagcatatcaacgcgatcctgttgggagcttacaggcaggggccaccagcctccccgaccgcctcgccggagcctccaccacctgaa

SEQ ID NO: 15356 - DNA, 1320 bp, synthetic construct
  misc_feature 1..1320: note = source = /note="Description of Artificial Sequence: Synthetic coding sequence"
  source 1..1320: mol_type = other DNA
atggggccgcccggtagtccatggcaatgggtgacacttctcctgggacttctgttgccacctgcagcccccttctggctgctcaatgtgctgttcccaccgcacactacccctaaagccgaacttagtaaccacacccgcccagtaattcttgttcctgggtgcctgggcaatcaactcgaggccaaactggacaaaccggacgtagtgaactggatgtgttatcggaagacggaagatttcttcacaatttggcttgatctcaacatgtttctcccgttgggggtggactgctggattgacaacactcgcgtggtgtataatagaagcagcggactggttagtaacgcgccaggtgtacagattcgggtgcccggcttcggaaagacctactccgtggagtaccttgacagcagcaaactggctggttacttgcacaccctggtgcaaaatctggtgaacaacggatatgtgcgggatgagacagttcgcgccgcgccctacgattggaggctcgagcctggccaacaggaggagtactacaggaagcttgcagggctggttgaggagatgcacgccgcgtatggcaaacccgtgttcctcatcggccacagcctaggctgcctccatctgctctactttctcctgaggcaaccgcaggcctggaaagataggttcatcgatggttttatctcacttggagccccctggggcggaagcattaaacccatgttggttctggcgagcggagataaccaagggattcccattatgtcctccattaaactgaaagaggagcagagaattaccaccacctcaccttggatgtttccatcaagaatggcctggccagaggatcacgtgttcatctcaacccccagcttcaattataccgggagagatttccaacgcttctttgctgatctgcattttgaagaaggttggtacatgtggttgcagtccagagatcttctggccgggctccctgctcccggagtcgaagtttactgtctgtatggagtcgggctacctactccgagaacctacatttacgaccatgggttcccatataccgatcccgttggtgtcttgtacgaggacggagatgacactgttgcgactagatctaccgaactgtgtgggttgtggcagggaagacagccacaacctgttcatctgctgccattacatgggatccagcaccttaacatggtcttctctaatctgaccctggaacatatcaacgccattcttctgggggcataccgccaaggaccgccggcgagcccaactgccagtcccgaaccaccaccacccgaa

SEQ ID NO: 15357 - DNA, 1320 bp, synthetic construct
  misc_feature 1..1320: note = source = /note="Description of Artificial Sequence: Synthetic coding sequence"
  source 1..1320: mol_type = other DNA
atggggccccctggcagtccgtggcagtgggtcactcttctgcttggtctgcttcttccacctgccgcccctttttggcttcttaacgtgctcttcccccctcatactacacccaaagccgaattgtcaaatcataccagacctgtaatcttggttccaggttgtttgggtaaccagcttgaggctaagctagataaacctgatgttgtgaactggatgtgctatagaaagacagaggactttttcaccatctggttagacttaaacatgttcctgcctcttggggttgattgctggatcgacaatacacgagtggtctacaaccgaagcagtgggctagtcagcaatgcaccgggggtgcagatccgcgtgcccggcttcggtaagacgtattccgtcgagtacctggatagctctaaactcgctggatacttgcatacattggtacagaacctggtaaataacgggtacgtaagggacgagacagtacgggcggcaccttacgattggcgcctggaacccggccagcaggaagagtactacaggaaacttgccggcttggtggaggagatgcacgccgcttatgggaaacctgtcttcctgattgggcacagcctgggatgtttgcatctgctctatttcctgctgaggcagcctcaggcctggaaggatcggttcattgatggattcataagcctaggggctccttggggggggtcaattaaacctatgcttgttttggcatcaggcgacaatcagggcatccctatcatgtctagtataaaattaaaagaggagcagcggataaccacaacaagcccatggatgtttccatctcgcatggcctggcctgaagaccacgtctttatcagcacaccatctttcaactataccggccgagatttccaacgcttttttgctgatctccactttgaagagggatggtatatgtggctgcaatccagagatcttctggccggcctaccggcaccaggagtcgaggtgtattgtttgtatggcgtgggactgcccacaccgcgtacatatatatacgaccacggatttccatacacagatcctgtaggcgtgctttacgaggacggagacgatacggtagccaccaggtcgactgagttatgtggtctctggcagggacgacagccccagcccgtgcatttgctcccgctgcatggtatccaacatttgaatatggtcttctccaacctgaccctggaacacattaatgcaatactgcttggagcatatcgccagggaccgccagcctccccaaccgcctcaccggagccaccccctcctgag

SEQ ID NO: 15358 - DNA, 1320 bp, synthetic construct
  misc_feature 1..1320: note = source = /note="Description of Artificial Sequence: Synthetic coding sequence"
  source 1..1320: mol_type = other DNA
atgggacctccaggtagcccttggcagtgggtgactctccttcttggactcctgcttcctcccgcagcaccattttggctgctgaatgtgctttttcctcctcataccactcctaaggcggaactgtctaaccatacccggccagtgattcttgtgccaggttgccttggcaaccagcttgaagcgaagctggataaaccggacgtcgttaattggatgtgctaccgtaaaactgaagatttctttaccatttggctggatttgaacatgtttttgccgctcggagtggactgttggattgataacacccgggtcgtgtacaaccgatcttccggtctggtgagcaatgcccctggagtccagattcgcgtgccaggattcggcaaaacttactcggtcgaatacctggattcctcaaagctggctggctaccttcatactctggtgcaaaatcttgtgaataacggatacgtgcgagatgagacggtcagggcagcgccttacgattggagactggaaccaggacagcaagaggaatactaccgcaaactggcaggacttgtggaagagatgcatgcagcctacggaaagcctgtgtttctcattggacattccctgggctgtctccatctgctgtactttctcctgaggcaaccgcaagcctggaaggatcggtttattgatggtttcattagcctgggggccccgtggggtggttcaatcaagcccatgctggtgctggcatccggtgataaccagggcattccaataatgtcgtccatcaaattgaaggaggaacagagaatcactaccacctcaccttggatgttcccttccaggatggcctggccggaagatcatgtgttcatcagcactccttcgtttaactatactggaagggactttcagcgtttctttgcggatctgcattttgaagaaggctggtacatgtggctccagagtagagatctccttgcagggctccccgcaccaggtgtggaagtgtactgcctctacggcgtcggactccctacgccacgcacctacatctacgatcatggattcccttacactgaccctgtgggcgtgctgtacgaggatggcgatgatactgtggcaaccaggtccaccgaactttgtggcctgtggcagggacggcagcctcaacctgtgcacctgctgccacttcacggaatccagcatctcaatatggtcttttcgaatcttactctggaacacataaatgcgatccttttgggtgcatacagacaaggaccacccgcaagccctactgccagcccagaaccacccccgcccgaa

SEQ ID NO: 15359 - DNA, 1320 bp, synthetic construct
  misc_feature 1..1320: note = source = /note="Description of Artificial Sequence: Synthetic coding sequence"
  source 1..1320: mol_type = other DNA
atgggaccaccaggatccccttggcaatgggtgaccctgctccttgggctgctgctgccgccagcggccccgttctggctgctgaatgtgctctttccaccgcacacgacccctaaggccgaattgtcgaaccatacccggccagtgattctggtgcccgggtgcctgggaaaccagctcgaggcaaagctcgacaaaccggacgtcgtcaactggatgtgctaccgcaagactgaggatttctttaccatttggctggatctgaacatgttcctgccactgggtgtcgactgttggatcgataacacgcgggtggtgtacaaccgctcgtcaggattggtgtcaaacgcaccaggagtgcagattcgagtgccgggttttggcaagacgtactcggtggaataccttgactccagcaaactggcgggatacctgcacactctggtgcagaatctcgtgaataacggttatgtgcgggatgaaactgtgagggccgcgccctacgactggcgcctggagccgggacagcaagaggagtactaccgcaaactggcaggactggttgaagaaatgcatgcggcctatggaaaacccgtattcctgatcggacactccctgggttgcctgcatctcctctacttccttctgcggcaaccgcaggcgtggaaggaccggttcattgacggattcatctccctgggcgccccgtggggaggatcaatcaagccgatgctcgtgctggcatccggtgacaaccagggaatcccgatcatgtcgagcatcaagctgaaggaggaacaacggatcactactacgtccccgtggatgttcccgagccgcatggcctggccggaggaccacgtgttcatctcaactccttcgttcaattacaccggacgcgactttcagcgcttttttgcagatctccactttgaagaaggttggtacatgtggctgcagagccgggacctcctggcaggattgccggctccgggagtggaggtgtactgcctgtacggcgtcggtttgccgacccctcggacctacatctacgatcacggcttcccgtacactgatccagtgggcgtcctctacgaggatggcgatgacaccgtggccactagatcaaccgagttgtgcggattgtggcagggacgccagccgcaacctgtccacctgctcccactccatggcatccaacacctgaacatggtgttctcaaacctgactctggagcacatcaacgccatcctcctgggagcctaccgccaaggaccaccggcttcgccgactgcatccccagaacccccgccaccagaa

SEQ ID NO: 15360 - DNA, 1320 bp, synthetic construct
  misc_feature 1..1320: note = source = /note="Description of Artificial Sequence: Synthetic coding sequence"
  source 1..1320: mol_type = other DNA
atgggtcccccaggatcaccctggcagtgggtcaccctgctgctcgggctgctgcttcctccggcggccccgttctggctgttgaacgtgctgttcccgccgcataccaccccgaaggcagagttgtccaaccacactcgcccggtgattctggtgccggggtgtctgggaaaccaactggaagcaaagctggacaagcctgacgtggtgaattggatgtgttaccgcaagaccgaagatttcttcactatctggctggacctgaacatgtttctccctctgggagtggactgctggatcgacaatacgagagtggtgtacaaccgctcgtcagggctggtgtcaaatgcgccgggcgtccagatccgcgtgccaggtttcgggaaaacctactccgtcgagtaccttgattcctccaagctggctggatatctgcacactcttgtgcagaatctggtcaacaacggatacgtgcgcgatgaaactgtccgagccgctccctacgactggcggctggaaccaggacagcaggaggaatactatcggaagctcgcaggactcgtcgaggaaatgcacgccgcgtacgggaaaccggttttcctgatcggacactcgctggggtgcttgcacctcctctacttcctgctgcggcaaccgcaagcctggaaggataggttcatcgacgggttcatctcgctgggagctccgtggggagggtcgatcaagcccatgctcgtgttggcatcgggagacaaccagggcatccccattatgtcatcaatcaaactgaaggaggaacagcggatcaccaccaccagcccgtggatgttcccgtcacgcatggcgtggccggaggaccacgtgttcatttcgacgccgagctttaactacaccgggcgagatttccaacggttcttcgcagacctccatttcgaagagggttggtacatgtggctccaatcacgggaccttctggcgggactgccggcgccaggagtggaagtgtactgcctgtacggtgtgggtttgccaactccacggacgtacatctacgatcacggtttcccatacaccgatccggtgggcgtgttgtacgaggatggagacgataccgtggcaaccaggtccactgaactgtgcggcctgtggcaaggccggcagcctcaaccggtgcacctcctccctctgcatgggatccagcacctgaacatggtgttctcgaacctgactctcgaacacatcaacgcgatcctcctcggagcctaccgccaaggaccaccggcctcacccaccgcctcaccggaaccgccgcctccggaa

SEQ ID NO: 15361 - DNA, 1320 bp, synthetic construct
  misc_feature 1..1320: note = source = /note="Description of Artificial Sequence: Synthetic coding sequence"
  source 1..1320: mol_type = other DNA
atgggacctccaggatctccctggcagtgggtgactctgctccttggtctgctcctgccgccagcagcccctttctggttgctgaatgttttgtttccaccgcacacgaccccgaaagccgagctcagcaaccacactagaccagtgattctggtgccgggctgtcttggaaaccagttggaggccaaactcgacaaacctgatgtggtgaactggatgtgctacagaaaaaccgaggatttctttaccatttggctcgacctgaacatgttcctgcctctcggggtggactgctggattgataatactcgcgtggtgtacaatcggtcatcaggccttgtcagcaacgcgccgggagtccagatccgggtgccagggttcgggaaaacgtactcagtcgaatacctcgattccagcaaattggcaggctacctccacactctggtgcagaatctggtgaacaacggttacgtgcgggacgaaaccgtgcgcgcagctccatacgactggaggctggagcccggccagcaagaggagtactacagaaagttggctggactggtggaagaaatgcatgctgcttacggaaagccggtgtttctgatcggtcactcgttgggctgcttgcatctcctttactttctgctccggcaaccgcaagcgtggaaggatcggttcatcgacggctttatctcccttggcgccccatggggaggtagcattaagcctatgctggtgttggcgtccggagacaatcaggggatcccaattatgtcgtcgatcaagctgaaggaagagcagcgcatcaccactaccagcccgtggatgttcccgagccgcatggcctggcctgaagatcacgtctttatctcgaccccttcattcaactacaccggtcgggacttccaaaggttcttcgctgacctgcatttcgaggagggttggtacatgtggcttcagtcgcgggacctgttggccgggttgccagccccgggtgttgaagtgtactgcttgtatggtgtcggattgcccacgccgcgtacctatatctacgaccatggtttcccgtacactgatcccgtcggcgtgctgtacgaggatggcgacgacactgtggcaaccaggtccactgagttgtgcggactctggcagggccggcaaccacagcctgtccatcttctcccactccacggcatccagcatctgaatatggtgtttagcaacctgaccctggaacatatcaacgccatcctcctgggagcctacagacaaggcccgcctgcatcgccgactgcttccccggagccgccgccgccggaa

SEQ ID NO: 15362 - DNA, 1320 bp, synthetic construct
  misc_feature 1..1320: note = source = /note="Description of Artificial Sequence: Synthetic coding sequence"
  source 1..1320: mol_type = other DNA
atggggcctcccggaagtccgtggcagtgggtgacgctactgctggggctcttactgccaccggctgcaccattctggctcttgaatgtgctcttcccaccacataccacgcccaaagcagagctttctaatcatactaggcctgtgattcttgtgcccggctgcctgggaaaccagctggaagcgaaactggacaagcccgacgtggtgaattggatgtgctataggaaaactgaagactttttcaccatatggctggacttaaatatgtttctgcccttgggcgtggactgttggattgataacacaagagtggtgtacaatcgcagctccggactggtgagcaatgcccctggtgttcaaatccgcgtgcctggattcggaaagacatactccgtggaatatctggactcatcaaagcttgctgggtatctgcacactctcgtgcagaacttggttaacaatggctatgtgcgagacgagacagtgagagctgcaccttacgattggcgcctcgagccgggccagcaagaagaatactatcgcaagttagccggtttggtagaggagatgcacgccgcatatggaaagccagtgtttctgatcggacactctctaggttgcctgcatctcctgtactttctcctgcgccagccccaggcttggaaggaccgctttattgatggctttatctcactaggcgccccatggggagggtcaatcaagccaatgctggtcctggccagtggggacaatcagggtataccaatcatgagctcgattaagcttaaagaggagcagaggataactacaacatctccatggatgttcccctctcggatggcttggccagaagaccacgtgttcatcagcactccttccttcaattacaccggacgggatttccagcgtttctttgccgatcttcacttcgaggagggctggtacatgtggcttcagtctcgtgatctgctggccggcctgccggcaccaggagtagaggtttattgcctgtatggcgtcggccttcccacacccaggacctatatctacgatcatggctttccatatacagatcccgtgggcgtcctgtacgaagacggggacgatacagttgccacacggtctaccgaactttgcggcctgtggcagggaaggcagcctcagcctgtacatttgttgcccttgcacgggatccagcatctcaatatggtgttcagtaacctaacgctagagcatatcaacgccatcctccttggcgcataccggcaggggcctcctgcatcacccaccgctagcccagaaccccctccgccagaa

SEQ ID NO: 15363 - DNA, 1320 bp, synthetic construct
  misc_feature 1..1320: note = source = /note="Description of Artificial Sequence: Synthetic coding sequence"
  source 1..1320: mol_type = other DNA
atgggacctccaggctccccctggcagtgggtaacactgctgttgggccttctcctgccacccgctgctcctttctggctacttaacgtattattccccccccacacaaccccaaaagccgagctttctaaccacactaggcctgttatccttgtccccggctgtcttgggaatcagctggaggccaagctcgataagcctgatgtcgtcaactggatgtgctatcgtaaaactgaagacttttttacaatctggctggacctgaacatgttcctccctttgggcgtggattgctggattgacaacacgcgcgtagtatataaccgcagctcaggtcttgtttcaaatgctccgggggtccagatccgcgttccgggcttcggcaagacatatagcgtggaatatttggactcctctaaactggccggctacctgcataccctggtccagaacctcgtgaataatggttacgtgcgagacgagaccgtgcgggccgcgccgtatgattggaggctggagcctggacagcaggaggagtattatcggaagctggccggtctggtggaggagatgcatgcggcttatggaaagcccgtcttcttaattggacatagtctgggctgtttgcatttgctatattttctattgcgtcagccccaggcctggaaagaccgctttattgatggcttcatctctcttggcgcaccttggggcgggtccattaaacccatgctcgtgctggcctcaggggataaccaggggataccaattatgagcagcattaaactgaaggaggagcagcgcatcaccacgacctctccatggatgtttccatctaggatggcatggccggaagaccatgtcttcattagcacgccttccttcaactataccggaagagacttccagaggttttttgccgatctgcatttcgaagagggttggtatatgtggctgcagagtagggacctgctggcggggctcccagctcccggagttgaagtctactgcttgtacggggtggggctacccacgcctagaacgtatatctacgatcacgggttcccatacaccgaccccgtcggtgtgctctacgaggacggcgatgacacagtggcaacccgatccaccgagttgtgcgggctgtggcagggtagacagcctcagccggtacatctcctgcccctacatgggatccagcacctcaatatggtgttcagtaacctgacacttgaacatatcaacgcaatcctgttgggagcctaccggcaggggccgcccgcaagtccaaccgcatcgccagagccaccaccccctgaa

SEQ ID NO: 15364 - DNA, 1320 bp, synthetic construct
  misc_feature 1..1320: note = source = /note="Description of Artificial Sequence: Synthetic coding sequence"
  source 1..1320: mol_type = other DNA
atgggaccccctgggtccccttggcaatgggtcaccctccttctgggactcctccttcctcctgcagccccattttggcttctcaacgtgctgttccctccgcataccactccaaaagcagaacttagtaaccatactaggccggtgatcttggtgccagggtgtctgggcaaccagcttgaagccaagttggacaaaccagatgtggtcaactggatgtgttacaggaaaacggaggatttctttaccatttggctggatctgaacatgtttctgccgctgggagtggattgctggattgataatacgagagtcgtctacaaccgttcatcagggctggtgtccaatgcgcctggagtgcagatccgggttcctggctttggtaaaacctactccgtcgaatatctggattcttcaaaactggcagggtaccttcatactctggtgcaaaacctggtcaataacgggtacgtgcgcgacgagactgtccgtgcagcaccttacgattggcgcctcgaaccaggccagcaagaagaatactatcgtaagctggcaggccttgtggaagaaatgcatgccgcttatggcaagcccgtgtttctcatcggccatagccttggatgtctgcatctcttgtactttttgctcagacagcctcaggcctggaaggatcgattcattgatggtttcatcagcctcggggcgccttggggaggctcgattaagccaatgcttgtgctggcatccggggataatcagggcattcctattatgtcgtcgattaagctgaaagaagagcaacggattactacgacttccccctggatgtttccttcgagaatggcgtggcctgaagatcatgttttcattagcaccccctccttcaattacactggacgggattttcaaaggttctttgcagatttgcactttgaagaaggatggtacatgtggctccaatcgcgtgaccttctggcagggcttcctgcccctggagtggaagtgtactgcctgtacggagtgggactgcctactcctagaacttacatttatgaccatggattcccgtacaccgatcccgtcggagtgctgtacgaggatggtgatgacacggtggcaacccgatcaactgagctctgcggactctggcaaggtcggcagccacagcctgtgcatcttcttcctctccatgggattcaacacttgaatatggtgttttccaacctgactcttgagcacattaacgcaatacttctcggagcatatagacagggacccccagcatcccctaccgccagcccggagcctccacccccagag

SEQ ID NO: 15365 - DNA, 1320 bp, synthetic construct
  misc_feature 1..1320: note = source = /note="Description of Artificial Sequence: Synthetic coding sequence"
  source 1..1320: mol_type = other DNA
atgggcccaccaggctccccctggcaatgggtgactttgctcctgggactgctcctgccgcccgcggcgcctttctggctgctcaacgtgctgttcccaccgcacaccactccaaaggccgagctctccaatcatacccgacctgtcatcctggtgcctggctgtctgggaaatcagctcgaagcgaaactggataaacctgatgtggtgaactggatgtgctaccgcaagactgaggactttttcacgatctggctcgatctcaatatgtttttgccgctcggagtcgactgctggatagacaatacgcgcgtggtgtacaacagaagcagcgggctcgtctcgaacgcacccggagtgcaaatcagagtgccggggtttggcaaaacctactcagtggaatacctggatagctcgaagctcgctggctacctgcacaccctggtgcaaaatctggtgaacaacggatacgtgagggacgaaacggtgcgggcggccccatacgactggcgcctggagcccggacagcaggaggagtattatcgcaaattggccggactggtggaagaaatgcacgcagcctacggcaaaccagtttttctgatcgggcactccttggggtgcttgcatttgctgtactttctgctccgtcaaccccaggcctggaaggataggttcattgatggattcatctccctcggagcaccttggggaggtagcatcaagccgatgctggtgttggcctcaggtgataaccagggcatcccaatcatgtcgtccatcaagctgaaagaggagcagcggatcactactacctccccgtggatgttcccatcccgcatggcctggcctgaggaccacgttttcatctcgaccccgtcatttaactacaccgggcgtgattttcagcggttctttgctgatctccattttgaagaaggatggtacatgtggctgcagtcccgagatcttctcgctggacttcccgcgccgggggtggaggtctactgcctgtacggtgtgggcctcccaactccgcggacctacatttacgaccacggattcccgtacaccgacccggttggcgtgctgtacgaagatggtgacgacactgtggcgacccggtctaccgagctctgtggcctgtggcagggccgccagccccagccggtgcacctgttgccgcttcacggaatccagcacctgaatatggtgttctcaaacctcactctcgagcacatcaatgctattctgctgggtgcatacaggcaggggccgccggcctccccgaccgcttccccggagccgccacctccagaa

SEQ ID NO: 15366 - DNA, 1320 bp, synthetic construct
  misc_feature 1..1320: note = source = /note="Description of Artificial Sequence: Synthetic coding sequence"
  source 1..1320: mol_type = other DNA
atgggtcccccaggctccccctggcagtgggttaccctgctccttggattgttgctcccacccgctgctcccttttggcttctgaacgtgctgttcccacctcacaccaccccaaaggccgagcttagcaaccacaccagaccagtgatccttgtacccggctgcctgggcaaccagttggaggccaagctggacaagcccgatgttgttaattggatgtgctatagaaaaacagaagatttctttactatctggttggacctgaacatgtttcttcccctgggagttgactgttggattgataacacacgtgtggtctacaacaggtcttccggacttgtcagtaacgctcccggtgtccaaattagagtgcccggatttggtaaaacctattctgttgagtacctggattcttctaagctggccggctatttgcacactttggtgcagaacctggtgaacaatggctatgtaagagacgagaccgtccgcgcagctccttacgattggagactcgagcccggtcaacaagaggagtactaccgtaaattggctggtttggtcgaggagatgcatgccgcttatggaaaacccgtctttctgatcggccattctctcggttgtctccaccttttgtattttctgcttaggcaaccccaggcttggaaggaccgtttcatcgatggcttcataagtttgggtgccccctggggtggatctatcaagccaatgctcgtcctcgcatctggagacaaccaaggcatccctattatgtcctccattaagctcaaggaggagcaaagaatcaccaccacctcaccttggatgttcccatcacgcatggcctggcctgaggaccatgtattcatctccacaccatcctttaactacaccggtagggatttccagaggtttttcgcagacctgcacttcgaagaaggttggtacatgtggttgcaatcacgcgacctgctcgcaggccttcccgccccaggtgtggaagtttattgcctttatggcgtcggcctgcctacaccccgtacttacatctatgatcatggctttccctacaccgaccccgtcggcgtcctctatgaagatggtgacgatacagtcgctactagatccactgaactctgtggcctctggcagggaaggcagcctcaacctgtccacttgctcccattgcacggtatccaacacctcaacatggtcttctctaacctgaccctggaacacataaatgcaattcttctgggtgcttataggcagggccctcctgcttctcctaccgcttctcctgagcctcctcccccagaa

SEQ ID NO: 15367 - DNA, 1320 bp, synthetic construct
  misc_feature 1..1320: note = source = /note="Description of Artificial Sequence: Synthetic coding sequence"
  source 1..1320: mol_type = other DNA
atgggtcctccaggatccccctggcaatgggttacattgttgctcggcttgctgctgccccctgccgccccgttctggctgttaaacgtcctgttccctcctcacacgacccccaaagctgaattaagtaaccacacccgacctgtgatcttggtgcctggatgtctcgggaatcagctcgaggcaaaactcgacaagcccgacgtagtgaattggatgtgttaccggaaaaccgaagacttttttacaatctggctggacttaaacatgtttctgcctctgggcgtggattgttggatagacaacacgagggtggtctacaacaggtccagcggtctggtgtcaaatgccccgggcgtccagattcgtgtccccggattcgggaagacatacagcgttgagtacctggacagtagcaagttggctggatacctccacacactggttcagaacctagtgaataatggatacgtgcgggatgaaacagtacgcgccgccccttacgactggagactagagccagggcagcaagaagagtactaccggaagctagccggcctggtggaagagatgcacgctgcgtacgggaaacccgtcttccttataggccactcgctaggctgcctccacctgctatatttcctactcaggcagccacaggcatggaaagacaggttcattgacggcttcatctcactgggcgccccatggggtggctcgatcaagccgatgctggtgctggcctccggagataaccaaggcataccaataatgagcagtatcaagctgaaggaggagcagcggattactacaacaagcccgtggatgttcccaagcagaatggcatggcctgaggaccatgtgtttatctctaccccatcttttaactacaccgggagggactttcagcgcttctttgccgacttacacttcgaggaaggatggtacatgtggctgcagagcagggatctgctcgccgggttacctgctcctggtgtagaagtgtattgcctttacggcgtcgggctgcctactccaaggacctacatttatgaccacggatttccctacaccgatcctgttggcgttctgtacgaagacggcgatgatacggtggccacccgatccaccgagctgtgcggactgtggcaggggagacaaccacaacctgtccacttactgcctcttcacggtatacagcaccttaacatggtcttctcgaacttaacactggaacacattaacgccattctcctgggagcctataggcagggtcctccagcctcgcccactgcctcgcccgagccacctccgcccgaa

SEQ ID NO: 15368 - DNA, 1320 bp, synthetic construct
  misc_feature 1..1320: note = source = /note="Description of Artificial Sequence: Synthetic coding sequence"
  source 1..1320: mol_type = other DNA
atgggcccccccggatccccctggcagtgggtcactctcctcctcggtcttctgctccccccggccgccccgttttggctactcaatgtcttgttccccccccacacaacacctaaagcagagctgagtaaccacactaggcctgtgattctggtgccaggctgtttagggaaccaactcgaagccaagttggacaagcccgatgttgtgaattggatgtgttatagaaagactgaggacttcttcactatctggctggacctgaatatgtttctccccctcggagtagattgctggatcgataacacaagggtggtgtacaatcgaagctccggtttggtatccaatgctcctggggtgcaaatccgcgtgccgggtttcggcaagacctattcggtggagtatctggactcgtcgaagctggccgggtatttacatacactggtccagaatctggtcaataacggctacgtacgagatgagactgtgagggctgcaccctatgattggcgccttgaacccgggcagcaggaagagtattataggaaattggccggcctggtggaggagatgcacgcggcatacggtaagcccgtgttcttaatcgggcatagcctgggatgcctacatttgctttactttctgctgcgacagccacaagcctggaaggatcgattcatcgacggatttatctctctgggcgcgccttggggcggctcgatcaagcccatgctcgtgttggcttcaggagataatcaggggattcctatcatgagctccataaagctcaaggaggaacagaggataaccaccaccagcccttggatgtttccgtccagaatggcttggccagaggaccatgtgttcatttcgacaccatcctttaactacaccggacgtgactttcagcgattctttgcagacctccactttgaggagggttggtacatgtggcttcagtctagggacctcctggctggcctcccagcacctggagtagaggtgtattgtttgtatggagtgggactgccaacacctcgaacctacatctatgaccacggttttccgtacacggatcccgttggcgtcctgtacgaagatggcgatgatactgtggccaccaggtcaaccgaactgtgtggactgtggcagggacgccagcctcagcccgtccaccttttaccactgcacggaattcaacacctgaatatggtgttcagcaatctgaccctggagcacatcaatgctatcctccttggcgcctacaggcagggccctccagccagccccacagcctcccccgagccacctcccccagaa

SEQ ID NO: 15369 - DNA, 1320 bp, synthetic construct
  misc_feature 1..1320: note = source = /note="Description of Artificial Sequence: Synthetic coding sequence"
  source 1..1320: mol_type = other DNA
atgggaccccccggaagtccatggcaatgggtgactttactgttaggcctgttgttgcctccagccgcccccttctggctgctcaatgtgctgtttccccctcatactacaccgaaagccgaactcagtaatcacactcgaccagttatccttgtgccaggctgcctaggcaatcagttagaagctaagctggataaacctgacgtggtaaactggatgtgctataggaaaactgaagatttctttaccatttggctcgacttaaatatgtttctcccactgggcgtggattgttggatcgacaacacacgagtggtatataacagatcatctggacttgtctccaatgcacccggggtccagatcagagtgcccggatttggcaagacatattccgtggaatacctggactctagcaaactcgccgggtacctgcacactcttgtgcagaacctggtaaacaatggctacgttcgagatgaaaccgtgcgagctgcaccctacgattggaggttagagccggggcagcaggaagagtattacaggaagttggcggggctggtggaggagatgcacgccgcctacgggaagcctgtctttctcattgggcattcactcggatgcctgcatttgctctatttccttcttcgtcagcctcaggcttggaaggacagatttatcgatggttttatctctcttggtgcaccatggggaggctccatcaaaccaatgctggtgctggcaagtggcgacaatcaagggatccctatcatgtcctcaattaagctcaaagaggaacagcgcatcacaaccacctccccctggatgttcccgtcccgaatggcatggcctgaggaccatgtgtttatctccactcctagctttaactacaccggccgtgatttccagcgattcttcgccgacctgcactttgaagagggatggtacatgtggctgcagtccagggacctgctggcaggactgcccgctcctggggttgaagtgtattgcctttatggggtggggctgcctaccccaaggacctacatatacgatcatggcttcccgtatactgatcccgtaggagtgttgtacgaggatggtgacgatactgtggctacccgcagcaccgaattgtgcggactgtggcagggcaggcaaccacagccggttcacttactcccccttcacgggatccaacacctgaacatggtgttcagtaatcttacattagaacacatcaatgccattctgttgggtgcttaccgccaaggcccacctgctagtccaacagcctcacccgagccacccccgcctgaa

SEQ ID NO: 15370 - DNA, 1320 bp, synthetic construct
  misc_feature 1..1320: note = source = /note="Description of Artificial Sequence: Synthetic coding sequence"
  source 1..1320: mol_type = other DNA
atgggacctcctggatccccgtggcagtgggtgacccttctgttggggctgctccttccaccggcagcgccgttttggttgctgaacgtgcttttccctcctcataccacgcccaaggccgagctgtcgaaccatactcgccccgtcatacttgtgcctggctgtttgggtaatcaattggaggcaaagctggacaagccagatgtggtgaattggatgtgctaccgtaagaccgaagatttctttacgatttggcttgacctgaatatgttcctgccccttggagtcgactgttggatcgataacaccagggtggtttacaatcgctcgtcgggtctggtatccaacgcccccggtgtgcaaatacgcgtcccaggttttggcaagacctactcggtagaatatctggattcatcgaaactcgcaggatatctgcacacccttgtccagaacctggtgaacaatggttacgttcgcgatgaaaccgtgcgggctgcaccatacgattggcggcttgaaccaggccagcaggaggaatactacagaaaactcgcaggtcttgtcgaagaaatgcatgcagcttacggcaagcccgtatttcttattggccactccctgggttgtttgcatctcctgtactttctgctcagacagcctcaggcttggaaagataggtttatcgatggcttcatttcactcggcgccccttggggaggatctatcaagcccatgctcgtgttggcatctggagacaaccagggtattccgattatgtcctcaatcaaattgaaggaggagcaaagaatcactactactagcccatggatgttccccagcagaatggcatggcctgaggaccacgtgttcatttcgaccccatcatttaactacaccgggcgggacttccaaaggttttttgccgaccttcattttgaagaaggttggtacatgtggcttcaatcgcgggaccttcttgcgggactcccagcacctggcgttgaagtgtattgtctgtacggagtgggacttccaactcctaggacttacatctacgatcatggtttcccctacactgatcctgtgggggtgctctacgaggatggggatgacactgtcgcaacccgttcgaccgaactttgcgggctctggcaaggaaggcaacctcagcctgtgcacctcctgccgcttcatgggatacaacatctgaatatggtgttttcgaaccttactctcgaacacattaacgcgatactcttgggagcgtaccgccaaggacctcctgcttctccaaccgcgtccccagaacctcctcctccggaa

SEQ ID NO: 15371 - DNA, 1320 bp, synthetic construct; identical to SEQ ID NO: 15356
  misc_feature 1..1320: note = source = /note="Description of Artificial Sequence: Synthetic coding sequence"
  source 1..1320: mol_type = other DNA

SEQ ID NO: 15372 - DNA, 1320 bp, synthetic construct
  misc_feature 1..1320: note = source = /note="Description of Artificial Sequence: Synthetic coding sequence"
  source 1..1320: mol_type = other DNA
atgggcccacccggttctccttggcaatgggtgactctgctgcttgggctacttctcccaccggcagctccattctggctcctcaacgtgttgtttccccctcacacgactccaaaggccgaactgtccaaccatactcgacctgtgattttagtgcccggatgccttgggaaccagctggaggcaaaattagataagcccgatgtcgtcaactggatgtgttaccgaaagactgaggatttttttaccatatggcttgacctgaatatgtttttgcctcttggagttgattgttggatcgataatactagagtggtgtacaatagaagttcgggcctggtatctaacgccccaggtgtacaaattagggtgcccggttttggtaagacctacagtgtggagtacctggatagcagtaagcttgccggctacctgcacactctcgtgcagaacctcgtaaacaacgggtatgtgagagatgagacagtgcgggcggccccctatgactggcgcttggaacccggccagcaggaggagtattatagaaagttggcagggcttgtggaggagatgcatgctgcatacgggaagcccgtgtttctaatcgggcactccctcggttgcttgcatcttctgtattttctcttgaggcagccccaagcctggaaggaccggttcatcgatgggtttatctccttaggggcaccctggggcggctctattaagcccatgttagtgctagcctcaggtgacaatcagggtatcccgattatgtcttcaatcaagctgaaagaggagcagaggatcaccacgacatccccttggatgttcccctccagaatggcttggcctgaggaccacgtttttatatccactccatcgttcaactatactggccgggacttccagagattcttcgcagacttacacttcgaggaaggctggtacatgtggctgcagagtagagacttgctcgccgggctgccggcccctggcgtcgaggtgtattgcctgtacggggtgggactgcccacaccacggacctacatctatgaccatggtttcccttataccgaccccgtgggcgtgctttatgaggatggtgatgacacagtggcaacaaggagtacggaactgtgcggactatggcaaggcaggcagccgcaaccggtccatcttcttcctctgcatgggatacagcatctgaatatggtgttttctaatctgactcttgagcatataaacgcaatcttactcggagcctaccggcaggggcctccggccagccccaccgcaagtccagaacctcctccacctgag

SEQ ID NO: 15373 - DNA, 1320 bp, synthetic construct
  misc_feature 1..1320: note = source = /note="Description of Artificial Sequence: Synthetic coding sequence"
  source 1..1320: mol_type = other DNA
atgggcccgccaggaagcccgtggcaatgggtcaccctgctcctcggactcttgctcccgccagccgccccgttttggctgctcaacgtgttgttcccgccgcacaccacccctaaggcagaattgtccaaccacaccaggccggtgattttggtcccgggctgcctgggcaatcagcttgaagccaaacttgacaagccagatgtcgtgaattggatgtgttatagaaagacggaagatttcttcaccatctggttggacctgaacatgttcctgcctttgggcgtggactgctggatcgacaataccagagtcgtctacaaccggtcgtccggtctggtcagcaatgcaccgggagtgcagatacgggtgccaggattcggaaagacttacagcgtcgagtacctcgactcatcgaagctggcgggttaccttcacactttggttcaaaacctggtcaataacggatacgtcagagacgaaaccgtgcgggccgcaccctacgattggcggctggagccgggccagcaggaagaatactaccgcaaactggcgggtctggtcgaagaaatgcacgcggcttacggcaagccagtgtttcttatcggccactcgctcggatgcctgcacctgctgtacttcctgctgcgccagccacaagcgtggaaggaccggttcatcgatggattcatctcactcggagccccgtggggaggctcgatcaagccgatgcttgtcctggcctccggtgataaccagggaattcctattatgtcatctattaagctgaaagaagaacaaagaattaccactacctccccctggatgtttccctcgaggatggcgtggccggaggaccacgtgtttatcagcactccatcattcaattacactggacgggatttccagaggttcttcgccgatctgcattttgaagaaggctggtacatgtggctccagtcgcgcgatctgttggctggtttgccggccccgggggtggaagtgtactgcctttacggggtcggtttgcccaccccgagaacttacatctatgaccacgggttcccgtatactgaccccgtgggagtgctgtatgaggatggagacgataccgtggcgacccgatccacggagctctgcggcctgtggcaagggagacaaccacaaccagtgcatctgctgcccctgcacggaatccagcaccttaacatggtcttttcaaatcttactctggaacatatcaacgccatcctcttgggagcataccgccagggaccgccggcctcgcctaccgcttccccggagcctccacccccggaa

SEQ ID NO: 15374 - DNA, 1320 bp, synthetic construct
  misc_feature 1..1320: note = source = /note="Description of Artificial Sequence: Synthetic coding sequence"
  source 1..1320: mol_type = other DNA
atgggtcctccaggatccccctggcagtgggtgactcttctgctgggcctgctactgcctcccgcggcccccttctggctattgaacgtgctcttccctccacacacaaccccaaaggccgagctgtcgaatcatactagacccgtcatcctggtgccgggctgtctcggaaaccagttggaggccaagctagataagccggacgtagtgaactggatgtgttacagaaagacggaggacttcttcaccatctggctcgatttgaacatgttcctgccgctgggcgtggattgctggatcgacaatacacgagtcgtctacaatcgcagcagtggccttgttagcaacgcccccggtgtgcaaatacgtgttcccgggtttggcaaaacctacagtgtcgagtacctagacagtagcaagctcgccggctacctacataccctcgtgcaaaatctagtgaataacgggtacgtccgagacgaaacagtacgcgctgctccctacgattggcggttggaaccgggccagcaggaagagtattaccgtaagctggccggcctggtcgaggagatgcacgccgcctacggtaagcccgttttcttaattggtcactccctcggatgcctccaccttctttatttcctgttgcgccagccgcaggcttggaaggataggtttatcgacggctttatcagcctcggtgccccctggggaggaagtatcaagccaatgctggtcctggccagcggggataaccaaggaataccaatcatgtcctcaataaagctaaaggaggagcagcgaattaccaccacgtccccctggatgttcccctcacggatggcttggccagaggaccacgtgtttatatcgactcccagttttaattacacgggacgagactttcagcgattcttcgccgatttgcacttcgaggaaggctggtacatgtggctgcagtcccgggacctcctggctggcttgcccgcacctggcgtggaggtctactgtctgtacggtgtgggcttgcctactccgcgcacctacatctatgaccatggctttccttatacggacccggttggagtgctgtatgaggatggcgatgatacggtagccacacgcagcacagagctgtgcgggctgtggcaaggtcgccagccccagcccgtgcacctactgcccctgcatgggatccagcacctgaacatggttttcagcaacctgacgctcgagcacatcaacgctattttgcttggagcctaccgacagggtccgccggctagtcccaccgcgtccccggagcctcctccccctgaa

SEQ ID NO: 15375 - DNA, 1320 bp, synthetic construct
  misc_feature 1..1320: note = source = /note="Description of Artificial Sequence: Synthetic coding sequence"
  source 1..1320: mol_type = other DNA
atggggccccccggctcaccctggcaatgggttaccttgctcctcgggttgctgctgcctccagccgccccgttctggctgcttaacgtgctcttcccaccgcacaccacacccaaggctgagctgtcaaatcatacaaggcccgtgatcttggttcctggctgcctgggcaatcagcttgaagccaagctcgacaaaccggatgttgttaactggatgtgctacagaaaaactgaggattttttcacaatttggctggacttgaatatgtttctgcctcttggtgttgactgttggattgataacacaagagtcgtgtacaaccggagttcaggactggtgtcaaacgccccaggtgtgcagatcagggtgccgggtttcggtaaaacctattcagtggaatatctggacagctcaaagctcgccggatatctacacacactggttcaaaacttggtgaacaatggctatgtacgagatgagaccgtgagagcagccccatacgactggaggttggagcctggacagcaggaagagtactacagaaagctcgccggactggtggaggaaatgcacgctgcctacggcaaacccgtcttcctcatcggacattcattaggctgccttcatctcttatattttctgctgcgccaaccccaggcctggaaagatcgcttcattgacggcttcatttccctgggggctccttggggaggctctataaagcctatgcttgttctggcttctggagataatcaaggaatccctatcatgagctctatcaaactaaaggaggaacagagaatcaccacaacgagcccatggatgtttccttctcgcatggcgtggcccgaggaccacgtgtttatctcaactccttcgttcaactatacaggacgggactttcaacgattttttgccgaccttcacttcgaggaggggtggtatatgtggctgcagtcgcgagacttgttggctgggctgcctgcccctggagtggaagtttactgcctgtatggcgtggggcttcctactccaagaacttatatctatgatcatgggttcccatacacagacccagttggtgtgctctatgaggacggtgacgacactgtggcgaccagatccaccgaactctgcgggctatggcaaggcaggcagccccagcctgtccacctgctgccactgcacggcatccagcacctgaatatggttttcagtaacctgacactagagcacatcaacgctattctactgggcgcgtacagacagggccccccagcaagccctaccgcttctccagagcctcctccccctgaa

SEQ ID NO: 15376 - DNA, 1320 bp, synthetic construct
  misc_feature 1..1320: note = source = /note="Description of Artificial Sequence: Synthetic coding sequence"
  source 1..1320: mol_type = other DNA
atgggaccacctgggtcgccttggcaatgggttactctcctgctgggtctgttgcttccgccagcagctccgttctggcttctgaacgtgctgttccctccgcataccaccccaaaggcggaactctccaaccacacgcgaccggtcattcttgtgccggggtgtctcggtaaccagcttgaagcaaagctcgataaacctgatgtggtcaactggatgtgttatcgcaagactgaggactttttcaccatatggctcgacctgaatatgttcttgccccttggagtggactgctggatcgataacacccgtgtggtctacaaccgatcgtccggccttgtctcaaatgcaccaggggtgcagatcagggtccctgggtttggaaaaacttactcggtagagtaccttgactcaagcaagttggcaggctacctccacacccttgtgcagaatcttgtgaacaacggatacgtgcgggacgaaaccgtgcgagcagctccctacgattggagacttgaaccaggacagcaagaggaatactacagaaaacttgcgggactggtggaggagatgcacgcagcatacggaaagcctgtgttcctgattggccattcccttggttgccttcatctcttgtactttcttcttcggcaaccacaagcgtggaaggatcgattcattgacggcttcatttccctcggagccccttggggaggatcgatcaaaccaatgcttgtgctcgcatccggtgataaccaaggtattcccataatgtcgtcaattaagctcaaggaggaacagagaatcaccacgacctcaccatggatgttcccctccaggatggcgtggcccgaagatcacgtctttatctctactcctagctttaactatactggtagagatttccaacgctttttcgcagaccttcactttgaggagggctggtacatgtggctgcagtccagagatttgctcgcgggactccctgcacctggcgtggaggtgtactgtctctacggcgtcgggcttccaactcctaggacttatatctatgatcacggctttccgtacactgaccctgtgggtgtcctgtatgaagatggtgatgacactgtggcgacccgttcgaccgaactgtgtggactgtggcaaggacgccaacctcaaccagtgcacctgcttcccctccatggcattcaacacctcaatatggtgttctccaatctgacccttgagcatatcaacgcaatcctcctcggagcatacagacaaggtcctccggcgtcgccaactgcaagccccgaaccacctcctccagaa

SEQ ID NO: 15377 - DNA, 1320 bp, synthetic construct
  misc_feature 1..1320: note = source = /note="Description of Artificial Sequence: Synthetic coding sequence"
  source 1..1320: mol_type = other DNA
atgggacctcctgggagcccgtggcagtgggtgacgctgctgctcggactgctccttccgccggctgctcccttctggctgcttaacgtgctgttccctccccacactaccccaaaggcagagctgtcgaatcacacccggcctgtcatacttgtgccgggttgcctgggcaaccagttggaagccaagctcgataagcctgatgtcgtgaattggatgtgctacagaaaaactgaggacttctttaccatctggcttgatttgaatatgtttctgccattgggagtggactgctggattgacaacacccgtgtggtgtataatcgctcttccgggctcgtgagcaacgcccccggcgtccagatcagggtaccgggattcggcaagacctactccgttgaatacctggactcctcgaagctcgcaggctacctgcatacgctggtccagaatctggtcaataatggctacgtccgcgacgaaaccgtcagggcggctccttacgattggcgcctcgaacccgggcagcaagaagaatactatcggaagctggcggggcttgtggaggaaatgcatgcggcctacggtaagccggtattcctgattggccactcgcttggatgtctccacctcctgtactttctccttcgtcagcctcaggcctggaaagaccgcttcatcgacggatttatctcactgggagccccatggggaggaagcatcaagccaatgttggtcctggcgagtggcgacaaccaaggaatcccaattatgagctcaatcaaactcaaggaagaacagagaatcaccacgactagcccctggatgttcccgagccggatggcatggccggaggatcacgtgttcatctcaaccccgtcgttcaactacactgggcgggacttccagcggtttttcgctgacctgcattttgaagaggggtggtacatgtggcttcaatcacgcgacctgctggccggccttccggcgcctggcgtggaagtctactgcctgtacggcgtgggactgccgactcctcgcacctacatttacgatcacggcttcccgtatactgaccctgtgggtgtgctctacgaggacggggatgataccgtggctacccgatcgaccgagctgtgtggactttggcagggacgccagccgcagccggtgcatctcctgccgctgcacggaatccaacatctgaacatggtgttcagcaacttgactctggagcacatcaacgcgatcctcctcggagcgtacagacaagggccccccgcctcaccaactgcctccccagaacccccgccgccggag

SEQ ID NO: 15378 - DNA, 1320 bp, synthetic construct
  misc_feature 1..1320: note = source = /note="Description of Artificial Sequence: Synthetic coding sequence"
  source 1..1320: mol_type = other DNA
atgggaccgccagggtccccttggcaatgggtcactctgctcctcggactgctgctcccgccagctgccccgttttggctcttgaacgtcttgttcccgccgcataccaccccaaaggcggagttgtcgaatcatactcggcctgtgatcctcgtgccgggatgtctgggaaaccaactcgaggcaaaactggataagccagacgtcgtgaactggatgtgctataggaaaactgaagatttcttcacgatctggctggatctcaatatgtttctgccgctgggagttgattgctggatcgacaatacccgcgtcgtgtacaaccggtcctccggcttggtgtcgaacgcgcctggcgtgcagatcagagtgccggggtttggaaagacttacagcgtcgaatacctggattcaagcaagctggcgggctacctgcacaccctggtccagaaccttgtgaacaacggatacgtgcgcgatgagactgtcagggccgcgccgtacgattggagattggagccgggtcagcaggaagaatactaccgcaaactggcagggctcgtggaagagatgcacgctgcatacggcaagcccgtgtttctgatcggccatagccttggatgccttcacctcctgtactttctgctgcgccaacctcaggcgtggaaggaccggttcatcgacggattcatctcacttggcgcaccctggggcggcagcatcaagcccatgcttgtgctggcgtccggggacaatcagggaatccctatcatgtcctcgattaaactcaaggaagaacagagaatcaccaccacctccccctggatgttcccaagcagaatggcatggccggaagatcatgtgttcatatcaactccttcctttaactacactggaagagatttccagagatttttcgcggatctgcacttcgaggaaggatggtacatgtggcttcaatcaagggacctcctggcgggactcccggccccgggagtggaagtgtactgcctttacggcgtcggcctccccaccccgcggacctacatctatgaccatggatttccgtacactgacccggtgggcgtgctctacgaggacggcgacgataccgtggcaacccgctccaccgaactctgcggcctgtggcagggaaggcagccgcaacctgtccatttgctgccgctgcatggcattcaacacctcaatatggtcttttccaacctgacccttgagcacatcaacgctatcctgctgggggcgtaccgccagggacctccggcttcacctacggcttcgccggaaccccctccacctgag

SEQ ID NO: 15379 - DNA, 1320 bp, synthetic construct
  misc_feature 1..1320: note = source = /note="Description of Artificial Sequence: Synthetic coding sequence"
  source 1..1320: mol_type = other DNA
atgggaccccctggctctccttggcagtgggtaactctgctgctgggattgctgctgccccccgcagcacccttttggctgttgaacgtactctttccacctcacacgacacctaaagctgagctgtctaatcatacccgcccagtgatcctcgtaccaggttgtttgggcaatcaactggaagccaaactggacaagccggatgtggtaaactggatgtgttatcgcaagacggaagacttctttactatttggctggacctgaatatgtttctccctctcggggtagattgctggatcgacaataccagggtggtctacaatagatccagcggtcttgtcagcaatgcgccaggagtccagatcagagtccctggtttcggaaagacgtactctgtagagtatttggattcaagtaaacttgccggctatttgcatacactcgtgcagaatctggtgaacaatgggtacgtccgggatgagacggttcgagccgccccttacgactggaggctggagcccggtcagcaggaggagtactacaggaagctggctgggctcgttgaggagatgcacgctgcctatggaaaacctgtgttcctcatcggccacagccttggatgtcttcacctgctctattttctgctgcggcaaccgcaggcctggaaggaccgattcattgatggattcattagcctcggggcgccatggggcggcagtatcaaacccatgcttgtgctcgcatctggagacaatcaaggaatacctatcatgtcttctattaagcttaaggaggagcaaagaatcaccaccacctcaccgtggatgttcccttcacgaatggcttggccagaagaccatgtattcatttctacccccagcttcaactacactggccgagatttccaacgattttttgctgacctccatttcgaggaaggctggtatatgtggcttcagtctcgcgatcttctcgcaggacttccagcccccggagtagaggtttattgcctttacggagttggcctgcccaccccaagaacatatatctacgatcacggattcccttacactgatccagtgggggtcctgtacgaagacggcgacgataccgttgccacccggagtaccgagctgtgtggtctgtggcagggccgccaacctcaacccgtgcacctgcttcctctccacgggatccaacacctgaatatggtgttttcaaacctgacactcgaacacattaatgcgatcctcctgggcgcttacagacaggggccccctgccagcccaacagctagtcccgaacctccaccgcccgag

SEQ ID NO: 15380 - DNA, 1320 bp, synthetic construct
  misc_feature 1..1320: note = source = /note="Description of Artificial Sequence: Synthetic coding sequence"
  source 1..1320: mol_type = other DNA
atgggaccgccgggcagcccatggcagtgggtgaccctgttgctgggccttctcctgcccccagcggcccctttctggctgttgaatgtactgttccctccacatacgacgccaaaagctgagctgtcgaatcacactagacctgtgatactggtacctggttgcctgggcaaccagctggaggccaagctcgacaaacccgacgtcgtgaactggatgtgttacaggaaaactgaagatttcttcactatctggttggatctgaatatgttcctgcccctgggggtggactgttggatcgacaacaccagagtcgtctacaaccggtcatcaggcctggtgtcgaacgcgccgggtgtccagatccgcgtgcctggattcggaaaaacctactcggtcgagtacctggactcgtcgaagctggccggctatctccacacgctcgtgcagaacctggtgaacaatggttatgtgcgggacgagactgtgagagctgccccgtacgattggcgcctcgagcccggacaacaagaagagtactaccgaaagttggcgggacttgtggaagaaatgcacgcggcctacggaaagccagtctttctgattggacactctttgggctgccttcacctcctgtactttctgctcagacagccgcaggcatggaaggatcgctttattgacggctttatctccctgggggccccatggggaggatcgatcaaacctatgttggtccttgcttccggtgataaccagggaatcccgatcatgtcaagcatcaagctgaaggaagaacaacgcatcaccactacgagcccgtggatgtttccgagccggatggcctggccggaagatcatgttttcatctccactccgtcgttcaactatactggaagggacttccaacgttttttcgcagacctgcatttcgaggaaggatggtacatgtggctccagtccagagatcttctggcaggcctcccagctccgggggtcgaagtgtactgcctctacggagtgggcctccccacccctcgtacttacatctacgatcacggattcccgtacaccgacccagtgggtgttctctacgaggacggagatgacaccgtggctactaggtctaccgagctttgcggcttgtggcaaggacgccaacctcagccggtccatttgcttccgctgcacggaattcagcatctcaacatggtgttttcgaatctgaccctggaacacatcaatgcgattctcctcggtgcttatcggcaggggccccctgcctcccccactgcgagccctgagccacctccgccggag

SEQ ID NO: 15381 - DNA, 1320 bp, synthetic construct
  misc_feature 1..1320: note = source = /note="Description of Artificial Sequence: Synthetic coding sequence"
  source 1..1320: mol_type = other DNA
atgggacctcccgggtccccatggcagtgggtgacactactgctgggcctactgttgcctcctgccgctcccttttggctgttgaacgtgctcttccccccccacaccaccccaaaggccgaattatcaaaccacacacggcccgttatcctcgttcctggctgcctaggcaatcagctagaggctaagctggacaaaccagacgtggtaaactggatgtgttaccggaaaacagaagacttctttactatttggttggacttgaacatgttcctccctctgggggtcgactgttggattgataatactcgagtcgtatacaatcgctcgtcgggtcttgtgagtaacgcccctggggtccagatccgggtaccaggcttcggcaaaacgtattctgtggagtatctggactcctcaaagctggcaggttacctgcacactctggtgcagaatctagtgaacaatggatatgtgagagacgagaccgtgcgagccgccccctatgattggagacttgaacctgggcagcaggaggagtactataggaaactggccgggctggtagaggagatgcacgccgcttacggcaagccggtttttctgattgggcatagtcttggatgtcttcacttactctatttcttactccgccaacctcaagcatggaaggacagattcatagatggattcatcagcctaggtgccccctggggggggtcaatcaaacctatgctggtgctggcctccggcgataaccaaggcatcccaatcatgtcttctatcaagctcaaggaggaacagagaattacaacgacctctccttggatgttccctagccggatggcatggccagaagaccatgtgttcattagtactccctcatttaactacacaggcagagacttccagcgcttcttcgcagatctgcacttcgaagaggggtggtacatgtggttacagtctcgcgacctgctcgccggactccccgcgcctggagtggaggtgtactgcctatacggcgtgggactgccgacaccaaggacttatatctatgatcatgggttcccctacacagaccccgttggcgtcctgtacgaagatggcgatgataccgtcgcgacaagatcaactgaactgtgcggcctatggcaggggagacagccccagcccgtccacctgctgcccctgcacgggattcagcacttgaacatggtgtttagcaaccttactctagagcacatcaacgccatactcctgggggcataccggcagggcccccctgccagcccaaccgcctcccccgagccaccaccaccggaa

SEQ ID NO: 15382 - DNA, 1320 bp, synthetic construct
  misc_feature 1..1320: note = source = /note="Description of Artificial Sequence: Synthetic coding sequence"
  source 1..1320: mol_type = other DNA
atgggcccgccaggcagcccatggcaatgggtcaccctgctactgggtctgctgttgccaccggccgcgccgttctggctgctgaacgtgctgttccctccgcatactacccctaaggctgagctgagcaaccatacccgcccggtgatcctggtgccgggctgtcttggcaatcagctggaggcaaagctggacaagccagacgtcgtgaactggatgtgttaccgtaaaaccgaggatttcttcactatatggcttgacctcaacatgtttctgccgctgggtgtcgactgttggatcgacaatactcgcgttgtgtacaataggtcctccggcctggtcagcaacgcccccggtgtccagatcagagttccgggtttcggaaagacgtacagtgttgaatatctggatagctcgaagctagcgggttacctccacactctggttcaaaacctggtgaataatggctacgtgagggacgagaccgtgcgagccgccccgtatgactggcgtctggagcctggccagcaagaagagtattaccgcaagctggcggggctcgtagaagaaatgcatgcagcttacggaaagccggtcttcctgattggtcatagcctgggttgcctgcatctcttgtatttcctgctgcgccagcctcaggcatggaaagaccgatttatcgatggctttatttctctgggggcaccatgggggggatccattaagccaatgctggtcctggctagcggggacaaccagggcattccgattatgagctccattaagctgaaagaagagcagcgcattaccaccacgtccccgtggatgttccctagccgcatggcttggccggaggatcacgttttcatttctacccctagctttaattataccggcagggatttccagcgcttcttcgcggacctacacttcgaggaaggatggtacatgtggttgcagagccgcgaccttctggctggcttaccggcgccgggtgttgaggtgtactgtttatatggcgtgggcctgccgactcctaggacctatatctacgaccacggcttcccttacaccgacccagtgggtgtcctctacgaagacggcgatgatactgttgctacgagatctaccgaactgtgcggcctgtggcagggtcgccaaccgcagccggttcacttgctgcctctgcacggcatccagcacctgaacatggtgtttagcaaccttacccttgagcatattaatgcaatcctgttgggggcataccgtcaaggccctccggcaagccccactgcctcccctgagccgccgccaccggag

SEQ ID NO: 15383 - DNA, 1320 bp, synthetic construct
  misc_feature 1..1320: note = source = /note="Description of Artificial Sequence: Synthetic coding sequence"
  source 1..1320: mol_type = other DNA
atgggtcctcctggttctccctggcagtgggtgactttgttgctgggcctgctgctgcccccggccgcaccgttctggcttctgaacgtgctcttccccccacacaccactccgaaagctgagctgtcgaaccatactcgtccagttatcctggtgccgggatgtctggggaaccaactcgaagccaaactggataagccggacgtcgtgaactggatgtgttaccgtaagaccgaagatttcttcaccatctggctcgatctgaatatgtttctgcccctgggagtggactgctggatcgacaacactcgggtcgtttacaaccgctcttcgggcctggtgtcaaatgcgccgggagtccagattcgggttcccggatttggcaaaacctactcggtcgaatacctcgatagcagtaagctggcgggttacctccacaccctcgtgcagaatctggtaaacaatggttacgtccgagacgaaaccgtgcgggcagccccctatgactggcgcttggagccaggacagcaagaggagtactatcgcaagctggccggcctcgtggaagagatgcatgcggcctacgggaaacccgtgttccttatcggacactcactcggttgcctccacttgctctacttcctgttgcgccaaccgcaggcctggaaggatcggttcatcgacggattcatctcgctgggggctccttggggaggcagcatcaagcctatgttggtgcttgccagcggagacaatcagggaattccgatcatgagctccatcaagctgaaggaagagcagcggatcaccactacttccccttggatgttcccatcccgcatggcttggccagaggatcatgttttcatctccactccgagctttaactacacggggagggactttcaacgatttttcgcggacctgcatttcgaagaaggatggtacatgtggctgcagtcgcgcgatttgctggcaggattgccagcacctggagtggaagtctactgcctctacggggtcggactgccgacgccaaggacctacatatacgatcacggcttcccttatactgatcccgtcggggtgctttacgaggacggagacgacacggtggccacgcgttccactgaactgtgcgggctttggcaggggcgccaacctcaaccggtgcacctgctcccattgcatggcatccagcaccttaacatggtgttttcgaacctcaccctggagcacatcaatgcgattctgctgggcgcctaccggcagggcccgccggcgtcaccgactgcgtcgccggagcctccgccgccagaa

SEQ ID NO: 15384 - DNA, 1320 bp, synthetic construct
  misc_feature 1..1320: note = source = /note="Description of Artificial Sequence: Synthetic coding sequence"
  source 1..1320: mol_type = other DNA
atgggcccacccggcagcccctggcagtgggtgacgttgctgcttggtttgctgctgcctccagccgcacccttctggctcctgaacgtattgtttccaccccatacaacaccaaaggcagagctgtcaaaccacactagacctgtcattctcgtgcccggctgtttggggaaccaactggaagccaagttggataaacccgatgttgtgaattggatgtgttaccggaagacagaggactttttcaccatctggctggaccttaacatgttcctgcctctcggggttgactgttggatcgataacacccgggtcgtttacaacagatcttcaggactcgtatcaaatgcccctggagtgcagattcgggttcccggttttggtaagacctactctgttgaatacctcgactcctcaaaactcgcgggctatctgcacacacttgttcagaatctggtgaacaacggctacgtgcgggatgagacagtccgagctgcaccttacgactggagactggagccggggcagcaagaagagtattatcgcaagttggcaggcctggtggaggagatgcacgctgcctacgggaaacccgtgttcctgatcggccatagcctgggttgcctgcacctgctgtatttcctcctgagacagccacaagcttggaaagatcggtttattgacggtttcatttcactcggcgcaccctggggcggctctattaagccaatgctggtcctggccagcggcgataaccagggcatccccattatgagttctattaagctcaaagaggagcaaaggattactactacaagtccgtggatgttcccctcaaggatggcatggcccgaggatcatgtctttatctctaccccgagcttcaactataccggcagagacttccagcggttctttgccgatctccactttgaggagggttggtatatgtggctgcagagccgggaccttctcgctggactgccagcccccggagtagaagtgtactgcctttacggcgtggggctgccaaccccccgcacatacatctatgaccatggcttcccttacaccgaccctgttggagtgttgtacgaagacggcgacgacaccgtggccaccaggtccacggaattgtgcgggctgtggcagggtaggcagccccagccagtccatctgctgccgctgcatgggattcagcacttgaatatggtgttctctaatctgacccttgagcatattaacgctattctgcttggtgcataccggcaggggcctcccgctagcccgactgccagcccagaaccgcctcctcctgag

SEQ ID NO: 15385 - DNA, 1320 bp, synthetic construct
  misc_feature 1..1320: note = source = /note="Description of Artificial Sequence: Synthetic coding sequence"
  source 1..1320: mol_type = other DNA
atgggaccaccaggatcaccttggcagtgggtgactctcttgcttggcctcttgcttcccccagccgccccgttctggcttctgaatgtgctcttccctccgcataccacgccgaaggccgagctgagcaaccacaccagacctgtgatcctcgtgccaggatgcctcgggaaccagctggaggccaaactcgacaaaccggatgtcgtgaattggatgtgctaccgcaaaactgaagacttctttactatctggctcgaccttaatatgtttctcccgttgggcgtcgactgctggatcgataacacccgggtggtgtacaaccgctctagcggactggtgtccaacgcccccggggtccagatccgcgtccccggcttcggaaaaacttactcggtggagtacctcgactccagcaaactggcaggatacctgcacaccctggtgcaaaatctggtgaacaacggctacgtgcgggacgaaaccgtgagagcggctccgtacgactggcgcctggaaccgggacagcaagaggaatattaccgcaagctggccggactggtggaggagatgcacgctgcttacggaaagcccgtgttcctgatcggacattcactgggatgtctccatctgctgtattttctgctgcgccagccgcaagcctggaaagaccggttcattgacggattcatctccttgggagcgccgtggggaggatccatcaaaccgatgcttgtgctggcgagcggagacaaccagggcatcccgatcatgtcctccatcaagctcaaggaggaacagagaatcacgaccacttcgccgtggatgtttccatcaagaatggcttggcctgaggaccacgtgtttatctcgaccccatccttcaactacaccgggagggatttccaacgctttttcgccgatctgcacttcgaggaaggatggtacatgtggctgcaatcgcgggatctcctcgccggactgccggctccaggtgtcgaagtgtactgtctgtacggagtcggactgccgactcctcgcacgtacatttacgaccacggattcccatacaccgatccggtcggggtgctctacgaggacggagacgacactgtggctacccggtctactgaactgtgcggactctggcagggccggcaaccgcaacccgttcaccttctgccgctgcacggtatccagcacctcaacatggtgttctcgaaccttacccttgagcacattaacgccatcctgctgggcgcatacagacaagggcctccggcgtcacctaccgcgtcgcctgaaccgccaccacccgag

SEQ ID NO: 15386 - DNA, 1320 bp, synthetic construct
  misc_feature 1..1320: note = source = /note="Description of Artificial Sequence: Synthetic coding sequence"
  source 1..1320: mol_type = other DNA
atgggcccgcctgggagcccctggcaatgggtgacattgcttctgggtctcctcctgcctccagccgcccccttctggctcctcaacgtcctctttccgccccatacgacccccaaagccgagctgtctaaccatactcgcccagtcatcctggtgcccggttgcctaggtaaccaacttgaagcaaaacttgataagccggacgtcgtgaattggatgtgttaccgaaagacagaagatttcttcacgatttggttggatttgaacatgttcttgccgcttggtgtcgactgttggattgataacactcgagttgtgtacaatcgctccagcggtcttgtctctaatgcgccaggcgtccagatcagagttcccgggttcgggaagacctactccgtcgagtatctggactcctctaagctcgctggttacttacataccctcgtgcagaatcttgtcaacaatggatatgtcagagatgagactgttcgggcagcaccttatgactggcgattggagccggggcagcaagaggaatactacaggaaactcgcgggactcgtcgaggagatgcacgctgcatacgggaagccagtttttttgattgggcacagtctgggatgcttgcatttgttgtacttcctcctccgccaaccccaggcatggaaggaccgtttcattgatggatttatttctttgggcgcgccatggggagggtcgattaaacctatgctggtgttggcgtctggagacaaccaaggtattcccatcatgtcgtccatcaagctgaaggaagagcaaagaataacaaccactagcccttggatgttcccgtcacgtatggcgtggccagaagatcatgtattcatctcaaccccatcattcaactatactggtcgggactttcaacgtttcttcgctgatctgcatttcgaggagggatggtatatgtggttgcagagccgcgatctcctagccggcctaccagccccaggagttgaggtctactgtctgtatggtgtaggcctcccgacgcctcgtacttacatctacgaccatggcttcccttatactgatccagttggagttctctatgaggacggtgatgacactgtcgctacacgctctaccgagctgtgcggactctggcagggccgccaacctcagccggttcatctgctgcccctgcatgggatccagcaccttaatatggtgttctcaaacttgacactagagcacattaacgcaatcttactcggtgcatatcgccaaggccccccggcttctcctaccgcttcacctgagcccccaccacccgaa

SEQ ID NO: 15387 - DNA, 1320 bp, synthetic construct
  misc_feature 1..1320: note = source = /note="Description of Artificial Sequence: Synthetic coding sequence"
  source 1..1320: mol_type = other DNA
atgggcccacctggttccccttggcaatgggtgaccctgttgctggggttacttctgcctcctgctgctcctttctggctcctgaatgtcctctttccccctcatactacccctaaagcagaactgtccaaccacactaggcccgtcatcttagtgcccggctgcctcggcaaccaattggaggctaaactggacaagcctgacgttgtgaattggatgtgctacagaaagactgaggacttctttacgatatggcttgatcttaacatgttcctcccccttggggtcgattgttggatcgataataccagagtggtctacaataggtctagtggcctagtgagcaacgcacccggcgtccagatccgggtccccggctttgggaaaacctacagcgttgagtatttagatagctcaaaactcgctggctatttgcacacactcgtgcagaatctggtaaacaacgggtatgtgagagatgaaacagtgagggccgctccttatgactggcgccttgaacctggccagcaggaggagtattaccgaaaattggccggactggttgaggagatgcatgccgcgtacggtaagccggttttcctgatcgggcatagtttggggtgcctgcatcttctgtattttcttcttagacagccacaagcttggaaagacagatttattgatggatttatttcattgggagctccctggggcggaagtatcaaaccaatgctcgtcctggccagcggagataaccagggcatacccatcatgagctcaatcaagttgaaagaggaacagcgcatcaccaccacttccccttggatgtttcccagtcgtatggcctggcctgaggaccacgtcttcatttcaaccccttcttttaactacacaggaagggactttcagagattttttgctgacttgcactttgaagagggctggtatatgtggctccaatcccgcgaccttttggcaggcctgcctgcacctggcgtggaagtgtattgtttgtatggcgtcggcttgccgaccccccggacctacatctatgaccatggattcccttataccgaccccgtgggcgtgctctacgaagatggcgacgacaccgtggccacaagatcaacggaactctgcggcctttggcaaggcagacaacctcaacctgttcacctgctgcctttgcacggcatccaacacctcaacatggtgttttccaatctgactctggagcacatcaacgctatcctcctgggggcttataggcagggccctccggcaagtccaactgccagccctgaaccgccacctccagag

SEQ ID NO: 15388 - DNA, 1320 bp, synthetic construct
  misc_feature 1..1320: note = source = /note="Description of Artificial Sequence: Synthetic coding sequence"
  source 1..1320: mol_type = other DNA
atgggacctccggggtcgccttggcagtgggtgaccctgctcttgggacttctcctgccaccggcagctcccttctggctgcttaatgtcctgttccccccgcataccaccccgaaggcggagctctcgaaccacactcggccggtgatcctggtgccgggatgtctcggcaaccaactggaagccaagctggataagccagacgtggtgaattggatgtgctacagaaagaccgaggactttttcacgatctggctcgatctcaatatgttcctgcctctcggagtggactgttggatcgacaatactcgcgtggtgtacaaccgaagctcaggactggtgtccaacgctccaggtgtccagattcgcgtcccgggttttggtaagacctacagcgtggagtacctcgactcctccaagctggcgggatacctgcatactctggtgcagaacctcgtgaacaacggttacgtgcgggatgaaactgtcagggcagccccgtacgattggcggctggagccgggacaacaggaagaatactaccggaagctggcaggactggtcgaggaaatgcatgcggcctacgggaaaccggtgttcctcattggccactccctcggatgtctgcacctgctctactttctgctccgccaaccacaggcttggaaggatagattcatcgacggttttatctcacttggcgcgccttggggaggatcaatcaaaccaatgctcgttcttgcctccggcgacaaccaaggaatcccaattatgtcctcgatcaaactgaaagaagaacaacggattaccactacttcaccttggatgtttcccagccggatggcctggccggaggatcacgtctttatctcgactccatcgttcaactatactgggagggatttccagagattcttcgcagacctgcacttcgaggaagggtggtacatgtggctgcagtccagagacttgcttgccgggctgccagctccaggggtggaggtctactgcctgtatggggtgggactcccgaccccgcggacctacatttacgaccacgggtttccctacaccgaccccgtcggagtgctctacgaggatggtgacgacactgtggcaaccagatccactgagctgtgcggcctgtggcagggacgccagcctcaaccggtgcatctgctgcctctccacggaatccagcacttgaacatggtgttttcaaacctgactttggaacacatcaatgccatcctgcttggagcgtaccgccagggaccacctgccagcccgaccgcgtcccccgaaccaccaccgccggag

SEQ ID NO: 15389 - DNA, 1320 bp, synthetic construct
  misc_feature 1..1320: note = source = /note="Description of Artificial Sequence: Synthetic coding sequence"
  source 1..1320: mol_type = other DNA
atgggaccgccaggttcaccctggcaatgggtgacgcttctgcttggtctgcttcttcccccagctgcccctttttggctgttgaatgtgctgtttccaccccataccacccccaaagccgaactgtctaatcacacgaggccggtcatcttggtgcctggttgtcttggcaaccagctggaggcaaaactagacaagcctgatgtggtgaactggatgtgttaccggaaaacagaagatttttttaccatatggctagacctaaatatgtttttgcccctaggcgttgattgttggattgataatacccgcgtggtgtataatcgctcctcaggcctagtgtcaaatgctccaggcgttcagattagagtacctggtttcggaaagacctattctgttgaatatctggactcatccaagttggcaggttatctacacaccttagtgcaaaacttggtgaataacggatacgttcgagatgaaaccgttcgagctgcaccttacgactggaggctggaacctggccagcaggaagaatattatagaaagcttgctgggctggtggaagagatgcatgccgcttatggaaagccagtgtttctcataggacactcactgggttgcctccacctactgtactttctattgaggcagccgcaagcctggaaggacagatttatcgatggattcatatctcttggagccccctggggggggtcgataaagccaatgctcgtccttgcatcaggcgataatcaaggaattcctataatgagcagcattaagctgaaggaggaacagcggatcaccacgacgagcccctggatgttcccctctagaatggcttggcctgaggatcacgtcttcatcagcactccctcttttaactacaccgggagggacttccagaggttcttcgctgatcttcatttcgaagaggggtggtacatgtggttgcagagtagggatctgctcgctgggctgcccgccccaggcgtggaagtgtattgtctgtacggggtcggcctgccaaccccaaggacatacatttacgaccacggatttccttatacggatcccgtaggcgtgctctatgaggatggcgatgacacggtcgctaccaggtctacagagctgtgcggtctgtggcaaggccgccaacctcaaccagttcatctgctgcctctccacggtattcagcatctcaatatggtattttcaaatttaaccctggaacacatcaatgctatcctcctgggtgcttaccgacagggccccccagcctcacctaccgcctcccccgagccccctccccccgaa

SEQ ID NO: 15390 - DNA, 1320 bp, synthetic construct
  misc_feature 1..1320: note = source = /note="Description of Artificial Sequence: Synthetic coding sequence"
  source 1..1320: mol_type = other DNA
atggggcctccgggctccccttggcagtgggttacgcttctcctgggcctccttctgcctcccgcggcaccgttttggctgctgaacgtgttgttcccgccacacaccaccccgaaagctgaactcagcaatcatacccgtcccgtgatcttggtgcccgggtgcctgggaaatcaacttgaggcaaagctggataagcccgacgtggtcaactggatgtgttaccggaaaaccgaggactttttcaccatttggcttgatctgaacatgtttctgcctcttggtgtggattgttggattgataacactagagtggtttacaaccggagcagcggactggtgtcaaacgcacccggagtgcaaatcagagtgcccggttttggtaagacttacagcgtcgagtacctggacagcagcaaactggcaggttacctccatactctggtgcaaaatctcgtgaacaacggatacgtcagggacgaaaccgtgcgggcagcaccatacgattggagactggaaccagggcaacaggaagaatactacagaaaacttgcaggtcttgtggaagaaatgcatgcagcatacggaaagcctgtctttctgattggtcattcactcggatgtctccacctgctttacttcctgttgcgccagcctcaggcctggaaggatcggttcatagatggctttatctcactcggagcaccatggggcggttcgattaagcctatgctcgtgctggcatcgggcgataaccaaggcatcccaattatgtcatcgatcaagctcaaggaagaacaacgcatcaccaccacttcaccctggatgttcccgagcagaatggcatggccagaggaccacgtgtttatctctacccctagctttaactatacgggccgcgattttcagcgtttctttgcggacttgcactttgaagaggggtggtatatgtggcttcagtcccgagatctgctcgccggactgcctgccccaggcgtggaggtgtactgcctgtacggagtggggcttcctactccacgcacctacatttatgaccatggatttccatacacggacccagtgggagtgctgtacgaagatggagatgacactgtggccacccgctcaactgagctctgcggtctttggcaggggaggcagccccaaccagtgcatctccttcctctgcacggcatccaacaccttaacatggtgttttcgaaccttacccttgaacacattaacgccattctgcttggtgcatacaggcagggacctcctgcaagcccaactgcatccccggaacctccaccacctgag

SEQ ID NO: 15391 - DNA, 1320 bp, synthetic construct
  misc_feature 1..1320: note = source = /note="Description of Artificial Sequence: Synthetic coding sequence"
  source 1..1320: mol_type = other DNA
atgggtccgcccgggagtccatggcagtgggtgaccctgctcctgggcctcttgctgcctcccgcagcgcctttctggctgctcaatgtgctgtttccaccgcacacaacccccaaggccgagttgagcaatcacacaagacccgtcattctggttccaggttgcctagggaaccagcttgaagcaaaactggataaaccggatgtcgtcaactggatgtgttatagaaagactgaggacttttttaccatatggctggacctgaacatgttcctaccactaggggtggactgttggattgataatacacgagtggtgtacaatagatcgtctggcctcgttagcaatgctccaggggtccagattagagttcccgggttcgggaagacatattctgtggagtatttggacagttcgaaattggccgggtaccttcacacgctcgttcagaatctagtaaacaacggttatgtgagagacgaaaccgttcgcgcagcaccctacgactggagactggagccagggcaacaggaggagtattacagaaaactcgcgggacttgtggaggaaatgcatgccgcctacgggaaacccgttttcttgattggccacagtctcgggtgtctgcatctcttatactttctcttgagacagccacaggcctggaaagataggtttatagatgggttcattagtttgggggccccatggggcggttccatcaaacctatgctggtgctggcgagtggcgataaccaaggcatcccaataatgagcagcattaaactgaaggaggagcagcgcattaccaccacaagcccttggatgttcccatcgagaatggcctggccggaagaccatgtgtttatctctacaccttccttcaactataccggccgcgactttcagagattcttcgccgacctgcactttgaggaaggttggtatatgtggctccagagtcgcgacttgctggcgggattgcccgcaccaggagtcgaggtgtactgcttgtatggagtcggcttgccaacacccaggacttacatctatgatcacggttttccgtacacggaccctgttggcgtactttatgaggatggggacgatacagttgccacacgatcaacagagctatgcggcctgtggcaaggccggcagcctcagcccgtgcacctactgcctttgcacgggattcaacacctgaacatggtatttagcaacctgacgctggagcacatcaatgctatcctgctgggcgcttatagacagggcccccctgcctcaccgactgccagcccggaaccacctccacctgag

SEQ ID NO: 15392 - DNA, 1320 bp, synthetic construct
  misc_feature 1..1320: note = source = /note="Description of Artificial Sequence: Synthetic coding sequence"
  source 1..1320: mol_type = other DNA
atggggcccccagggagcccgtggcagtgggtcacgctgctcctgggattgctccttccgccagcagcaccattttggctgcttaacgtcttgtttccacctcataccactcctaaggctgaacttagcaaccacaccaggcctgtgatacttgtcccagggtgtcttggaaaccaacttgaggcaaaacttgataaacccgatgtcgtgaactggatgtgctaccgcaagactgaagatttcttcactatttggttggatctgaacatgttcctcccacttggcgttgattgttggattgataacacgcgtgtcgtgtacaaccgctcatcaggcttggtatccaacgcaccaggcgtgcagataagagtcccaggatttggaaaaacttactccgtcgagtacctggattcctcaaagctggcaggttacctccacaccctggtgcaaaatctcgtgaacaacggttacgttcgggatgagactgtcagagccgccccttacgactggcgactggaacctggtcaacaggaagaatactaccgcaagctggcggggctggtggaggaaatgcatgcggcttatggaaaacctgtttttcttatcggacattcgcttggatgtctgcatcttctttactttcttcttcgtcagcctcaagcatggaaggatcgtttcatcgacgggttcatttcactgggagctccttggggaggttccattaagccaatgctcgtgttggcatccggggataatcaaggcattcctattatgtcgtcgattaagctgaaggaagaacagcgaatcaccactaccagtccatggatgtttccatcgcgaatggcatggcctgaagatcatgttttcataagcaccccttcgttcaactacaccggcagggactttcaacgcttttttgcagacttgcatttcgaggagggatggtacatgtggttgcaaagcagggacctgcttgccggacttcctgcacccggcgtcgaagtgtactgcctttacggggtgggacttcctacccctcgcacgtacatctacgatcacggttttccctacactgacccagtgggagtcctgtacgaggacggagatgacaccgtggcaactaggtcaaccgaactttgcggactttggcaagggcgtcagccacaacctgtgcatctgctgcctttgcatggcatacaacacctcaatatggtgtttagcaacctgactcttgagcacattaatgcaattctcctcggtgcatatagacagggaccacccgcaagccctaccgcctcgcctgaaccgccccctccagaa

SEQ ID NO: 15393 - DNA, 1320 bp, synthetic construct
  misc_feature 1..1320: note = source = /note="Description of Artificial Sequence: Synthetic coding sequence"
  source 1..1320: mol_type = other DNA
atgggcccccccggctcgccatggcagtgggtaaccctgttgttgggacttcttctgccaccggccgcaccattctggttgctcaacgtcctgtttcccccccatactacaccaaaggccgagttgtctaaccacactcgaccagtaattttggtcccaggatgtctcgggaaccagctggaagccaaattggataaacccgacgttgtgaactggatgtgttataggaaaacggaggactttttcacaatatggctagacctgaatatgtttcttcccctgggcgtggactgctggatcgataacactcgtgtagtgtataatcgctccagcggcctggtctccaatgctcctggcgtacagatccgggtgcccgggttcggcaaaacgtacagcgttgaatatctcgactcctctaagctggccggctacctccatacgctggtgcaaaaccttgtgaacaacggatatgtgcgggatgagacagtcagagcagccccttacgactggcggctggagccaggacagcaagaagaatattacagaaagcttgctgggttagttgaagagatgcacgctgcatatgggaagccagtcttccttatcgggcattcattgggctgtctgcatctcctctatttcctattgcggcaacctcaagcctggaaggacaggttcattgatgggtttatatcactcggggccccctgggggggaagcataaaacccatgttagtactagcctctggtgacaaccagggtataccaatcatgtcatccattaaattgaaggaagagcagcggataacaaccacaagtccatggatgtttcctagccgcatggcctggcccgaggaccatgtcttcatttctactccatcctttaactatactgggcgggactttcagaggtttttcgctgacctgcacttcgaggagggctggtacatgtggctgcagtccagggatctgctagctggactccctgcccccggagttgaggtctactgtctctacggggtaggactgcctacccctcgcacctacatatacgatcatggcttcccttatactgaccccgttggggtcctgtacgaagacggggacgatacagttgccactagatctacggagctctgtgggctgtggcagggacgccagccacagcccgtgcacctcttgcctttgcatggtatccaacatctcaacatggtgttcagcaacttaactctggagcacatcaatgccatcctcctgggagcttaccgtcaagggccgccagcctcacctacagcatccccggaacccccgcctcctgaa

SEQ ID NO: 15394 - DNA, 1320 bp, synthetic construct
  misc_feature 1..1320: note = source = /note="Description of Artificial Sequence: Synthetic coding sequence"
  source 1..1320: mol_type = other DNA
atgggtccacctggatcgccctggcagtgggtgaccctcctgcttggactgctgctgccgccagcagcgcctttttggcttctgaatgtgctgtttcctccacatactaccccaaaggcagaactctcgaaccacactagaccagtgatccttgtgcctggctgtctgggcaaccaactggaagcgaaacttgacaaacctgacgtggtgaactggatgtgttacagaaagaccgaggactttttcactatctggctcgatctcaacatgtttctgccacttggggtggactgctggattgacaatactcgcgtggtctacaaccgctcgtccggtcttgtgtcaaacgcgcccggcgtccaaattagagtccctggctttggcaagacctactcagtggagtacctcgatagcagcaagctggcgggctaccttcatacccttgtgcagaacctggtgaataacggttacgtccgggatgaaacggtccgggccgcaccttacgattggcgcctggagcccggacaacaggaagaatactatagaaagttggcgggattggtggaagaaatgcatgcggcctacggaaagcccgtctttctgattggacactcgcttggatgtctccatctgctgtactttctgctgcgtcaacctcaagcctggaaggatcgcttcattgacgggttcatctcgctcggagccccttggggaggaagcataaagcctatgcttgtcttggcctcgggagacaaccagggtattccgattatgtcctcgataaagctgaaggaagagcaaagaattaccactacttcgccttggatgtttccttcacgaatggcatggccagaagatcacgttttcatctcgactcctagctttaactacaccggaagagattttcagaggttcttcgcagatctgcattttgaagaaggttggtacatgtggttgcagtctcgcgatcttctggcaggacttcctgctcctggggtggaagtgtactgtctgtacggggtcggtctgccaactccacgtacctacatctacgatcatgggttcccttataccgatccagtcggagtgctctacgaggacggggatgacacggtcgcaacccgatcgaccgagctttgcggcctctggcagggccgtcagccccagccagtccatcttcttcccctgcacgggatccaacacttgaacatggtgtttagcaacctcaccctcgagcacattaacgccattctcttgggagcgtaccggcaagggccaccggcgagtcccaccgccagccctgagcctcccccaccagag

SEQ ID NO: 15395 - DNA, 1320 bp, synthetic construct
  misc_feature 1..1320: note = source = /note="Description of Artificial Sequence: Synthetic coding sequence"
  source 1..1320: mol_type = other DNA
atggggccacccggatctccttggcagtgggtcacgctgctgctgggactgctgctccctcccgcggctccattttggctactcaacgtactgtttcccccccacactactcccaaagccgagcttagcaatcatacccgtcctgtgatcctggtgcctgggtgtttggggaaccagctggaagccaagctggataaacccgatgtggtcaactggatgtgttaccgaaagactgaagatttctttacaatatggttagatctgaatatgtttctccctttaggcgtcgattgttggatcgacaacacccgcgtcgtgtacaatcgatcctccggcctggtgtctaatgctcctggtgtccagatcagggtcccagggttcggcaagacctacagcgttgaatatctggacagctcaaaattggcagggtatttgcacaccctagtccagaacctcgtcaataatggctacgtgagggacgaaacagtacgggcagcaccttatgactggaggctggaacctgggcagcaggaagaatactaccggaagctcgctgggttggtggaagagatgcacgccgcctacggcaaaccggtgtttctgatcggacattccctcgggtgcctacacctcctgtattttcttctccggcaaccacaggcctggaaggaccgatttatcgatggtttcatttcactgggcgcaccatggggaggctcaattaaacccatgctagtcctcgccagcggagacaaccaggggatccccataatgtcctcgataaagctcaaggaggagcagcgaataaccaccacaagcccttggatgttccccagcaggatggcttggcccgaggatcatgtttttatctccaccccctccttcaactataccggcagggactttcagcgatttttcgcggacctgcactttgaggagggatggtatatgtggttgcagtccagagacctgctcgccggtctcccagccccaggtgtggaggtatactgtctctacggggttgggctccctactccgcgaacctatatctacgaccatggctttccgtacactgaccccgtcggtgtgctctacgaagatggagacgataccgttgctacacggtccacagagctgtgcgggctttggcaggggcgtcagcctcaacccgtgcacctgctgcctctgcatggaattcagcatcttaacatggtattctcaaacctcactttggagcacatcaacgccattcttctcggtgcttaccgacagggccctcccgcatcgccaacggcctctccagaacccccccccccagag

SEQ ID NO: 15396 - DNA, 1320 bp, synthetic construct
  misc_feature 1..1320: note = source = /note="Description of Artificial Sequence: Synthetic coding sequence"
  source 1..1320: mol_type = other DNA
atgggtccgccaggaagtccatggcaatgggtgacattactattgggcctgctcctaccaccagctgcaccgttttggttgcttaatgtcttgttcccaccccacaccacgccaaaggcagaactctccaatcataccagaccggttattttggtcccaggttgtcttggcaatcaacttgaagccaaactcgataagccagacgtggttaactggatgtgctaccgaaagacagaggattttttcacgatttggcttgatctcaatatgttccttccacttggagtggactgctggattgataacacgcgagttgtgtacaatcgatcgtcgggacttgtgtcaaatgctccaggcgtccaaatcagagtaccgggattcggaaagacctactccgtcgaatacttggattccagcaagctcgcgggatatctgcacacacttgttcagaacttggtgaataacggatatgtccgtgacgaaacagttcgggctgctccttacgactggaggcttgagccaggacaacaagaagagtactacagaaagctcgctggacttgttgaggagatgcacgctgcatatggaaaaccagtgtttcttatcggacattcgctaggctgtctacacttgctttattttttgcttcgacaaccgcaagcttggaaggacagatttattgatggattcattagccttggagcaccatggggtggatccattaaacctatgctggttctagccagtggggataatcaaggaattccgatcatgtccagcatcaaacttaaagaagagcagcgaatcactactacatctccctggatgttccctagtagaatggcctggcctgaagaccatgtctttattagtactccatccttcaattatacaggaagagatttccagcgattttttgcggatcttcatttcgaggaaggatggtacatgtggttacagtcaagagacttgcttgcgggattgcctgcaccgggagttgaggtctactgtctttacggagtaggtcttcctacccctcgtacatacatatatgatcatggatttccatacaccgatcctgtcggggttctttatgaggatggtgacgatacagtagcgaccagatctacagagctctgcggattgtggcaaggtcgccaaccccaaccagtccatttgttgccactccatggtattcagcatttgaacatggttttcagtaatcttaccctagaacacataaacgcgatcctcctgggagcatacagacagggtcctcccgcatctcctactgcttctccagaaccgccaccgccagag

SEQ ID NO: 15397 - DNA, 1320 bp, synthetic construct
  misc_feature 1..1320: note = source = /note="Description of Artificial Sequence: Synthetic coding sequence"
  source 1..1320: mol_type = other DNA
atgggccctccaggtagtccatggcagtgggtaaccctgttgcttggactgctccttccccccgcagccccattctggctcttgaacgtgttgttccctccacacacgaccccaaaagccgagctgtccaaccataccagaccagtgattctcgtgccaggctgtctgggcaaccagctcgaagctaaactggataaaccagatgtcgttaactggatgtgttacaggaagacagaggacttcttcaccatatggcttgatctgaatatgttccttcctctgggcgttgattgctggatagataacaccagggtcgtttacaataggagcagcggactggtctccaacgcgccgggagttcagattagggtgccgggattcggtaagacgtatagcgtggagtacctggattcctctaagctcgctggctatctgcatactctggtgcagaaccttgttaataatggctacgtgagagacgaaactgttagggccgccccgtacgactggaggttggagccaggccagcaagaggagtactaccgcaaactggccggtcttgttgaggaaatgcatgccgcctacggaaagccagtgttccttataggtcactcactcggctgtttgcatcttctctactttctcctgaggcagccccaggcttggaaggatagatttatcgacggctttatatccctcggagcaccatggggaggaagcattaagccaatgctggtgctggcctctggcgataatcaaggaattcctatcatgtcttccataaagctcaaggaggaacagaggatcacgacgacgagcccgtggatgtttcccagcagaatggcctggcctgaagaccatgtctttatctccaccccgtcctttaattacacaggccgcgatttccaacgcttctttgcagacctgcattttgaagaaggttggtacatgtggctccagagtcgcgatttgctcgccggcctcccagcgcccggtgtggaagtttattgtctgtacggagtaggtttgcctactccaaggacatacatatatgaccatggttttccatacacagaccccgtgggagtgctttacgaggacggagacgacactgtcgcaactaggtccacggagctctgtggcctttggcagggccgccagccccaacccgtccacctgctgcctctccacggcatacagcacctgaacatggttttctccaacctgactttggagcacattaacgccatccttctgggcgcttacaggcaaggacctcctgcttctccaacagcctctcccgaaccaccaccacccgaa

SEQ ID NO: 15398 - DNA, 1320 bp, synthetic construct
  misc_feature 1..1320: note = source = /note="Description of Artificial Sequence: Synthetic coding sequence"
  source 1..1320: mol_type = other DNA
atggggcctcccggcagtccctggcagtgggtcaccctgctcttaggcttgctgctccctcccgcggcgccattttggctgctgaacgtgctcttcccacctcacacaacacctaaggctgaactgagcaatcacacgcggcctgttattctggtcccaggctgtctgggcaaccagttggaggctaagctcgacaaacctgatgtggtgaattggatgtgttatagaaagacggaagatttcttcactatctggctcgacttgaatatgtttctccctctcggcgtggactgttggatagacaatacccgcgtggtttataatagaagcagcggcctcgtatctaacgcccctggggtgcaaattcgggtacccggcttcggtaaaacgtattctgtggagtatctggattcatccaaattagccggctacctacacaccctggtacagaacctggttaacaacggatacgttcgcgacgagacggtcagggctgctccatatgattggcgcctggaacccggccagcaggaagaatactataggaagctggcggggctggtggaggaaatgcatgccgcttatggaaaaccagtgttcttgatcggacatagcctgggttgcttgcatttgctgtatttcctgcttcggcagcctcaggcttggaaagaccgcttcattgacggctttatctcgctaggagccccctggggtggatctatcaaaccaatgctggtgttggcctcgggagacaatcaaggcattccaataatgagttccatcaaacttaaagaagaacagaggatcaccaccacttctccatggatgtttccttcgcggatggcctggccggaagatcacgtgtttatttcaactccttcattcaattacacaggcagagacttccaacggtttttcgctgacttgcatttcgaagaaggctggtatatgtggctgcaatctcgggatctactggcgggacttcctgccccaggcgtagaggtttactgcctgtatggggtgggactccctacaccccgaacgtacatatatgatcatgggtttccatacacagatccagtgggcgttctgtacgaggatggcgatgatacagtagccacaagaagcactgaactttgcggactgtggcagggccgtcaaccccagccagtgcacctactgcccctccacggcatccagcatttgaatatggtcttctctaacctaactctcgaacatatcaatgcaatcctcctgggcgcttaccgacaggggcctcccgccagtccaacggcttctccagagcctccacctcctgag

SEQ ID NO: 15399 - DNA, 1320 bp, synthetic construct
  misc_feature 1..1320: note = source = /note="Description of Artificial Sequence: Synthetic coding sequence"
  source 1..1320: mol_type = other DNA
atgggacctccaggttctccttggcaatgggtgactcttcttctcgggctgctgcttcctcctgcagcaccattttggctgctcaacgtcctttttcctccccacaccactcctaaggctgaacttagcaatcatacccgccccgtgattcttgttcctggatgtctcgggaaccaactcgaagcaaagctggacaaacctgacgtggtgaactggatgtgttacagaaagactgaggactttttcaccatttggctggatttgaacatgtttcttccccttggagtggactgttggatcgataatacgagggtcgtgtataaccggagttcgggactcgtctccaatgcacctggagtccagattagagtgcctgggtttggtaaaacctattccgtggaatacttggatagtagcaagttggcgggttacctccatacccttgtgcagaaccttgtgaacaatggttacgtgcgcgacgagactgtgcgcgcggctccgtacgattggagacttgagccgggccagcaagaagaatactacaggaagttggcaggcctcgtggaagagatgcatgctgcttacggaaaacccgtgtttctcattggtcactcccttggatgcctgcatttgctttacttccttctgcggcagccacaggcctggaaggatcggttcattgatggattcataagccttggtgcaccgtggggcggctcaatcaagcccatgctggtgctcgcatccggtgacaatcaaggaatccctatcatgagctcgataaaactgaaggaagaacaacggattaccaccaccagcccctggatgtttccttcgagaatggcatggccagaggaccatgtctttatctccacgcctagctttaactacactggacgggattttcagagatttttcgctgatcttcactttgaggagggatggtatatgtggcttcaatcgcgagatctcctggccggcctcccggccccaggagtggaggtttactgtctctacggtgtgggacttccgaccccgaggacctacatttacgatcacggcttcccctatactgatcctgtgggagtcctttacgaagatggagatgataccgtggcaactagatcgactgaattgtgtggtctttggcagggacgccaacctcaaccagtgcatttgctgccgcttcatggtattcaacatctgaacatggtgttctcgaatctcacgctggagcacattaacgcaatcctcttgggcgcttacagacaggggcctccggcgtcaccaaccgcatcaccagaaccgcccccacccgag

SEQ ID NO: 15400 - DNA, 1320 bp, synthetic construct
  misc_feature 1..1320: note = source = /note="Description of Artificial Sequence: Synthetic coding sequence"
  source 1..1320: mol_type = other DNA
atggggccaccaggaagtccctggcagtgggttacattgctccttggactcctcctcccaccagccgcgccattctggctgctgaatgttctctttccccctcacacaacacccaaagccgagcttagtaaccacacacggccagtgatcctggtcccagggtgtctgggaaaccagcttgaagcaaaattagataaaccagatgtcgtcaactggatgtgttatcgcaagacagaagatttcttcacaatatggctggacctcaatatgttcctcccactgggggtggactgctggattgataatacaagagtggtgtataaccggtcctcagggctagtgtctaacgccccaggggtgcagataagggtgcccggattcgggaaaacatattcagttgaatatcttgattcctccaaacttgcaggatatctacacactttggtacagaatctagtaaataacggatacgtcagggatgaaacagtgagggccgcaccctatgactggagattagagcctggacagcaggaagaatattaccggaaactagctggattagttgaagagatgcatgccgcctacggaaaacctgtgttcttaatcgggcattccctcggatgccttcatcttctatacttcctcctccggcagccacaggcatggaaagatcgttttatcgatggatttatctccttgggagcaccctggggagggtctattaaacctatgctagttctagctagtggggacaaccaagggatccctataatgtccagtataaaacttaaagaagaacaaaggattactacaacttcgccttggatgttcccctcaaggatggcatggcctgaagaccatgtgttcatctcaacaccaagtttcaattatacagggagagattttcagcggttcttcgccgatcttcatttcgaagaaggatggtacatgtggttacagtcaagagatctgctagccggactccctgcccctggagtggaagtatactgcctctacggagtgggacttcctacaccacgaacatacatatacgatcacgggttcccctatactgatccagtcggggtgttatacgaagatggggacgatacagtggctacacggagtactgaactatgcggactgtggcagggacgccagccccagccagttcatcttcttccactccacggaatacagcaccttaatatggttttttctaacctcacactcgaacacataaacgccatcctccttggggcatatcgccagggaccccctgcttctcctacagccagtcctgagccaccacctccagaa

SEQ ID NO: 15401 - DNA, 1320 bp, synthetic construct
  misc_feature 1..1320: note = source = /note="Description of Artificial Sequence: Synthetic coding sequence"
  source 1..1320: mol_type = other DNA
atgggaccgcccggctcgccgtggcaatgggtgaccctgctgctggggctgctcctcccgccggcggcccccttctggctgctcaatgtgctgttccctccgcacaccacccccaaagcggaactctccaatcatactaggccggtgattctcgtgccaggatgcttgggcaaccagctcgaggcaaagctcgacaagccggacgtggtcaactggatgtgctaccgcaagaccgaagatttcttcactatctggctcgatctcaatatgtttctcccgttgggagtcgattgttggattgacaatacccgggtggtctacaatcgcagctcaggactggtgagtaacgcgccgggggtgcagatccgcgtgccgggcttcggaaagacctactccgtggagtacttggactcgtcgaaacttgcgggttacctccatactcttgtgcagaacctcgtgaacaacggatacgtgcgcgacgaaactgttcgcgctgccccgtacgactggcgcctcgagccgggacaacaggaagagtactacagaaaactcgccggtctggtcgaggaaatgcacgcagcttacggaaagccggtgttcctcatcggacattcattggggtgcctccatctgttgtacttcttgctgcggcaacctcaggcctggaaggacagattcatcgatgggttcattagcctcggtgccccgtggggagggtcaatcaagccaatgctcgtgctggcctcgggagataaccaaggtattccgatcatgtcctccatcaaactgaaggaagagcaacgcatcaccaccacgtcaccatggatgttccccagcagaatggcgtggccggaagatcacgtctttatcagcacgccatcctttaactacactgggagagacttccagagattcttcgcagacctgcacttcgaagaagggtggtacatgtggttgcagtcgcgtgatctgctcgcaggcctcccagcgcctggagtcgaagtgtactgtctgtatggggtgggtctgccgaccccgaggacctacatttacgaccacggcttcccatacactgatcccgtgggagtcctgtacgaagatggagatgatacggtggctactcggagcaccgagctgtgtggactctggcagggtcgacagccgcagccggtgcacctcctgccgctgcatgggatccagcatctgaacatggtgttctcaaatctgaccctggaacacatcaatgctatcctgctgggagcctaccgccagggaccccctgcttccccgactgcctcaccagaaccgccgcctcccgaa

SEQ ID NO: 15402 - DNA, 1320 bp, synthetic construct
  misc_feature 1..1320: note = source = /note="Description of Artificial Sequence: Synthetic coding sequence"
  source 1..1320: mol_type = other DNA
atgggaccaccgggttctccatggcagtgggtgacgttactgttgggactcctcctgcctcctgctgcccccttctggctcctgaatgtgttattccctccgcatacaacacccaaagcagagcttagtaatcacacccggcctgttattctcgtgccagggtgcttgggtaaccagttagaagccaaactggataagcctgatgtcgtgaattggatgtgctataggaagacagaagattttttcacgatctggctggacctgaatatgttcctgcccctgggggtcgactgttggattgacaatacgcgagtggtctacaatcgatcgtcaggccttgtcagtaatgcaccgggggtacagattcgggtgccgggctttggcaagacctactcagttgagtacctggactccagtaagcttgccggatatctgcatacactcgtccagaatttggtgaacaatggatatgtgagagacgagaccgtgcgggccgccccttacgattggcgcctggaaccagggcagcaggaggaatattaccgcaagctggccggccttgtcgaggaaatgcatgccgcctacggaaagcctgtcttcctgattggacattctctgggctgtctgcacctgttatactttctgctgcgacagccacaggcttggaaggacagattcatcgacggattcatctctctgggagcgccctggggggggtcaataaagcccatgctggtcctcgcctcgggagataaccagggcattcctattatgagcagtatcaagttgaaagaggaacaacgtattacgacaaccagtccatggatgttcccgtcccggatggcctggcccgaggaccacgtgtttatctctacaccttcctttaactataccggacgggacttccagcgcttctttgctgacctccatttcgaagaagggtggtatatgtggcttcagagtagggatctcctggctggccttcctgccccaggtgtggaggtatactgcctttatggggtgggcctgcccacgccaaggacctacatctacgatcatggttttccgtacacagatcctgtcggcgtgctgtatgaggacggcgacgacaccgtggctaccaggagtacagaattgtgcggcctgtggcagggaaggcagccccagcctgttcacctactcccgctccatggcatccagcacctgaatatggtcttctctaatctgacactggagcatataaacgcgatcttactgggagcatataggcagggacccccggcgtccccgaccgcatcccctgagccacctccgcccgaa

SEQ ID NO: 15403 - DNA, 1320 bp, synthetic construct
  misc_feature 1..1320: note = source = /note="Description of Artificial Sequence: Synthetic coding sequence"
  source 1..1320: mol_type = other DNA
atgggaccccccggctctccttggcagtgggtgacactgctgctgggtctgctgctgcccccagccgctccattttggctgcttaacgtgctgttcccacctcacaccacccccaaggctgagctctcaaatcacactcgacccgtcatcctggtcccagggtgtctgggtaaccaactggaggccaagctggataaacctgatgtggtcaattggatgtgctaccggaagacagaagacttctttaccatctggctggatcttaacatgtttctgcccttgggagtggactgttggatcgataacactagagtggtgtacaataggtccagcgggctggtgtccaatgctcctggagttcagattcgagtgccaggctttgggaagacctactctgtcgagtatctggacagttctaaactggccgggtacttgcacactctggtccagaatctagtcaacaatggttacgtacgtgatgagacagtgagagccgcaccttacgactggagactggaaccaggtcagcaggaagagtattatagaaaactggctgggcttgtagaggagatgcacgccgcatatgggaaaccggtttttttgatcggccactctctaggctgtctgcatctgctatactttcttctgcgccaaccacaggcctggaaggaccgctttatagacggatttatctcactgggcgccccatggggaggaagtattaagccaatgctggtactggcgtccggcgacaatcaaggcatccccattatgagcagcattaaattgaaagaagagcagaggatcaccacaacaagtccttggatgttcccttctagaatggcctggcctgaggatcatgtgttcatcagtacgcccagctttaactacacggggcgggatttccagcggttttttgccgatttgcatttcgaggaagggtggtacatgtggcttcagagccgggacctgctcgccgggctccctgctccaggcgtggaggtttactgcctgtatggcgttggacttcccactccgcggacttacatttacgatcacggattcccatacactgaccctgtcggtgtcttgtatgaagatggggacgacaccgtggccactagaagcacagaactttgcggtctgtggcagggccggcaaccccagcccgtacatttacttcctttgcacggcattcagcatttaaacatggtcttctcaaatttaaccctggagcacatcaacgcaatcctcctcggagcataccgccaggggccgccagccagtcccaccgccagcccagagcctcctcccccggag

SEQ ID NO: 15404 - DNA, 1320 bp, synthetic construct
  misc_feature 1..1320: note = source = /note="Description of Artificial Sequence: Synthetic coding sequence"
  source 1..1320: mol_type = other DNA
atggggccaccagggtctccctggcagtgggttaccttgctgcttggccttttgttgccacccgctgctcccttctggctgttaaacgtcctttttccgccccacacaacgccgaaggcagaactatcaaaccacacaagacccgtgatcctggtaccaggttgtcttggtaaccaactagaagcaaagctggacaaaccagacgtggtcaactggatgtgctatagaaagactgaggactttttcactatctggttagacttaaacatgttcctgcccctcggagtggattgctggattgacaacactagagttgtgtataatcgaagctcaggactggtcagcaatgcccctggggtgcagatcagggtgcccggctttgggaagacatattccgtcgagtacctggacagcagcaaactggctggctatctgcacacactcgtgcaaaaccttgtgaacaatggatacgtgcgcgacgagaccgtgcgcgccgctccttacgattggcgccttgagccaggccagcaggaggagtactacagaaagctagctggacttgtggaagagatgcatgccgcatacggcaagcccgtgtttctgatcggacattctcttggctgtctacatctcttatacttcctgttgcggcagccccaggcatggaaggatcgatttatcgatggatttatcagcctcggcgccccttggggaggctctatcaagcctatgctggttctcgcttccggcgacaaccagggcatccctatcatgtccagtatcaagctgaaggaagagcagcgcatcaccaccacctctccttggatgtttcctagccgaatggcctggccagaggaccacgtttttatatccacaccgagttttaactataccgggagagactttcaacgttttttcgccgacctgcacttcgaggaaggttggtatatgtggctgcaatctcgggacctgctcgccgggctgccagcaccgggagttgaggtgtactgcttgtatggcgtaggactgccaacccctagaacgtatatttacgatcacggattcccctatacagaccccgtgggtgtgctgtatgaggatggcgacgacaccgtcgctacgagaagcaccgaactctgtggcttatggcaaggcagacagcctcagccagtgcatttactgccactccatgggatccagcatctgaatatggtgttttcgaatctcacgctcgagcacattaacgccatcctgctgggagcgtacaggcagggcccacctgcctctccaaccgctagcccagagccaccgcctccagag

SEQ ID NO: 15405 - DNA, 1320 bp, synthetic construct
  misc_feature 1..1320: note = source = /note="Description of Artificial Sequence: Synthetic coding sequence"
  source 1..1320: mol_type = other DNA
atggggccgcccggttcaccttggcagtgggtgacgctcctattgggcctgctgttgccaccagcagcgccgttttggcttctgaatgtcctgttcccccctcatacaactcccaaggcagaattgtccaatcacacccgtcctgtaattcttgtgcccggctgtctggggaatcagcttgaggccaagctcgacaagcccgatgtcgtgaactggatgtgttacaggaagacagaggattttttcacgatctggctcgatctgaacatgttcctgccccttggggttgattgttggatagataatactagagtcgtctataatcgatccagcggactagtttccaacgctcctggggtgcaaatcagagtgcctggatttggtaagacctactccgtggagtatttggatagcagcaaattggcgggatatctccacacactggtgcaaaacctagttaacaacggctatgtacgcgacgagaccgttcgggctgctccatacgactggcgactagagcctggacagcaggaggaatattaccgcaagttggcaggactcgtggaggaaatgcacgccgcgtatggcaaaccggtgtttctgatcggtcacagcctgggctgtctgcacttattgtattttctacttcgccagccacaagcctggaaggatcgattcatcgatgggtttattagcctcggcgccccatgggggggctcgatcaagcccatgttggtcctggcctctggcgacaatcaaggtattcccatcatgtccagcatcaagttaaaggaggaacaacgcatcacaactacgagcccgtggatgtttccctcacgcatggcctggcctgaggatcatgtttttattagcactccttccttcaactatactggtcgggattttcagcgctttttcgcagatctgcattttgaggagggttggtatatgtggcttcagagccgtgatcttctggccggactacctgcccccggagtcgaagtgtactgcctctatggggtgggcctgcccaccccccgcacctatatctatgaccatggtttcccttacacagacccggttggcgtgctttatgaggacggggacgacaccgtggcaactagatccaccgagctgtgtggtctgtggcagggaaggcagccgcagcctgtccacctgctgcctctccacggcatccagcacctgaatatggtttttagtaatcttactctcgaacacattaacgccatactgctcggagcttacagacagggtcctccagcctccccaacagcttcacctgagccccctcctccagaa

SEQ ID NO: 15406 - DNA, 1320 bp, synthetic construct
  misc_feature 1..1320: note = source = /note="Description of Artificial Sequence: Synthetic coding sequence"
  source 1..1320: mol_type = other DNA
atgggacccccaggatccccctggcaatgggtgacgctcctgctggggctgcttttgcctcctgcagccccattttggcttctgaacgtcctgtttccaccccatacgaccccgaaggcggaactttcgaaccatactcgtcccgtgatactggtgcctgggtgtcttggcaatcagcttgaagccaagctggataagccagatgtcgtgaactggatgtgctaccggaaaaccgaggacttcttcactatctggctggacctcaacatgtttctccctctgggtgtcgattgctggatcgataacactcgagttgtgtacaacagatcctcgggccttgtctctaacgcaccgggggtccaaatcagagtcccaggatttggtaagacctactccgtggaataccttgatagctcgaagctcgcaggctacctccacactctcgtgcaaaatcttgtgaacaatggatacgtgagagatgaaaccgtgagagcagcaccatacgactggcgactggagccaggtcagcaagaagagtattaccggaaacttgcaggtttggtcgaagaaatgcatgctgcgtacggaaaacctgtgtttctgattggccatagcctcggatgtctgcatctgctctatttcctcctgcggcaaccgcaggcatggaaggaccgtttcattgatggtttcattagcctgggcgcaccatggggtggatctataaagccgatgctcgtgcttgctagcggtgacaaccagggaatcccgattatgagctccataaaactgaaggaagaacaacgaattactactacttccccatggatgtttccatcccgtatggcatggcctgaggatcatgtgtttatctccactccgtccttcaattacacgggtagggattttcagagatttttcgcggatctgcattttgaggaaggctggtacatgtggctgcaaagtagagatcttctggcaggtctgcccgctcccggagtcgaagtttactgcctctacggcgtgggcctccctactcctcgtacttacatttacgatcacggctttccttacaccgaccctgtgggagtgctgtacgaggacggagacgacactgtcgccaccagatccacggagctctgcggtctgtggcaagggagacaaccacagccagtgcacctgttgccactccatggtattcagcatctcaatatggtgttctcaaacttgactctggaacatatcaatgctattttgttgggcgcatatcggcaaggtccccctgcgtcaccgactgcatcgcctgagcctccacctccagaa

SEQ ID NO: 15407 - DNA, 1320 bp, synthetic construct
  misc_feature 1..1320: note = source = /note="Description of Artificial Sequence: Synthetic coding sequence"
  source 1..1320: mol_type = other DNA
atgggcccacctggatcaccgtggcaatgggttaccttgctgctgggactgttgttgccccccgcagcccctttttggcttctcaacgtgctgtttccaccacacaccactccaaaggcagaactgtccaaccacacgcggcctgtgatccttgtgccaggctgtctgggaaaccaactcgaagcaaaactcgataagccggatgtcgtgaattggatgtgctaccgcaagactgaggacttcttcacgatttggctggatctcaacatgtttttgcctctcggagtcgattgctggattgacaacaccagagtcgtttacaaccggtcgtcgggtcttgtgtcaaacgctcctggtgttcagattcgcgtgcctggttttggtaagacctactcagtggagtacctggattcctcgaaactggctggataccttcacacccttgtgcaaaatctggtgaacaatggctacgttagagatgaaaccgtgagggcagcgccttacgactggagacttgaaccaggacagcaggaagaatactatcggaagctggcaggacttgtggaagaaatgcacgccgcgtacgggaagcccgtctttctgattggccactccctcggctgcctccacctgctctactttctgctgcgtcagccacaggcatggaaagacagatttatcgatgggtttatctcccttggagcgccttggggaggttccatcaagccgatgctggtccttgcgagcggcgataatcagggtattccaattatgtcatcgataaagctcaaggaagagcaacgaattacgactaccagcccctggatgtttccatccaggatggcttggccagaagatcatgtgtttatcagcactccatcctttaactacaccgggcgtgattttcaaagattcttcgcagacctgcattttgaggaaggatggtacatgtggcttcaatcacgggacctcctggcaggattgccagcaccaggtgtggaggtttactgtttgtacggtgtgggactgcccactcccagaacctacatctacgaccacggattcccttatactgacccggtgggggtgctgtacgaggatggagatgatactgtggcaacccgttctaccgaactgtgtggtctgtggcagggcagacaaccccaaccagtgcaccttctgcctttgcatggcatccaacatctcaacatggtgttctcgaatctgactcttgaacatatcaacgcaattctcctgggtgcatataggcaagggcctcctgcgtcgccgactgcatcgccagagccgcctcctcctgag

SEQ ID NO: 15408 - DNA, 1320 bp, synthetic construct
  misc_feature 1..1320: note = source = /note="Description of Artificial Sequence: Synthetic coding sequence"
  source 1..1320: mol_type = other DNA
atgggcccaccgggatccccttggcagtgggtgacgctcctgctgggacttttgctgcccccagccgcgcccttttggctgcttaatgtgctgttcccgcctcataccactccgaaagccgagctctccaatcatacccgccctgtgatcctggtcccaggatgcttgggaaaccaactggaggctaagctcgacaagccagacgttgtgaactggatgtgctacaggaaaacggaggatttcttcactatatggctggatctcaatatgtttcttcctctcggcgtggactgctggatcgacaatactcgggtggtgtacaaccggtcgagcgggctggtgtcaaatgcgcctggtgtgcagattcgcgttccgggcttcgggaaaacttactccgtggaatacctggattcgtcaaaacttgcaggatatctgcacacccttgtacagaaccttgtgaacaacgggtacgtcagagacgaaaccgtgcgcgctgccccttatgactggcgcctcgaaccaggacaacaggaggaatactacagaaagctcgcaggactggtggaggaaatgcatgccgcgtacggcaagcctgtctttctcatcggccattcccttggatgtctgcaccttctgtacttcctgctgagacaaccgcaggcatggaaagacagatttatcgatggattcatctctctgggagcgccatggggagggtcgattaagccgatgctggtgttggcatctggtgacaaccagggaatcccaatcatgtcatcgatcaaattgaaggaagaacagagaatcactaccacttcgccgtggatgttcccgagtcgcatggcgtggccagaagatcacgtgtttatctcaaccccgtctttcaactataccggccgcgacttccagagattcttcgcagaccttcacttcgaggaaggatggtacatgtggttgcagtcaagagacttgctggcggggcttccagctcctggtgtggaagtttactgcctctacggcgtcggactgcctactccccgcacctacatctacgatcacggattcccatacaccgatccggtgggcgtcctttacgaggatggagacgataccgtcgcaactcgttcgacggaactgtgtggactgtggcaaggacgccagccacaaccagtgcacctgctccctcttcacggtatccagcatctcaatatggtgttcagcaacctcaccctcgagcatatcaatgccatcttgctcggagcctaccggcagggtccgcccgcctcgccgaccgcctccccggaaccaccaccgcctgaa

SEQ ID NO: 15409 - DNA, 1320 bp, synthetic construct
  misc_feature 1..1320: note = source = /note="Description of Artificial Sequence: Synthetic coding sequence"
  source 1..1320: mol_type = other DNA
atgggcccccctggatcaccctggcagtgggtgacactcttactcggccttctacttccacccgccgctccattttggctgctgaatgtgctattcccccctcacacaacacccaaagccgagcttagcaaccatactaggccagttattcttgtgcccggttgtctggggaaccagttagaggccaagctcgacaaacctgatgtggttaattggatgtgttatcgaaagacggaggacttctttaccatctggctggatctgaatatgtttttgccacttggggtcgattgctggattgataatactcgtgttgtctataaccgcagctcaggccttgtgtctaacgccccaggtgtgcagataagggtgccaggctttggcaagacttactcagttgagtacctggacagtagcaaactggctggttaccttcatacccttgtgcagaatctggtgaacaatggctatgtgagagatgaaactgtgagagcggctccatacgattggcggctggagcccgggcagcaggaggagtattatcgaaagctggccggcctcgtggaggagatgcacgccgcatacggcaagcccgtgttcctgattggacattcgttgggatgcctgcatttgctatatttcttgcttagacagccccaggcttggaaggataggtttatcgacgggttcatttctctgggcgccccttggggggggagcattaagcctatgctggtgctcgcttccggcgataaccaggggattcccatcatgagctctattaagctcaaagaggagcagcgaatcacaacaacctccccctggatgtttccatcccggatggcgtggcctgaggaccatgtgttcatttcaaccccttctttcaactacaccggcagagactttcaacgcttttttgccgacctgcactttgaggaagggtggtacatgtggttgcagtctagggatttgctggcaggcctacccgccccaggggtagaggtttactgcctttatggagttgggttgccgacccccagaacatacatttatgatcacggctttccctacacggatccggtcggagttttatacgaagatggcgacgacacagtcgccactcgctccaccgaactgtgtggcttgtggcagggtaggcagccacagccagtccacttactgccactccacggtattcaacacctcaatatggtgtttagcaatctaactttggaacatataaatgctatcctcctcggagcctatcgacaagggcccccggcctctcccacggcttccccggaacccccaccccctgaa

SEQ ID NO: 15410 - DNA, 1320 bp, synthetic construct
  misc_feature 1..1320: note = source = /note="Description of Artificial Sequence: Synthetic coding sequence"
  source 1..1320: mol_type = other DNA
atgggcccgcctggtagcccatggcagtgggtcaccctgctccttggcctgctgctcccccccgccgcccccttctggctgcttaacgttctcttcccaccccataccacacccaaagcggagctgtccaaccacacacggccagttatcctggtacccggatgtttggggaaccagctggaggcaaagctggataagcccgacgtagttaattggatgtgttacagaaagaccgaagatttcttcaccatctggctggatcttaacatgttcctccctctgggtgtcgactgttggattgacaacaccagagtcgtgtataacaggagctctggccttgtgagtaatgcacccggcgtgcagattagagttccagggttcggcaagacctattccgtcgagtacctggactccagcaagcttgcgggctatctgcacacgctggtacagaacctcgtgaataatgggtacgtgcgagacgagacggtgcgggctgcgccttatgattggcggctcgagccagggcaacaggaggagtattacaggaaactggccgggctggtggaggagatgcacgccgcatatggaaagcccgttttcctcattggccactccctgggatgcttgcacctgctgtacttcctcctcagacagccgcaagcttggaaggaccggtttattgacgggtttatatcattgggtgcgccatggggaggctccattaagcctatgctggtgctggcttccggagataaccagggcatacctattatgtcctccataaaactgaaggaggaacagcgcattaccacaacgtctccctggatgttcccctctcgcatggcttggcccgaagaccacgtgttcatatctaccccaagcttcaactatactggtagagatttccaaagattcttcgcagatctccacttcgaggagggctggtatatgtggctgcagagtagggatctgttggctggactgcccgcccctggagtggaggtgtattgcttgtacggggtgggactgccgactcctcggacctatatctatgatcacggattcccttacaccgaccccgtgggagtcctctatgaggatggagacgacaccgtcgcaactcgatccactgagctttgcggtctctggcaggggaggcaaccacaaccagtccaccttcttcctctgcatggcatccagcatctgaatatggtgtttagcaacttgacgctggagcatatcaacgctattctgctcggagcgtatcgacagggtcctcccgcatctcctactgcctcacctgagccacccccccctgaa

SEQ ID NO: 15411 - DNA, 1320 bp, synthetic construct
  misc_feature 1..1320: note = source = /note="Description of Artificial Sequence: Synthetic coding sequence"
  source 1..1320: mol_type = other DNA
atgggcccaccaggcagcccctggcagtgggtgacactgctgctgggcctgctgctgcctccagctgcacctttttggctgctcaatgtgctgtttcctccacatacaacccccaaagctgagctgtctaatcacaccagaccagtgatactcgtgcctggctgtctcgggaaccagctggaagctaaactggacaagccagacgtggtgaattggatgtgctaccggaagaccgaagactttttcaccatttggctggatctgaatatgttcctacccctaggcgtcgattgttggattgataatacccgagtggtgtataacaggagcagcggcctagtcagtaatgctcccggggtgcagattcgggtccctggttttgggaagacctacagcgttgaatacctagacagcagcaagctggccggatacttgcataccctggtccagaacctcgtgaacaatggttatgtccgcgacgagacagttcgggccgccccctacgactggcggctagaaccaggccaacaagaggaatactatcggaagctggcaggcctagtggaggagatgcacgccgcttatggcaagcctgtgttcttaattggccactccctcggatgcttacatctactgtattttctgctgaggcagcctcaagcttggaaggacaggtttatagacgggttcatatccctgggcgctccttggggcggttctataaaaccaatgctggtgctggcctccggagacaaccagggcattcctataatgtcaagcatcaagttaaaggaagagcagaggataactactacctccccttggatgttcccatccaggatggcctggcccgaggaccatgtgtttataagcaccccatctttcaactacacagggagggactttcagcggttcttcgctgacttgcactttgaagagggatggtacatgtggctgcagtctcgggacttgctggccggtctgccagctcctggcgtcgaagtttattgcctatatggcgtgggcctgcccacccctagaacctacatttacgaccacggctttccttatacagatccagtaggcgtgctttacgaagacggcgatgacacagtggcaaccaggtctaccgaactgtgtgggctgtggcagggcagacaacctcagccagttcatctgctccccctgcacggaatccagcacctgaacatggtgttttccaacctcaccttagaacacataaatgcaattctactgggcgcatacaggcagggcccacccgctagcccaaccgcctctcctgaacccccaccacctgaa

SEQ ID NO: 15412 - DNA, 1320 bp, synthetic construct
  misc_feature 1..1320: note = source = /note="Description of Artificial Sequence: Synthetic coding sequence"
  source 1..1320: mol_type = other DNA
atgggtccacctggctcaccatggcagtgggtaaccctcctactgggacttttgctcccacctgcagcccccttctggttgctgaatgtgctttttcccccgcacacgactccaaaggctgagttgagcaatcatacgcggccggtcatcctggtacctggatgtctgggcaaccagctagaggccaagctcgacaagcctgacgtggtgaactggatgtgttacaggaagacggaggatttctttacgatctggctggatcttaatatgttcctcccgctaggcgttgattgctggatcgataatactagggtggtatacaaccggtcgagcggtttggtcagcaatgcccccggggtgcaaatccgtgtaccgggattcgggaagacttatagtgtggagtatttggatagctccaagctcgcaggatatctccacaccctggttcagaacctcgtaaacaatggatacgtccgggacgaaacagtccgagcggctccgtacgactggagactcgagccggggcagcaggaagagtactaccggaagctcgcgggcctcgtcgaggagatgcacgctgcctatggtaaaccggtattcttgatcggacatagcctgggttgtctgcacctactgtattttctgctcagacagccgcaggcgtggaaagatcggtttatcgacgggtttattagcctcggcgctccttggggcggatctataaagcccatgctggtactggcatctggagataatcagggtatcccaatcatgtcctctataaaactgaaggaggaacaacgaataaccactacctcaccctggatgtttccctcacgtatggcttggcccgaagatcatgtgttcatatccacgcccagcttcaactacactggccgggactttcagagattcttcgcggatttacattttgaggagggctggtacatgtggctgcagagtagggatctgctcgctggccttcctgcacccggtgttgaggtgtattgtctgtacggcgttggattaccaacgccaagaacatatatatatgaccatggcttcccctataccgacccagttggggttctgtatgaagacggagacgatactgttgccactagatcaaccgagttatgcggattatggcagggacgccagccacagcccgtccaccttctgcccttacacggcattcaacacctgaatatggttttctctaacttgactttggagcacatcaacgccattctcctgggtgcatataggcagggaccccctgccagccccacagccagtcccgagccccctccccccgag

SEQ ID NO: 15413 - DNA, 1320 bp, synthetic construct
  misc_feature 1..1320: note = source = /note="Description of Artificial Sequence: Synthetic coding sequence"
  source 1..1320: mol_type = other DNA
atgggacctccaggatctccatggcagtgggttactttacttttaggacttcttttacctccagctgctcctttctggttattaaatgttttatttcctccacatactactccaaaagcagaattatctaatcatacaagaccagttatcttggttccaggttgtttaggaaaccaattagaggctaaattagataagccagatgttgttaattggatgtgttatagaaaaacagaagatttttttacaatttggcttgacttaaatatgtttcttccactaggagttgattgttggatagataatactcgtgttgtttataacagaagttcaggacttgtatctaatgctccaggtgttcaaataagagttccaggatttgggaaaacttattcagtcgaatatcttgattcttctaaattagcaggatatttgcatacacttgttcaaaatttagttaacaatggatatgtaagagatgaaacagttagagcagcaccatatgactggagattagaaccaggacaacaagaagaatattatagaaaattagcaggattggtagaagaaatgcatgcagcatacggaaaacctgtttttcttattggtcattcacttggatgtcttcatcttctttatttcttgttaagacaaccacaggcatggaaagatagatttattgatggatttatttcattaggtgctccatggggaggatctatcaaacctatgttagttttagcatcaggtgacaaccaaggaattccaatcatgtcatctattaaacttaaggaagaacaacgtattactacaacaagtccatggatgtttccatcaagaatggcttggccagaagatcatgtttttatttctactccatcttttaattatactggtagagattttcaaagattttttgcagacttacattttgaagaaggatggtatatgtggttacaaagtcgtgatcttttagcagggttaccagctccaggtgtagaagtttattgtttatatggagttggacttccaactcctcgaacatatatttatgaccatggatttccatatacagatccagttggtgttttatatgaagatggtgatgatacagttgccacaagatccacagaactttgtggtctttggcaaggaagacaaccacaaccagtccatttacttcctttacacggaattcaacatctaaatatggttttttcaaacttaactttagaacatattaatgcaattctattaggggcttatagacaaggaccaccagcttcaccaacagcaagtccagaaccacctccaccagaa

SEQ ID NO: 15414 - DNA, 1320 bp, synthetic construct
  misc_feature 1..1320: note = source = /note="Description of Artificial Sequence: Synthetic coding sequence"
  source 1..1320: mol_type = other DNA
atggggccaccaggatccccctggcaatgggtgactctgctcttgggacttcttctgcctcccgccgcgcccttttggctcctcaatgtgctgtttcccccacacactacccctaaagcggagctttccaaccacaccagaccagtgatccttgtgccgggatgtcttggaaaccaacttgaagctaagttggataaacccgacgtggtgaactggatgtgttatagaaagactgaagatttctttactatttggctcgatctgaacatgtttttgccccttggtgtggattgctggattgacaacactcgcgtggtctacaatagatcctcgggactcgtctcgaacgcgcctggcgtgcaaattagagtccctggttttggcaaaacctactccgtggagtatctcgattcgtccaagctggcaggttaccttcataccctggtccagaacttggtcaacaatggatacgtgagagatgaaacggtgcgcgctgcgccttacgactggcgtcttgagccgggtcaacaagaggaatactacagaaaacttgccggtttggtcgaagagatgcatgcggcctatgggaaacctgtgtttctgattggccacagcctgggatgtctccatctcctctactttctgctgcggcaaccccaggcttggaaggatagattcattgacggatttatcagcctcggcgctccatggggtggatcgatcaaacccatgcttgtgttggcttctggggataaccaaggtattcctataatgtcatcgattaagctcaaggaagagcaacgaattaccaccacttccccgtggatgttcccttcacgcatggcatggccagaagatcatgtgttcatatcaactccatccttcaactacactggaagagatttccaacgcttcttcgcagacttgcactttgaagagggttggtacatgtggcttcagtcaagggatctgctggcaggactcccagcacctggagtggaagtgtactgcctttacggagtcgggcttccgacgccccgcacctacatttacgatcatggatttccttacaccgacccagtgggtgtgctctacgaagatggtgatgatactgtggcaaccagatccaccgaactctgcggactgtggcaaggcagacaacctcagcctgtgcatctgctgcctctgcacggtattcaacatctcaacatggtgtttagcaatttgacgctggagcatatcaacgccattcttcttggggcatacagacagggtcctccagcctcgcctactgcgtcgccagaacctcccccaccggaa

SEQ ID NO: 15415 - DNA, 1320 bp, synthetic construct
  misc_feature 1..1320: note = source = /note="Description of Artificial Sequence: Synthetic coding sequence"
  source 1..1320: mol_type = other DNA
atgggaccgcccggctctccctggcagtgggttaccctgcttctgggattgctcctgccaccagccgcccccttttggctgctcaatgtcctctttcctcctcacacaacacccaaggctgaactttccaaccatacgcgcccagtaatcctcgtcccaggttgtctgggtaaccagctggaggctaaactggataagcccgatgtcgttaattggatgtgctatagaaaaactgaggattttttcacaatttggctggatcttaatatgtttctgcccctgggtgttgactgttggatcgacaacacccgcgttgtctacaacagatctagcggactagtgagtaacgcgcccggagtgcagatccgggttcctggcttcggtaagacctactccgtagagtacctggactcttctaaattagctggctatctacataccctggtccaaaacctggtgaacaatggatatgtcagggatgaaacagtgcgagccgcgccatatgactggagattggaacctgggcaacaggaagagtactatcgcaaactggcagggctggtggaagaaatgcatgccgcctacggaaagcccgtattcttgatcgggcattctctgggatgtctgcacttgctatatttcctcttacgccaacctcaggcatggaaagaccgcttcattgatgggttcatatctttgggggcgccctggggcggctcgattaagcctatgctggtactggcatcaggagacaatcagggcattccgatcatgagcagcataaaactgaaggaggagcagcgaatcactacaaccagcccctggatgttcccatcccggatggcctggcccgaagatcacgttttcatcagcactccttctttcaactacacaggcagagacttccagcggttctttgctgacctgcacttcgaggaagggtggtatatgtggctacagtctcgggatttactggccggtctcccggcccctggagtggaggtgtactgcctgtacggtgtgggcttgcccactcctcgcacatatatctacgatcatggcttcccttacacagatccagtgggcgtattgtatgaagacggcgatgacactgtcgccactcggagcactgaactgtgtgggttgtggcaggggagacaaccgcagcctgttcacctgctgccactgcatggcatccaacatctgaacatggtgttttctaatctaacacttgagcacatcaacgctatattgctgggcgcctaccgccaggggccaccagcatcgcctaccgcatctcccgaacctccgcctccggaa

SEQ ID NO: 15416 - DNA, 1320 bp, synthetic construct
  misc_feature 1..1320: note = source = /note="Description of Artificial Sequence: Synthetic coding sequence"
  source 1..1320: mol_type = other DNA
atgggacccccaggaagtccctggcagtgggttaccctgttactgggccttctactgccacccgctgccccattttggttgttgaatgtgcttttccctccacacaccaccccaaaggccgagctgagcaaccatactcgacccgtcatcttggtgcccggatgcctgggcaaccagctcgaggcaaaactcgacaagcccgatgtggtcaattggatgtgctaccgtaagaccgaagacttcttcacaatctggctcgacctgaatatgttccttcctctgggcgtcgattgctggatcgacaatacacgagtggtttacaacaggtccagcggtctcgtttctaacgcaccaggagtgcaaattcgtgtgcctggctttggaaaaacttattccgtcgagtacctggatagctcaaagctcgccggctacctgcatacccttgtgcagaacctcgtcaacaacggttatgtgcgagatgagaccgtacgagctgcgccttacgattggagactcgaacctggccagcaagaagagtactatcggaagcttgccggactcgttgaggaaatgcatgcagcatacgggaaacccgtttttctgataggccacagccttggctgtctgcatttgttgtatttcctcctaagacagccacaggcctggaaggatagattcatagacggcttcatatccctcggtgcaccgtggggtggatctattaaacccatgctggtcctcgccagcggggataaccagggaattcctattatgtctagcatcaaacttaaagaagagcaaagaatcaccactacctccccatggatgtttccttcaaggatggcttggccagaagaccatgtctttattagcacacccagcttcaattacacaggtcgagattttcagcgattctttgccgatttgcatttcgaggaggggtggtatatgtggctgcagtctagagatttactggcaggcttgcctgcccccggcgtggaggtttactgtctgtatggggtgggcctgcccacccctcgaacatatatctacgatcacggctttccgtataccgatccggtgggcgtactgtatgaggatggtgatgatacggtcgctactagatcaaccgaactgtgtggtctgtggcagggccgacagcctcagcccgtgcacctcttaccactgcatggcattcagcacttgaacatggtctttagcaacctcaccttggagcatataaacgccattctgctgggagcttatcgacaagggcccccagcctcccccacagcatcaccggaacccccccctcctgaa

SEQ ID NO: 15417 - DNA, 1320 bp, synthetic construct
  misc_feature 1..1320: note = source = /note="Description of Artificial Sequence: Synthetic coding sequence"
  source 1..1320: mol_type = other DNA
atgggacctccggggagcccgtggcagtgggtgaccctgctgctcggtctgttgctcccgccagccgccccgttctggttgctcaacgtgctttttccgccgcacaccacgccaaaggcagagctgtcgaaccacacccggccggtgatcctcgtgccgggatgcctgggtaaccagctggaagcgaaactggacaagccagacgtggtcaactggatgtgctacagaaagaccgaggatttcttcaccatctggctggatctgaatatgtttctcccgctgggtgtggattgctggatcgataacactcgggtggtgtataaccgctcttccggactggtgtccaacgccccgggagtgcagataagggtgccaggattcggaaagacctacagcgtcgaatacctggactcctcgaagctggccggctacctccacactctggtccaaaacctggtgaacaacggctacgtgagagatgaaactgtgcgggccgcaccgtacgattggagactggagccgggacaacaggaagagtactaccgtaagttggccggactggtggaggagatgcatgcagcctacgggaagccggtctttctgatcggacattcgctcggctgtctgcacctgctgtacttcctcctgcgccagccccaggcgtggaaggaccgatttatcgatggcttcatctcgctgggggccccttggggtggctccattaagcctatgctcgtgctggcttcgggcgacaaccaaggtatcccaatcatgtcatcaatcaagctgaaggaggaacagcgcatcactaccacgtccccctggatgttcccgagcagaatggcatggccggaggaccacgtctttatctcgacgccatcctttaactacaccggacgggatttccaacgcttctttgccgatctgcacttcgaggaaggatggtacatgtggctgcaatcacgggacctgctggcaggactgcctgcgccgggagtggaagtctattgcttgtacggagtgggactgccaactccgcgcacctatatctatgatcacggttttccatacaccgacccggtcggagtgctgtacgaggatggagacgatactgtggctaccaggagcaccgagctctgcggattgtggcaagggagacagcctcagccggtccatctcctgcctctgcacggaatccagcatctgaacatggtgttcagcaatcttaccctcgagcacattaacgcaattcttctgggtgcctaccggcagggcccgcccgcttccccaactgccagccctgaacctcctccaccggag

SEQ ID NO: 15418 - DNA, 1320 bp, synthetic construct
  misc_feature 1..1320: note = source = /note="Description of Artificial Sequence: Synthetic coding sequence"
  source 1..1320: mol_type = other DNA
atgggcccgccgggatctccttggcaatgggttacgcttctgctgggccttctgcttccgccggctgctccgttttggttattgaatgtcctttttccgccgcatacaactcctaaagcggaattatcaaaccatacacggccggtcattttagtgcctggctgccttggtaatcaattggaagctaaacttgacaaaccggatgttgtaaattggatgtgttatcgtaaaactgaggatttttttaccatctggttagatctcaatatgtttttgcctcttggtgtcgactgctggattgacaacacacgggtcgtgtacaaccggtcatctggactggtctcaaatgcacctggcgttcagatccgagtgcccggttttggaaaaacatactcagtagagtacttggactcttcaaaactggctggctacttacacacactggtccaaaaccttgtaaataacggctatgttagagatgaaacagttcgggcggcgccatatgattggcgccttgaacctggacaacaagaggaatattatcgtaaattagctggactcgtcgaagaaatgcatgctgcgtatggcaaacctgtctttttgattggacattcacttggttgtttgcatctcttgtatttccttcttagacagccacaagcttggaaggatcgctttattgatgggtttatttctctgggggctccgtggggcggcagcataaaaccgatgttggtgcttgcgtcaggcgacaatcaggggattccgattatgtcatctattaaacttaaagaagagcaacgcatcacaactacatctccttggatgtttccttcacgcatggcgtggcctgaggatcatgtatttatttccacaccatcattcaactacacgggaagagattttcaacgttttttcgcggatctacacttcgaagagggatggtacatgtggcttcagtccagagatttgttagccggcttgcctgctcctggcgtggaagtctactgcctttacggcgttggactaccgactccgcgcacctatatttatgatcacggttttccctatactgatccggtgggcgtgctttacgaagacggtgatgatacagttgctacccgtagtacggaactgtgtgggttatggcagggtcgccagccacaacccgtccatttattgcctctccatggcatccagcatctcaatatggtcttctctaacctcacgctggaacatattaacgcaattcttctcggcgcatatcgacaaggtcctcccgcgagccccacagcctcacccgaacctcctcctcccgaa

SEQ ID NO: 15419 - DNA, 1320 bp, synthetic construct
  misc_feature 1..1320: note = source = /note="Description of Artificial Sequence: Synthetic coding sequence"
  source 1..1320: mol_type = other DNA
atgggacccccaggttcaccgtggcaatgggtgacgctgcttctgggtctgctcttgcccccggctgcgccgttctggctgctgaacgtcctgttccctccgcacactaccccaaaggcggagctgtcgaaccatactcgcccagtcatcctggtcccaggatgcctcggaaaccaacttgaagctaaactggacaaaccagacgtggtgaattggatgtgctatagaaagaccgaggacttcttcaccatctggcttgacttgaatatgtttctgccgctcggggttgactgctggatcgacaacacccgagtggtctacaatagatcatccgggctggtttcaaacgccccgggagtgcagattcgggtcccgggatttggaaagacttactcggtggaatacctggactcgtcgaagctggcgggatacctgcacactctggtgcagaatctggttaacaacgggtatgtgcgagatgaaaccgtcagagctgcaccctacgactggcggctggagccgggccagcaagaggagtactaccggaagttggcaggcctggtcgaagaaatgcacgccgcctatggaaagccggtgttcctcattggacattcccttggatgcttgcatcttttgtacttcctgctgaggcagccacaagcatggaaggatagattcattgacggatttatctctctgggagcgccatggggcggctcgatcaagccaatgctcgtcttggcgtcgggcgacaaccagggtatccctatcatgagctccatcaagctcaaggaagaacagcgcataaccacgacctccccttggatgttcccatccagaatggcgtggccggaagatcacgtgtttatctccacgccgtcgttcaattacactggacgcgacttccagaggttcttcgcggacctgcacttcgaagaagggtggtacatgtggttgcaatcacgggacctgctcgccggactcccggcgcccggcgtggaagtctactgcctgtacggagtcggcctgccgacgcctcggacttatatctacgatcacggatttccgtacaccgaccctgttggggtactctacgaggacggcgatgatactgtggccacgcgcagcaccgagctttgcggcctctggcagggtcggcagccgcaaccagtccacctcctcccgttgcatggaatccaacaccttaacatggtcttttcaaatctcacccttgaacacatcaacgctatcctgttgggagcctacagacaaggtcccccggcgtcaccaacggcctccccggagccgccgccgcctgag

SEQ ID NO: 15420 - DNA, 1320 bp, synthetic construct
  misc_feature 1..1320: note = source = /note="Description of Artificial Sequence: Synthetic coding sequence"
  source 1..1320: mol_type = other DNA
atgggtccgccgggttcgccgtggcaatgggtaacgttactattaggtctactattaccgccggcggcgccgttttggctattaaatgttttatttccgccgcatacgacgccgaaagcggaattatcgaatcatacgcgtccggtaatattagtaccgggttgtctaggtaatcaactagaagcgaaattagataaaccggatgtagttaattggatgtgttatcgtaaaacggaagatttttttacgatatggctagatttaaatatgtttttaccgttaggtgtagattgttggatagataatacgcgtgttgtttataatcgttcgtcgggtttagtatcgaatgcgccgggtgtacaaatacgagtaccgggttttggtaaaacgtattcggtagaatatctagattcgtcgaaattagcgggttatttacatacgttagtacaaaatttagtaaataatggttatgttcgtgatgaaacggttcgagcggcgccgtatgattggcgattagaaccgggtcaacaagaagaatattatcgtaaactagcgggtttagtagaagaaatgcatgcggcgtatggtaaaccggtatttttaataggtcattcgctaggttgtctacatttattatattttctactacgtcaaccgcaagcgtggaaagatcgttttatagatggttttatatcgctaggtgcgccgtggggtggttcgataaaaccgatgctagtactagcgtcgggtgataatcaaggtataccgataatgtcgtcgataaaactaaaagaagaacaacgtataacgacgacgtcgccgtggatgtttccgtcgcgtatggcgtggccggaagatcatgtttttatatcgacgccgtcgtttaattatacgggtcgtgattttcaacgattttttgcggatttacattttgaagaaggttggtatatgtggttacaatcgcgagatttactagcgggtctaccggcgccgggtgttgaagtatattgtttatatggtgttggtttaccgacgccgcgtacgtatatatatgatcatggttttccgtatacggatccggttggtgtactatatgaagatggtgatgatacggtagcgacgcgatcgacggaattatgtggtctatggcaaggtcgtcaaccgcaaccggtacatctattaccgctacatggtatacaacatctaaatatggtattttcgaatctaacgctagaacatataaatgcgatactattaggtgcgtatcgacaaggtccgccggcgtcgccgacggcgtcgccggaaccgccgccgccggaa

SEQ ID NO: 15421 - DNA, 1320 bp, synthetic construct
  misc_feature 1..1320: note = source = /note="Description of Artificial Sequence: Synthetic coding sequence"
  source 1..1320: mol_type = other DNA
atgggcccaccgggctctccttggcagtgggtgacccttcttttgggtctgcttctccctcccgccgcaccattctggctgctgaatgtgctctttcctcctcacacgacccccaaggcggagctctccaaccatacgaggcccgtcattcttgttcctggatgtctgggaaaccagctcgaggcaaagctcgacaagccagatgtcgttaattggatgtgttaccgaaaaaccgaggacttctttactatatggctggatctgaacatgtttctcccccttggagtggactgctggattgataacacccgggtggtgtacaatcgtagctcgggacttgtgtcaaacgcgccgggggtgcagatccgcgtccctggttttggtaagacttactccgtggaatacctcgattcaagcaaacttgcggggtacctccacaccctcgtgcagaacttggtcaacaacggttacgtgagagacgaaacggtcagagccgcaccgtacgattggcgtctcgaacctggacagcaggaggagtattacagaaaactggccggtctggtcgaagaaatgcacgctgcttacggcaagccagtgttcctcattggccattcgcttggttgcctgcatcttctctactttttgcttaggcaaccacaagcatggaaggacaggtttatcgacggatttatctctctgggggcgccttggggaggatcaattaagcccatgttggtgcttgcaagcggcgataaccaaggcattccgattatgtcatcgatcaaacttaaggaagaacagaggattaccactacttccccgtggatgtttccttcccgtatggcgtggcccgaagatcatgtgttcatctccactcctagctttaactatacgggaagggattttcaacgctttttcgccgatctgcatttcgaagaaggttggtacatgtggctccaatcccgagatcttctcgccggactgcctgcacctggcgtcgaagtgtattgtttgtacggcgtcggactccccacccccagaacctacatctacgaccacgggttcccttacactgaccctgttggagtcctgtacgaagatggtgacgatactgtggccaccagatccacggaactgtgtgggctttggcaagggcgtcaaccccagccggtgcaccttctgcccttgcatgggattcaacatctgaacatggtgttcagcaatctgaccttggagcatatcaacgcaatactgctgggcgcataccggcaagggcctccagcatcaccaactgcatcaccagagcctccacccccggag

SEQ ID NO: 15422 - DNA, 1320 bp, synthetic construct
  misc_feature 1..1320: note = source = /note="Description of Artificial Sequence: Synthetic coding sequence"
  source 1..1320: mol_type = other DNA
atgggtcctcctggtagcccttggcagtgggttacactattgttgggtttacttctccctcctgctgcacctttttggttactcaatgttctgtttccaccgcatacaactcctaaggctgagttgtctaatcatactaggcctgttattttggtacctggttgcttgggaaaccaattagaggccaaacttgataagccagacgtcgttaactggatgtgttatcgaaagaccgaggattttttcactatatggcttgatctgaatatgttcttgcctttgggtgttgattgctggatagataacacgagggtagtttacaatcgctcctctggtttggtctcgaacgctccgggagtacaaatccgagttcctggcttcggtaagacttattccgtggaatatttggattcctctaagctggcaggttatctgcatactttggtacaaaatcttgtgaacaatggatacgtgcgggatgaaactgtcagagcggcaccttatgattggcgtttggagcctggtcaacaagaggagtattataggaagctggcaggattggttgaggaaatgcatgctgcttatggtaagccagttttccttattggacattcacttggatgccttcaccttctatatttcttacttcgtcaaccacaggcttggaaggatcggttcattgacggatttatttcacttggtgcgccatggggaggaagcattaagcctatgttagttctggctagtggagataatcaaggaatacccatcatgagctctatcaagctaaaggaagagcaaagaatcacgaccacctccccctggatgttcccaagccggatggcctggcctgaggaccatgtgtttatctctactcccagtttcaactataccggacgtgactttcaacgattcttcgctgacttgcactttgaagaagggtggtacatgtggttgcaaagtcgtgatttgcttgctgggctacccgccccaggtgtcgaggtgtactgtctttatggtgtcggattacccacccctcgtacttatatttacgatcatggtttcccatataccgatccggtgggagtgctttacgaggacggagatgatactgttgcgacacgctcgacagagctttgcggcctgtggcaggggcgacagccgcaacctgtacacttgctcccactccatgggatccagcacctcaatatggtgttctcgaatcttacactagaacatattaatgctatattattgggagcatacaggcaaggccctccagcttcgcctactgcgtctccggaaccccctcccccagag

SEQ ID NO: 15423 - DNA, 1320 bp, synthetic construct
  misc_feature 1..1320: note = source = /note="Description of Artificial Sequence: Synthetic coding sequence"
  source 1..1320: mol_type = other DNA
atgggccccccgggaagcccttggcagtgggtgacgctcttgctcgggctcctgctgccgccagcggcgccgttctggctgcttaatgtgctgtttccgcctcatactaccccaaaggcggaactgtcaaaccatactcgcccagtcatcctggtgccgggatgcctgggcaatcagctggaagccaagctggataagcctgacgtcgtgaactggatgtgctacagaaagaccgaggacttctttactatttggctggacctcaacatgttcctgccgctgggagtggactgttggatcgacaatactcgagtggtctacaatcgctcgtcggggctggtgagcaacgctccgggcgttcaaattcgggtgccgggcttcggaaagacctattccgtggagtacctggattccagcaaacttgccgggtacctgcacaccctggtgcagaacttggtgaacaacggttacgtcagagacgagactgtgcgggccgctccgtacgattggcggctcgaaccggggcaacaggaggaatactaccgcaagctcgcaggactcgtggaggaaatgcacgccgcttacggaaagccagttttcctgatcggccacagcctcggatgcctgcacttgctgtacttcctcctgagacaaccgcaggcctggaaagacagattcatcgacggtttcatctctctcggagcaccctggggagggtcaatcaaacctatgctggtgctcgcatcaggagacaaccaaggtatcccgataatgtcgtccatcaagctgaaagaggagcaacgcatcaccaccacctcgccctggatgttccctagccgtatggcctggcctgaagatcacgtgtttatctcgactcccagttttaactacaccggacgggacttccaaaggttcttcgcagatcttcatttcgaagaaggatggtacatgtggttgcagtcacgcgatctccttgcgggattgccagccccgggagtagaagtctactgtctctatggagtcggcctccctacgccacggacctacatctacgaccacggattcccatacactgacccggtgggagtcctgtacgaagatggtgacgataccgtcgcaacgcggtccaccgagctctgcggcctgtggcagggaaggcagccgcagcctgtgcacctgttgccgcttcacggcatccagcatctgaacatggtgttttccaatctgactctcgaacatatcaatgccattctgcttggcgcctaccgccagggtccaccagcgtcgccgactgcttcccccgaaccgccacccccagag

SEQ ID NO: 15424 - DNA, 1320 bp, synthetic construct
  misc_feature 1..1320: note = source = /note="Description of Artificial Sequence: Synthetic coding sequence"
  source 1..1320: mol_type = other DNA
atgggaccacctggttcgccctggcaatgggtcaccctcttgctcggactgctgctgccgccagcagcgcctttttggctcttgaatgtgctctttccaccacataccacgcctaaggccgaactgtcgaaccacacccggcctgtgatcctggtgcctggctgtcttggtaatcaattggaagcaaaacttgacaagccagacgtggtgaactggatgtgttaccgcaagactgaggacttcttcaccatatggctggatctgaacatgttcctgccacttggtgtggattgttggattgacaacacccgcgtcgtgtacaaccggtcatccggactggtgtcgaatgctcctggggtgcaaatccgagtcccgggatttggaaagacctattccgtggaatacctggacagctcgaagctcgcggggtacctgcacacgttggtccagaacctcgtgaataatgggtacgtgagggatgaaacggtgcgggcggccccatacgattggagactggagccgggacaacaggaagagtactacagaaagctcgcgggactggtggaagagatgcacgccgcttacggtaaacccgtatttctgattggtcattcacttggatgtctgcatctgctgtattttctcctgcgccaaccccaggcgtggaaagatcgctttatcgatggtttcatcagccttggagccccatggggagggtccattaaaccaatgttggtgcttgcaagcggagataaccagggtataccaattatgtcgagcatcaagctcaaggaggagcaacggattacgactactagcccatggatgtttccttctcgaatggcctggccagaagatcatgttttcatttctactcctagcttcaactacactggtagagacttccaaaggtttttcgcggatcttcattttgaagaaggatggtacatgtggctgcagtcgagagatcttcttgccgggctccccgctcctggtgtagaggtgtattgcctctacggcgttgggctcccaacccctaggacttacatctacgaccacggatttccatacactgaccccgtcggcgtgctctatgaggacggagatgatactgtcgcaaccagatcgactgagctgtgcggcctttggcaaggtcgtcaaccacagcccgtgcatcttctgcccctgcatggtattcaacatttgaacatggtattttccaatctcactcttgaacacattaatgcaatccttctgggcgcttaccggcagggcccaccagcatcccctaccgcatctcccgaacccccaccgcctgaa

SEQ ID NO: 15425 - DNA, 1320 bp, synthetic construct
  misc_feature 1..1320: note = source = /note="Description of Artificial Sequence: Synthetic coding sequence"
  source 1..1320: mol_type = other DNA
atgggaccccctgggtcaccatggcagtgggtgactcttcttctcggactactcctgccacccgccgcccctttctggctactcaatgtcctcttccccccccacacaacacctaaggcagaactctcaaaccacacacggcccgttatcttagtgcccggatgtctcgggaatcagctggaggctaaactcgataaacctgatgtagtgaattggatgtgttacaggaaaacagaggacttctttacaatatggctcgatctgaacatgttcctcccactgggggtggactgctggatagataatacacgggtcgtgtacaaccggtcttcagggctagtttcaaacgccccaggagttcaaatacgggtcccagggttcggaaagacttactccgtagagtatttagattcctctaaactcgctgggtatctccatacactcgtccagaacctagtcaataatggatatgtacgggacgaaacagtccgggcagcaccatacgattggcggctggaacccggacagcaagaggagtattatcggaaactcgctggactagtggaagaaatgcacgcagcctatggaaaacccgtgtttctgatagggcactctcttggatgtcttcacctgctatattttctactccgtcagcctcaggcttggaaagacagattcattgacggatttatttccctgggagccccttggggaggaagtataaaaccaatgttggtgctcgcaagtggagataaccagggaattccaataatgtcttccataaaactcaaagaagaacagcggatcactacaacatctccttggatgttcccctctaggatggcctggcccgaagatcatgtattcatctctactccctctttcaactatactggacgggattttcagaggttcttcgccgatctgcattttgaagaagggtggtatatgtggctgcagagtcgggacctactcgctggactcccagcacccggagtggaagtctactgtttatatggagttggactcccaacacctaggacttatatctacgatcatggattcccttatacagatcctgtgggagtgctgtatgaagatggggatgatacagtcgctacaaggagtactgaactatgcgggttgtggcagggaagacagccccagcccgtacacttattaccacttcatgggatccagcacctgaatatggtgttctcaaaccttactttggagcacattaacgccatcttactcggagcctatcgccaggggccccccgcctcccccactgcctccccagaacccccaccacctgaa

SEQ ID NO: 15426 - DNA, 1320 bp, synthetic construct
  misc_feature 1..1320: note = source = /note="Description of Artificial Sequence: Synthetic coding sequence"
  source 1..1320: mol_type = other DNA
atgggaccgccagggagcccctggcagtgggtcacgcttctgctgggattattgctcccccctgcagcccccttctggttattgaatgtcctgttccctcctcacacaactcccaaagccgagctctctaatcacactcgtcccgtcatactggttcccggttgtctagggaaccagctggaggcaaagttggataagcccgacgtagtgaactggatgtgctaccggaaaactgaagatttcttcaccatatggctcgacttgaacatgtttttgcccttgggtgtggactgctggatcgataacacccgcgtagtgtacaatcgcagttcgggtctggtgtctaacgctccgggagtgcagatcagagtgcctggcttcggaaaaacctatagcgtggaatacctggactccagtaaactggcaggttatctccacaccctggtccagaacttggtgaataatggctacgttcgggacgagacggtgcgggcagcgccctatgactggcgattagaaccgggccagcaagaagaatattaccgtaagctcgccggcctagtggaagagatgcatgccgcctatggaaaacctgtctttctgatcggacattcactcggctgcctgcatctattgtacttcctgctgagacagccacaggcctggaaagaccggtttatagacgggttcatatccctcggcgccccatggggggggtccataaagcccatgctggtgttagcttcgggtgataatcaggggatacctattatgtccagcatcaaacttaaggaagaacagcggattaccactacctctccatggatgtttcctagcaggatggcgtggcctgaggaccatgtcttcatctcgaccccctcttttaactatacagggagggattttcagagattttttgcagaccttcactttgaggagggctggtacatgtggcttcagtcgcgcgatttactcgccgggcttccagccccaggagtggaagtgtactgtctttatggggttgggctgcccacccctcgtacttacatttacgaccacggctttccctatacagaccccgtgggggtcctttacgaggacggcgatgacactgtggccacccgttccactgagttgtgcgggctgtggcagggaagacagccccaaccagtccacctgctgcccctccatggcattcaacacttaaatatggtgttcagcaatctgacccttgaacacattaatgccatcttattgggtgcttaccggcaagggccccccgcatccccgacagcctccccggaacccccccctccagag

SEQ ID NO: 15427 - DNA, 1320 bp, synthetic construct
  misc_feature 1..1320: note = source = /note="Description of Artificial Sequence: Synthetic coding sequence"
  source 1..1320: mol_type = other DNA
atgggtcctcccggctccccctggcaatgggttaccctgctgcttggacttctcctccctccggcagcaccgttttggcttttgaacgtgttgttcccaccacacactacccctaaggcagagctgagtaatcacactcgtcctgttattctggtgccaggttgtctgggtaaccagctggaagccaagctggataagccagatgtagtgaattggatgtgttacagaaaaaccgaggacttcttcacgatttggctggatctgaacatgtttctgccactgggagtggactgttggattgacaatacccgagtggtgtataacagatcgtccgggctggtgagcaacgctcctggtgtgcagattagggtgccaggttttggtaagacctactcagtggagtacctggattcgtcgaaactggccggctacctgcatacccttgtgcaaaaccttgtcaataatggatacgtgcgggacgaaactgtcagagccgcgccatacgattggcgcttggaacctggtcaacaagaggaatactacagaaaactcgcgggactggtcgaagaaatgcatgcagcgtacggcaagcctgttttcctgataggtcattctctgggatgccttcatctgttgtatttcttgcttcgtcaaccccaggcctggaaagataggttcattgacggttttatctcactcggtgccccatggggaggatctatcaagcccatgctcgtcctggcaagcggtgacaaccaagggatcccgattatgagctcgatcaaacttaaggaggagcaaagaatcaccacgacttccccctggatgtttccttcgagaatggcctggcctgaagatcacgtgtttatcagcacccctagctttaactacactggaagagattttcaacggtttttcgccgatctgcattttgaggagggatggtacatgtggcttcagagccgcgatctcctggcagggctccccgccccaggggtggaagtctattgcctgtacggagtcggcctccctactccacggacttacatctacgaccacgggtttccatacacggatcccgtgggtgtcctttacgaggatggcgatgatactgtagccacccgcagcaccgaactctgtggcctttggcagggccgacaaccccagcccgtccaccttcttcccctccacggaatccagcatttgaatatggtcttttcgaacttgaccctggaacacattaatgcaatcctgcttggtgcctacagacaaggacccccagcatccccgactgcatcacctgaaccaccaccacccgag

SEQ ID NO: 15428 - DNA, 1320 bp, synthetic construct
  misc_feature 1..1320: note = source = /note="Description of Artificial Sequence: Synthetic coding sequence"
  source 1..1320: mol_type = other DNA
atgggcccacccggatcgccgtggcagtgggtgaccttgctcctcggcctgttgctcccaccggccgccccattctggttgctcaatgtcctgttcccaccgcacaccaccccgaaagctgagctgtcgaaccatacccgcccagtgatccttgtgccgggatgcctcggaaaccaactggaagcgaagctggacaagccggatgtcgtgaactggatgtgctaccgcaagactgaggatttctttaccatctggctcgacctcaatatgtttctgccactcggagtggactgttggatcgacaataccagagtggtctacaatcgcagctcaggactcgtctccaacgcacctggagtgcaaatcagggtgcctggattcggaaagacttattccgtcgaatacttggacagcagcaagctggccgggtacctccataccctcgtgcagaacttggtgaacaacggatacgtgcgcgacgagactgtcagagccgctccctatgattggcgcctcgaaccgggacagcaagaagaatactaccggaagctggcaggactggtggaggaaatgcacgcggcctacggcaagccggtgttccttatcggtcactccctcggctgcctccaccttctgtacttcctcctccgccagccacaagcatggaaggatcgctttattgacggcttcatttcgcttggagcgccatggggtggctcgatcaaaccgatgttggtcctcgcctccggcgacaaccagggtatcccaatcatgtcgagcattaaactgaaggaggagcaacggatcactaccacttcgccatggatgttcccatcgcgtatggcgtggccagaagatcacgtctttatcagcactccatcgttcaattacactggcagagatttccaaagattcttcgcagatctgcattttgaagaaggatggtatatgtggttgcaatcgagggatctcctggccggactgccagcgccaggcgtggaggtctactgtttgtacggcgtgggactgccgacgccgcggacgtacatctacgatcacggatttccctacaccgaccccgtgggtgtgctctacgaagatggcgatgatactgtcgccactagatccactgaactttgcggtctgtggcaggggagacagccgcagccggtgcatctgttgccgctgcacggaatccagcacctcaacatggtgttttccaatctgactctggagcacatcaatgctatcttgctgggagcctacaggcagggaccgccggcttccccaactgcctcgccggagccgcctcccccggaa

SEQ ID NO: 15429 - DNA, 1320 bp, synthetic construct
  misc_feature 1..1320: note = source = /note="Description of Artificial Sequence: Synthetic coding sequence"
  source 1..1320: mol_type = other DNA
atgggccctccgggaagcccctggcaatgggtcactctgcttctggggctgctgcttcctcctgcagcacctttttggctccttaacgtgttgttccctcctcacactacccctaaggcagagttgtccaaccatactcgccctgtgatccttgtgcctggctgtcttgggaatcaacttgaagcaaagttggacaagccggacgtggtgaactggatgtgttaccgtaaaactgaggacttctttactatttggctggatctcaacatgtttcttccgcttggagtcgattgctggatagacaacactagggtggtctacaaccgatcgtcaggacttgtcagcaatgcacctggtgtgcaaatcagggtgcccggattcggtaagacgtacagcgtggagtacctggattcatccaaactggcaggatacctgcacaccctggtgcaaaatctcgtcaataacgggtacgttagagatgaaacggttcgcgccgcaccctacgattggcgcctggaacctggtcaacaggaagaatactacagaaagctcgccggcctggtggaggaaatgcatgcagcgtacggtaagccggtgtttcttattggacactcactcggatgtctccatctcctgtattttctgttgaggcaaccgcaggcgtggaaggaccggtttatcgatgggtttatctcgctgggggcaccgtggggcggttcgattaagccgatgctggtgcttgcttctggtgataatcagggtattcctattatgagctccattaagctgaaagaagagcaacgtattaccaccacctccccgtggatgttccctagccgcatggcttggcctgaagatcatgtgttcatatcgactccgtccttcaattacaccggtagagacttccagcggttctttgcggatcttcattttgaagaaggttggtacatgtggctccaaagccgcgacctgctggcagggcttcctgcaccaggtgtcgaggtctactgtctgtacggggtcggcctgccaacgccacgcacctacatatatgaccacggattcccttacaccgatcccgtgggggtgctctacgaggacggtgatgataccgtagccactagaagcactgaactttgcgggttgtggcagggtcggcagccacaacctgtccaccttttgccgcttcatggaatccagcacctcaatatggtctttagcaaccttactcttgagcatatcaacgcaattctgctgggagcataccggcagggaccccctgcatctccaactgcatcccccgaaccaccgcctcctgag

SEQ ID NO: 15430 - DNA, 1320 bp, synthetic construct
  misc_feature 1..1320: note = source = /note="Description of Artificial Sequence: Synthetic coding sequence"
  source 1..1320: mol_type = other DNA
atgggaccgcccggatccccgtggcaatgggtgacgttactgctgggtctgttgttaccgccagccgctcccttctggttgttgaatgttctgtttccgccccataccacgcctaaggccgagctatctaaccacacccgtcctgtgatcctcgtccccggctgcttgggcaaccagctcgaggcgaagctcgataagcccgacgtcgtcaactggatgtgctaccgcaagacggaggacttcttcaccatctggctcgatcttaacatgttcctcccactcggtgttgattgttggattgacaacacgcgtgtagtgtacaaccgctcctcgggcctcgtttctaacgcccccggcgtacagatcagggtccccggatttggtaagacttattctgtcgagtatctcgattcatccaagcttgcgggatacctgcataccttagtccaaaatctggtcaataacggctacgtgcgggacgagaccgtccgtgccgccccctacgactggaggttagagcccggtcagcaagaggaatactaccgtaaacttgccggcttggtcgaggagatgcatgccgcctacgggaagccggtcttcctgattgggcattccctgggttgcctacacctgctgtacttcctactacgccagcctcaggcatggaaggaccgcttcatcgacggcttcatttcgctgggcgctccctggggcggctcgatcaagcccatgctagtcctggcaagcggagacaaccagggcatcccaatcatgagctctatcaaattgaaggaggagcagcggatcaccaccaccagcccctggatgttcccgtccaggatggcatggcctgaggaccatgtctttatctcgacaccgtccttcaattacaccggtagagactttcagaggttcttcgctgacctccacttcgaagaggggtggtacatgtggctccagtcgcgtgatctcctggcgggcctgcccgcgcccggagtggaggtttactgcctttatggcgtaggcctaccgaccccccgtacctacatttacgaccatggtttcccttataccgaccctgtcggtgtcctttacgaggacggcgacgatacggtcgcgacccggtctacggaactgtgtggcctgtggcagggacggcagcctcagcctgttcaccttctgcccctacatggcatccagcacttgaacatggtcttctccaacctgactcttgagcacatcaatgcaatcttgttgggcgcctaccgccagggccctcccgcgtcgcccactgcctccccggaaccgcctccacctgag

SEQ ID NO: 15431 - DNA, 1320 bp, synthetic construct
  misc_feature 1..1320: note = source = /note="Description of Artificial Sequence: Synthetic coding sequence"
  source 1..1320: mol_type = other DNA
atggggccacctggaagcccctggcaatgggtcacattgctcctcggtttgctactcccacccgccgccccattttggctgctcaacgttctgttccctccacacaccactcccaaagctgaactgagcaatcacacccgccctgtcattttagtgccaggctgtcttggaaaccagttagaggcaaagctagacaaacctgacgtcgtcaattggatgtgttaccgtaagaccgaggacttttttactatctggctcgatctaaacatgttcctacccctgggggtagattgttggattgacaacaccagggtagtgtataaccgctccagtggtctagtctctaatgccccaggagtccagatacgggtcccgggctttggaaaaacctattccgtggagtatctggacagttctaaactcgcgggttacctgcatactcttgtccagaatctcgtgaataacgggtacgtgcgtgacgagaccgtgcgagccgccccctacgattggcgcctggagccaggacagcaggaagagtactaccgcaagctcgcaggtctggtcgaggagatgcatgctgcatatggcaaacccgtttttctcattgggcacagtttagggtgccttcacctcctatattttttgctgcgccaacctcaggcgtggaaggacagattcatcgatggtttcatctccctcggagccccgtggggcggcagtatcaagcccatgctggtacttgcctcaggggacaaccagggtattccaattatgtctagtattaagctgaaggaggagcagcgcataactaccacctctccttggatgtttccctcccgtatggcctggccggaggatcacgtgttcatcagtacgccatcattcaattacacgggccgggatttccagagattcttcgctgatttgcacttcgaggagggctggtatatgtggctgcagagcagggatctgctagctgggttgcccgcgcctggcgtcgaagtttactgcctgtacggggtgggactcccgacgcccagaacatacatctatgatcacgggttcccctacaccgatcctgtcggcgtgctctatgaagacggagatgacactgtagcaactaggtcaactgagctgtgcggtttgtggcaaggtcgccagccccaacctgttcatctgcttcctctacatggaatacaacatttaaacatggttttttccaatctgacccttgagcacattaatgctattttactgggggcctacagacagggaccgccagcatctccaacagcgtcacccgagccccccccgcctgag

SEQ ID NO: 15432 - DNA, 1320 bp, synthetic construct
  misc_feature 1..1320: note = source = /note="Description of Artificial Sequence: Synthetic coding sequence"
  source 1..1320: mol_type = other DNA
atgggccctcccggatctccctggcagtgggtcactctgctcctcggtctgttgctgcccccggctgctcctttctggcttcttaatgtactgtttccccctcataccacaccaaaggccgagctcagtaaccatactcggcccgtgatcctggtccctggatgtctgggcaatcagcttgaagccaagcttgacaagccagatgttgtcaattggatgtgctaccgaaaaacagaggacttcttcacaatatggctggatctgaatatgttccttcctctaggggtagattgctggatagacaataccagagtggtgtacaacagatctagcggcctcgtgtctaatgctcccggcgttcagataagggtgccagggttcgggaagacgtactcagttgaatacctggatagttctaagctcgccggatacctgcacaccctggtccagaatctggtaaacaacggatacgtcagggacgagaccgtgcgggcggcaccttacgattggagactcgaaccagggcaacaagaagaatactatagaaagctggcgggcctggtggaggaaatgcacgctgcctatggcaaacctgtttttcttattggacactcactgggctgcctgcatctattgtatttcttgttgaggcaaccccaggcgtggaaggatagattcatcgacggctttattagcttaggcgcaccctgggggggttcaattaagcctatgctcgtcctcgcctccggcgataatcagggaatcccaatcatgtcatctattaaactgaaggaggagcaacggattaccaccaccagtccctggatgtttccaagccgcatggcatggccagaggaccacgtatttatttctacaccttcattcaactacactgggcgcgactttcagaggttcttcgcggatctgcattttgaggaagggtggtacatgtggctgcagtcgagggacctcctggccgggcttcccgctccgggagtcgaagtgtattgtctgtacggtgtcggcctgccaaccccacgcacatatatctacgaccacggatttccatacacggacccagtaggtgtcctatacgaggatggtgatgacacagtggccacaaggtcaaccgaattatgtggcctgtggcaggggcgccaaccgcaaccagtccaccttctgcctctgcacggaatacagcatctaaacatggtgtttagcaacctgactctcgagcacattaacgccatactcctaggagcctaccgccagggcccacccgccagccccaccgctagccctgagccgccccctcccgaa

SEQ ID NO: 15433 - DNA, 1320 bp, synthetic construct
  misc_feature 1..1320: note = source = /note="Description of Artificial Sequence: Synthetic coding sequence"
  source 1..1320: mol_type = other DNA
atgggccctccaggcagtccatggcagtgggtgacactgctgctgggcctcctcttgccacctgccgccccattttggctgctaaatgtgctgtttcccccccacactacacccaaggctgaactgtccaatcacacgcgcccagtgatcctggtgccggggtgcctcggcaatcagctggaggcaaagttagacaaacctgatgtcgtcaattggatgtgctaccgaaaaaccgaggacttttttacaatttggttggatttgaacatgttcctgcccttaggcgtggactgctggattgataacactagggtcgtttacaatagatctagcggactcgtgagcaatgccccaggggtgcagatccgtgtccctgggtttggcaagacttattccgtggagtatctcgactcaagcaaacttgcaggatatctgcacacattggtgcagaacttagttaacaacggttacgtgagagacgagactgtccgcgccgcgccttacgactggcggctggaacctggccagcaggaagaatattatagaaagctggccgggctcgtagaagagatgcacgctgcttacggcaagcccgtcttcctgattggccattctctcggctgcttgcacctgctgtactttcttctgcggcagccacaggcctggaaggacaggtttatcgacggattcatcagcttgggcgctccatggggagggagtattaaacctatgctcgtactcgcttcaggagacaaccagggaatccccataatgtcttctatcaagctgaaagaggagcaaaggattacaaccacctcgccatggatgttccctagccgaatggcctggcccgaagaccatgtgtttatctctaccccctcatttaactacacaggccgcgactttcagcgatttttcgcggatctgcattttgaagagggatggtatatgtggttgcagtctagagacttgctggccgggcttcctgcgcctggcgtcgaagtgtattgtctgtatggtgtcggtttgcctactccacgcacctatatatacgatcacggatttccgtatacagatcctgtgggtgtcctctatgaggatggagacgacacagtggctactagaagcacagagctgtgtggattatggcagggccgccaacctcagcctgtccacctgctgcccctgcatggcattcagcacctaaatatggtcttcagcaaccttactctcgaacacataaatgccatactgctgggtgcctaccgccaaggaccccctgctagccctacagcctcccccgaaccccccccgccggaa

SEQ ID NO: 15434 - DNA, 1320 bp, synthetic construct
  misc_feature 1..1320: note = source = /note="Description of Artificial Sequence: Synthetic coding sequence"
  source 1..1320: mol_type = other DNA
atgggccctcccggctctccctggcagtgggtcacacttctacttgggctgctgcttcccccagccgcacccttctggctgctcaacgtactctttcccccgcataccacccccaaagccgaactctctaatcatacccggcccgttatcctggtgcccggctgcttaggaaaccagctggaggccaagctggataaaccagacgttgtaaattggatgtgctacagaaagacagaggatttctttacaatttggctagacttgaacatgtttttgcccctcggcgttgactgctggatagacaacacgagagtcgtgtataaccgtagttcgggattggtgagtaacgccccaggggtgcagattagagtgcccggatttgggaaaacgtattcggtcgagtatcttgacagcagcaaactcgcgggctatttgcacactctggtacagaacctcgtaaacaacggatatgttagggacgaaaccgtgcgggcggctccgtatgattggcggctcgagcctgggcaacaggaagaatactacaggaagcttgccggcttagtggaggagatgcacgcagcctacgggaaacccgttttcttaataggtcattctctgggttgcctccacctgctgtacttcctcctgcggcagccacaggcgtggaaggaccggtttattgatggatttatctccctgggagctccttggggaggatcgatcaagccgatgctcgtactggcttcaggagacaatcaaggcattcctataatgagtagtattaaattgaaggaggagcagcgaataacaaccaccagtccgtggatgttccctagtaggatggcatggcccgaagaccacgtcttcattagtactccgagcttcaattacacagggcgggacttccagcggttcttcgctgatcttcattttgaagaggggtggtatatgtggctccagtcccgcgaccttctagcgggcctgcccgccccaggtgtcgaggtgtattgtttatacggggttggcctcccaactcctcgtacgtacatttatgaccacggatttccctataccgatcctgtgggggtcctctacgaagatggggatgacactgtggccacacgatccaccgagctgtgtgggttgtggcagggccgacagccacaaccggtgcatctgctgcctctgcacggaatacagcatctgaatatggtgttttctaacctgaccctggaacatattaacgcgatcctgctcggggcataccgccagggcccccctgccagccctacagcttcaccagagccaccccctcccgag

SEQ ID NO: 15435 - DNA, 750 bp, synthetic construct
  misc_feature 1..750: note = source = /note="Description of Artificial Sequence: Synthetic coding sequence"
  source 1..750: mol_type = other DNA
atggcagataactttagcctccatgatgcactgagcgggtcaggtaaccccaacccccaaggatggccgggtgcttggggcaaccagcccgcaggcgccggcggttaccctggagcatcgtacccaggcgcatatcctggtcaggcaccgcctggggcataccctgggcaagcacctccaggagcctaccctggcgctcctggtgcatacccaggtgcgcctgcaccgggtgtctaccccgggccgccatcggggcctggcgcatacccctcgtcaggccaaccatccgcaacgggagcctaccccgccacgggaccatacggcgcaccggcaggcccactcatagtgccttataacttgcctctccccgggggcgtggtgccacgcatgctcattaccattcttggaaccgtcaaacctaatgcaaaccgtatagcgcttgatttccagagaggaaatgacgtcgcgttccatttcaatcccagatttaacgaaaacaacagacgcgtgatcgtgtgtaatactaagctggataacaattggggccgggaggaacggcagtcggtgtttccttttgaatcgggaaagccgttcaagatacaagtgcttgtggagcccgatcatttcaaggttgcggtcaacgatgcacaccttcttcaatacaaccatcgagtgaaaaaactgaacgaaatttccaaacttggtattagcggcgatatcgacctgactagcgcatcatatacgatgatt

SEQ ID NO: 15436 - DNA, 750 bp, synthetic construct
  misc_feature 1..750: note = source = /note="Description of Artificial Sequence: Synthetic coding sequence"
  source 1..750: mol_type = other DNA
atggccgataacttttccttgcacgacgcactgagcggatctggcaatcccaatcctcaaggttggcctggcgcgtggggaaaccaacccgctggtgctgggggctacccaggggccagttatccaggtgcgtacccaggccaagccccgcctggggcctatcccggtcaggcaccaccaggcgcttatcccggagcccctggtgcatatcccggggccccagctccaggggtgtaccctgggcctccttccggccccggtgcctacccatcctcaggccagccgtccgccactggagcctatcccgccaccggaccctacggagctccagcgggaccactgattgtgccttacaatctccccctgccaggcggcgtggtgcctcggatgcttatcacgattctgggcaccgttaagcccaacgcaaaccggatcgctcttgatttccaacgggggaacgacgttgctttccactttaaccctagattcaatgaaaataaccgccgcgtcatcgtgtgtaatacgaagttggataacaactggggaagggaagaaaggcagagcgttttcccttttgagagcggtaaaccctttaagatccaggtgcttgtggagccagatcactttaaggtggccgtgaatgatgcacacctccttcaatataaccaccgggttaagaagctcaatgagatctcaaagctcggaatcagtggagacatagatctcacctccgccagctacaccatgatc

SEQ ID NO: 15437 - DNA, 750 bp, synthetic construct
  misc_feature 1..750: note = source = /note="Description of Artificial Sequence: Synthetic coding sequence"
  source 1..750: mol_type = other DNA
atggcagacaacttctctcttcatgacgccctctcaggatcgggcaaccctaacccgcagggatggccaggcgcatggggaaatcaaccggctggagcaggtggttaccctggtgcctcctaccccggggcgtacccaggacaggcccctccaggcgcatacccaggtcaggcgcctcctggcgcgtatccgggagcccccggcgcttacccgggggccccggctcctggagtgtaccctggtccgccctcgggacccggagcctacccatcatcagggcaaccatccgcgacgggggcataccccgcgaccggcccgtacggagccccggccggaccgctcatcgtcccgtataatctgccattgccaggaggtgtcgtcccgcgcatgttgatcaccattttgggtactgttaaaccaaacgccaaccgaatcgccctggactttcagcgcggcaacgatgtggcgttccacttcaatccacgcttcaacgaaaataaccggcgggtcattgtgtgcaacactaagctggacaataactggggacgggaggaaagacaatcggtcttcccattcgagtcgggtaaaccgtttaagatacaggtgctggtggagcctgaccactttaaggtggccgtgaatgatgctcatcttctgcaatacaatcaccgcgtgaagaagctcaacgaaatatccaagctcggaatctcgggagacatcgatctcaccagcgcaagctatactatgatc

SEQ ID NO: 15438 - DNA, 750 bp, synthetic construct
  misc_feature 1..750: note = source = /note="Description of Artificial Sequence: Synthetic coding sequence"
  source 1..750: mol_type = other DNA
atggctgataacttctctctccacgacgctttgtcaggctcaggaaaccccaacccacagggttggcccggagcctggggcaaccagcccgccggcgctggaggctaccccggcgccagctatccaggtgcttaccctggtcaggcccctcctggagcctaccctggacaagccccacccggcgcttaccctggtgctcctggagcttacccaggagctcctgccccaggcgtctaccccggccctccctctggccctggagcttatccttctagcggacaaccttccgccaccggtgcctaccctgctaccggtccctacggcgctcccgcaggtcccttgatcgtcccatacaatctccctttgcctggcggcgtggtaccccgcatgctcatcacaatactgggcacagtgaaaccaaatgcaaaccgcatcgccctggattttcaaagaggtaatgatgttgccttccattttaaccctagattcaatgaaaataatcgccgcgttattgtttgcaatactaaactcgataataattggggcagagaggagcgccaaagcgttttcccattcgaatctggcaagccattcaagattcaggttctggtcgagcccgaccacttcaaagttgcagtaaatgatgctcatctcttgcagtataatcaccgcgttaaaaagctcaacgagatctccaaactgggcatctctggcgacatcgaccttacttccgcctcctatactatgatc

SEQ ID NO: 15439 - DNA, 750 bp, synthetic construct
  misc_feature 1..750: note = source = /note="Description of Artificial Sequence: Synthetic coding sequence"
  source 1..750: mol_type = other DNA
atggctgataacttttccctccacgatgcgctgtccggttcggggaacccgaacccccaagggtggccaggagcgtggggtaatcaaccggccggagcaggcggatacccgggagcgagctacccgggtgcctatcccggccaggcacccccgggtgcttaccccgggcaggcccctccaggtgcgtacccgggcgccccaggagcctacccaggagccccggccccgggggtgtacccaggcccgccctcgggccctggagcgtacccgtcctcaggccagccatccgcgactggagcctaccctgccaccgggccttacggagcaccagccgggccgctgatcgtcccgtacaacctgcctctgcccggcggcgtcgtgccaaggatgctgatcacgatcctcggcaccgtcaaacctaacgctaaccgcatcgcgctggacttccagcgcggaaatgatgtcgccttccatttcaatcctaggttcaacgaaaacaaccgcagggtgatcgtgtgcaacactaagctggacaataactggggaagggaggaaaggcaatcagtctttcctttcgaatccggcaagccgtttaagattcaggtgctggtggagccggatcactttaaggtggcagtgaatgacgcccatctgctgcaatacaatcacagagtgaagaaactgaacgagatttcaaaactgggaattagcggggacattgatttgacctcggcctcgtacactatgatc

SEQ ID NO: 15440 - DNA, 750 bp, synthetic construct
  misc_feature 1..750: note = source = /note="Description of Artificial Sequence: Synthetic coding sequence"
  source 1..750: mol_type = other DNA
atggctgacaatttctcgctgcatgacgcactttcgggatccggcaacccaaaccctcaaggatggccaggagcttgggggaaccagcccgcaggagctggaggttacccgggtgcatcctatccgggggcttaccctggtcaagcaccacccggagcataccctggacaggcacctcctggtgcatatccaggggcaccaggagcataccccggagcgccagcgcccggcgtgtacccgggtcctccttcgggtcctggagcatatccgtcctccggacagccatcggcgaccggggcataccctgcgaccggcccatacggagcaccagcgggtccattgatcgtcccatacaacctccctctcccggggggtgtcgtcccacgcatgctgataaccatacttgggactgtgaagccaaacgcgaatcgcatcgcgctggactttcagcgaggaaacgatgtcgcgtttcactttaatccaaggtttaacgagaataacagaagagtcatcgtctgtaacaccaagctggacaacaactggggtagagaagaacgccaatccgtttttccattcgagtcaggaaagcctttcaaaattcaagtgctcgtggaaccagatcactttaaagtcgcagtgaacgatgcgcatcttcttcagtacaatcaccgtgtgaaaaaacttaacgagataagcaagctgggcattagcggggacattgatcttaccagcgcctcttacactatgatt

SEQ ID NO: 15441 - DNA, 750 bp, synthetic construct
  misc_feature 1..750: note = source = /note="Description of Artificial Sequence: Synthetic coding sequence"
  source 1..750: mol_type = other DNA
atggccgacaatttctcccttcatgatgctctctctggctccggcaatccaaaccctcaaggatggcccggagcatggggtaatcaaccagcaggagctggtggttaccctggtgcttcttaccccggagcttatcccggtcaagcacctcccggcgcttatcctggtcaagccccacctggggcttaccctggtgcccctggagcttatcccggtgccccagcccctggagtgtatccaggtccaccgtccggaccaggagcttatccgtcgtctggccagccctcagctaccggagcttatccagcaaccgggccttatggagcacctgctggtccgcttatagttccatataatctcccattacctggtggtgtggtacctcgtatgctaattactatattgggcaccgtcaagcctaacgccaataggatcgctttggactttcaaaggggtaatgatgttgcttttcatttcaatcccaggtttaatgaaaataacaggcgagtgatcgtttgcaacactaagttggataacaattggggacgggaagagcgccagtcggtttttccattcgaatctggtaaaccattcaaaattcaagtccttgttgaaccggatcattttaaagttgcagttaatgatgcccacttactccagtacaatcatagggtcaaaaagctgaatgagatctctaagctcggaatatcaggagatatcgatttaacttccgcatcgtataccatgata

SEQ ID NO: 15442 - DNA, 750 bp, synthetic construct
  misc_feature 1..750: note = source = /note="Description of Artificial Sequence: Synthetic coding sequence"
  source 1..750: mol_type = other DNA
atggcagacaatttctcactgcatgacgctttgtccggctcggggaacccaaacccgcagggatggccaggagcttggggcaaccaaccggcaggagcgggagggtaccctggtgcttcgtaccccggagcctacccgggacaggccccgccgggcgcttacccaggccaggccccaccgggggcatacccgggagccccgggagcataccccggagcacccgcccccggggtgtatccgggaccaccatccggaccaggagcgtacccctcgtctggacaaccgtcagcgaccggcgcgtaccccgccaccgggccatacggagctccggccggaccactcatcgtcccttacaacctgccgctccccggtggagtggtgccgcgcatgcttatcactatcctggggactgtgaagcccaacgccaacaggatcgcgctggattttcagcggggcaacgacgtcgcgttccatttcaatccacgcttcaatgaaaacaatcgcagggtgatcgtgtgcaacactaagctggataacaattggggaagggaagaacgccaatctgtgtttcctttcgagtcaggaaaacctttcaaaattcaagtcctcgtggagccggaccatttcaaggtggcggtgaatgacgcgcacctgctgcagtacaaccaccgtgtgaagaagctgaacgagatctccaaacttggaatctcgggtgacatcgacctgacctccgcgtcgtatactatgatt

SEQ ID NO: 15443 - DNA, 750 bp, synthetic construct
  misc_feature 1..750: note = source = /note="Description of Artificial Sequence: Synthetic coding sequence"
  source 1..750: mol_type = other DNA
atggccgataacttctcgcttcacgacgccctgagcgggtcgggaaatccgaatcctcagggttggcctggggcctggggcaaccagcccgccggcgctggtgggtatcctggagcaagctacccaggcgcgtaccccggccaggcacctcctggggcatatccaggccaagcccctcctggcgcctatccaggcgcccccggagcctatccaggcgcccctgccccaggcgtgtaccccggtccccctagtgggccgggcgcatatcccagcagcggacagccaagtgctactggggcttatcccgccactgggccatacggcgctccggccggccctcttattgtaccgtacaacctcccactgcctggaggcgtggtgcccagaatgttgataaccatcttgggaaccgtgaagccgaacgccaaccggatcgcgctggactttcagagaggaaacgacgttgcgttccactttaacccacggttcaatgagaacaaccggcgtgtgatcgtctgcaacactaagttggataataactggggaagagaggagcggcagtctgtcttcccgttcgagtctggaaagccctttaaaatccaggttctcgttgaaccggatcactttaaagtggcggtcaatgacgcacacctcttacagtataatcatcgagtgaaaaagttgaacgagatcagtaaactagggatttctggcgatatcgacctgacctccgcttcttacaccatgatc

SEQ ID NO: 15444 - DNA, 750 bp, synthetic construct
  misc_feature 1..750: note = source = /note="Description of Artificial Sequence: Synthetic coding sequence"
  source 1..750: mol_type = other DNA
atggcagacaatttctccctgcacgacgccctgtctggtagtggaaatcccaacccccaggggtggcccggggcttggggcaaccagccagcgggcgccgggggatatccaggggccagctatcctggggcataccccggtcaggcccctccgggcgcctaccctggtcaggctccacccggcgcatacccgggcgctcctggtgcataccccggcgcacctgcacctggagtctatccaggtccaccatcggggcctggcgcttaccctagctctggccagcctagcgcgacaggtgcgtaccccgctacgggaccctacggggcccccgcaggacccttaatcgtcccttataatcttccgctgccagggggcgtggtccctcggatgttgattaccattctgggcacggtgaagccaaacgccaaccgaattgccttggatttccagaggggtaacgacgttgccttccacttcaatccccgttttaatgaaaataatcgcagagttatcgtttgtaatacaaaattggataataactgggggagagaggagcggcagtccgtgtttccattcgagagtggtaagccgttcaagatacaggtgttggtggaacctgaccacttcaaggttgcagtgaacgacgcccaccttttgcagtacaaccatagggtgaaaaagctgaatgagatcagcaagctgggaataagcggcgatattgatctcacatctgcttcttatacgatgata

SEQ ID NO: 15445 - DNA, 750 bp, synthetic construct
  misc_feature 1..750: note = source = /note="Description of Artificial Sequence: Synthetic coding sequence"
  source 1..750: mol_type = other DNA
atggccgacaatttcagcctccacgacgccctttccggatcaggcaaccctaacccacagggctggccgggtgcatggggaaaccaacctgccggggcaggaggttaccccggcgcatcatacccgggggcatatccgggacaagcgccacctggggcctaccccggccaagctccgcctggagcatacccgggcgcaccgggagcgtacccgggagcaccagcccctggagtctacccagggccgccctccggacctggagcgtatccatcttccggccagccgtcggccaccggagcttacccagccactggaccatacggagcaccagcaggcccgttgatcgtgccgtacaacctgcccctccccggaggagtggtgccacggatgctgatcaccattttgggcactgttaagcccaacgctaaccgcatcgcactcgacttccagcggggtaatgatgtggcattccacttcaatccaagattcaacgaaaacaaccgcagagtgatcgtgtgcaacactaaactcgataacaactgggggcgggaggagcgtcaaagcgtgtttccgttcgaaagcgggaagcctttcaagatccaggtgctggtggagccggatcactttaaggtcgccgtgaatgatgcacatctgttgcagtacaatcaccgggtgaagaagctcaacgaaatcagcaaactgggcatttcgggagacattgacctgacctcggcttcatacaccatgatc

SEQ ID NO: 15446 - DNA, 750 bp, synthetic construct
  misc_feature 1..750: note = source = /note="Description of Artificial Sequence: Synthetic coding sequence"
  source 1..750: mol_type = other DNA
atggcagataacttctctcttcacgatgcattgtccggatctggtaacccgaatccgcagggctggccaggcgcttggggaaatcaacctgcaggcgctgggggctatcccggcgctagctatcctggagcatatcccggacaagcaccgccgggagcttatccgggacaggcgccgccgggagcatatccgggagcgcctggagcctatccgggcgcgccggcgcctggagtctatccaggcccgccttcgggtcctggcgcatacccttcctcgggccaaccttcagcgacgggagcatacccggcgacaggaccgtatggggctccggccggacctttgattgtgccttataacttaccgctccctggtggagttgtcccaagaatgcttataacaatccttggtacagtcaaaccgaacgctaatagaattgccctggattttcaacgagggaatgatgtggcattccattttaacccgagatttaacgaaaacaaccggcgcgtaatcgtatgtaatacaaagctggacaacaactggggccgcgaagagcgccagagcgtctttccgttcgaatcgggcaagccttttaagatccaggtccttgtagagccggaccactttaaagttgcggttaatgatgctcatctattacaatataatcacagagtgaaaaaactgaatgagatcagcaaacttgggatatcaggggatattgacctgacgagcgcatcatatacaatgatt

SEQ ID NO: 15447 - DNA, 750 bp, synthetic construct
  misc_feature 1..750: note = source = /note="Description of Artificial Sequence: Synthetic coding sequence"
  source 1..750: mol_type = other DNA
atggccgataacttctcactgcatgacgccttatcgggatccggtaaccccaaccctcaggggtggccaggcgcctggggcaaccagccggccggagcaggaggttatcctggggcctcttatcccggggcttatccagggcaagctccacccggagcctacccagggcaagctccgcccggcgcgtacccaggggccccgggggcctacccaggggcaccagcgcccggcgtataccctggtccgccttcggggcctggcgcttatccttcttcagggcagccgtctgcaaccggcgcatatcccgcaactggcccgtacggcgcacctgccggccccttaattgttccctataacctcccactgcctgggggggttgttccccggatgctcatcaccatattggggaccgtaaagccaaacgcaaacagaatagccctggatttccagagaggtaatgatgtggcctttcactttaaccctaggtttaatgaaaacaaccgccgtgttattgtgtgtaataccaaattagacaacaattgggggagagaagaaaggcagtctgtatttccttttgaatccgggaaacccttcaagattcaggttctcgtagaaccagaccatttcaaggtagctgtcaacgatgcccacttactccagtataaccacagggtgaaaaaactgaatgaaatctcgaaactggggattagcggcgatatcgatttgacctcagcaagttacaccatgatt

SEQ ID NO: 15448 - DNA, 750 bp, synthetic construct
  misc_feature 1..750: note = source = /note="Description of Artificial Sequence: Synthetic coding sequence"
  source 1..750: mol_type = other DNA
atggccgacaacttcagcctacacgacgctctgtctgggtcaggcaaccccaatccccagggatggcccggagcttggggaaatcagccagcgggggctggtggttacccaggagcatcctaccccggcgcttatccggggcaggcgcctccaggggcctatccagggcaggcacctccaggggcttacccaggtgctccgggcgcttatccaggagcgcccgcccccggggtttaccccggccctccttccggtcctggggcttacccctctagcggacagccctcagccaccggcgcataccctgcgaccgggccatatggggctcctgccggacccctcatagtgccatataatctacccctgcccgggggcgtcgttcctcgcatgctgatcaccatactgggaaccgtaaaacccaatgctaatcggattgcactcgacttccagcgggggaacgacgtcgcctttcatttcaacccaagattcaacgagaataatcggagagttatcgtctgcaacaccaagctggacaataattggggtagagaagagagacagtccgtgttccctttcgaatctggcaaaccatttaagatacaggtgttggtggagcccgaccacttcaaagtggccgtgaacgacgcccacttactccagtacaaccaccgggttaagaaactgaatgagatctcgaaactgggtatctctggcgacatcgatctgacaagcgcctcttacactatgatc

SEQ ID NO: 15449 - DNA, 750 bp, synthetic construct
  misc_feature 1..750: note = source = /note="Description of Artificial Sequence: Synthetic coding sequence"
  source 1..750: mol_type = other DNA
atggcagataatttcagtcttcatgacgcactcagcgggtctggcaatccgaatcctcagggctggccgggcgcctgggggaatcaaccggccggggcaggcggctaccctggcgcctcttatcctggggcctaccctgggcaggccccccccggcgcctacccaggacaagccccaccgggcgcctatcctggagcacctggagcttatcccggagcccccgctcctggggtgtatcccggccccccttctggacctggcgcatacccctccagtggacagccatccgcgaccggagcctatcccgccaccggaccatatggggcccctgccgggcccctcattgttccctataatctgccactgccaggaggcgtggttcctcggatgctcattaccattctgggcaccgtgaagccaaacgctaatcggatcgcactggactttcagcgtgggaatgatgtggcctttcacttcaaccctcgctttaatgagaacaatcgtcgcgtcatcgtgtgtaatacaaagcttgataataactggggccgagaggagcgccagtccgtgtttccattcgaaagcggaaagcctttcaagatccaggtgctggttgaacctgaccatttcaaggtggctgtgaacgatgcacatctgctgcaatataatcaccgggtaaagaaactcaatgagatcagcaagttgggcatttctggcgacatcgatctcaccagtgcatcatacactatgatc

SEQ ID NO: 15450 - DNA, 750 bp, synthetic construct
  misc_feature 1..750: note = source = /note="Description of Artificial Sequence: Synthetic coding sequence"
  source 1..750: mol_type = other DNA
atggctgataacttctctttgcacgacgccttgagcggatcaggaaacccaaatcctcaaggatggccgggagcctggggaaaccagccagcaggcgctggcggttacccaggggcaagctacccaggtgcgtaccccggacaagcgcctcctggggcatatccgggtcaggcaccacctggggcgtacccaggagcaccaggtgcatatcccggagcacctgcaccgggcgtttaccctggaccaccttcggggccaggagcatatccctcctcagggcaaccgagcgcaactggcgcatacccagccaccggaccttatggtgcgcctgccggtccactgatcgtgccctacaacctccctctgccgggaggagtggtccctcgcatgttgatcactatcctcggtactgtgaaacctaatgctaacagaatagctcttgattttcagcgcggcaacgatgtggcatttcatttcaacccccggtttaatgaaaacaatagacgggtgattgtgtgtaatacgaagctggataacaattggggacgcgaagagagacaaagcgtattcccttttgagtccggaaaaccatttaagattcaagtgctcgtggaacctgatcactttaaggtggcagtgaatgacgcacatttgctgcagtacaaccatcgagtgaagaagctgaacgagatttcgaagttgggaatctcaggcgatatcgatcttacttcggcttcctacaccatgatt

SEQ ID NO: 15451 - DNA, 750 bp, synthetic construct
  misc_feature 1..750: note = source = /note="Description of Artificial Sequence: Synthetic coding sequence"
  source 1..750: mol_type = other DNA
atggctgacaatttctccttgcacgatgcactttctggatcgggtaatccaaatcctcagggctggcccggagcatggggcaaccaaccggctggagccgggggatacccgggtgcatcgtaccctggagcataccccggacaagccccacctggtgcctacccaggtcaagcccctcctggtgcatacccaggcgcacccggagcttacccaggagcaccggcccccggtgtgtaccctggacctccatccgggccgggtgcttacccttcctcaggacaaccttccgcaactggcgcctaccctgcaaccggaccttacggggcacctgccggccctcttattgtcccctacaaccttcctctcccaggaggagtggttcctagaatgctgatcaccattcttggaactgtgaagccaaacgcaaacagaattgcactggactttcagcgaggcaacgatgtggcgttccatttcaaccctcggtttaatgaaaacaaccgtagagtgattgtgtgtaacactaagctggataacaactgggggcgggaggaaagacagagcgtgttccctttcgaatccggcaagccattcaagattcaggtgctggtggaacctgaccactttaaggtcgccgtgaatgatgcacacctgctccaatacaatcatcgcgtcaagaagctcaacgagatctccaagctgggcatttcgggtgacatagatcttacttcggcaagctacactatgatt

SEQ ID NO: 15452 - DNA, 750 bp, synthetic construct
  misc_feature 1..750: note = source = /note="Description of Artificial Sequence: Synthetic coding sequence"
  source 1..750: mol_type = other DNA
atggcagacaacttctcgttgcatgatgcactgtcgggaagcggtaatccaaatccccaaggatggcccggcgcgtggggcaatcaaccagccggcgcagggggctaccccggggcaagctaccccggtgcataccctggtcaggcaccaccaggggcatatccagggcaagcgccaccaggtgcatacccaggagctccaggtgcgtaccctggagcaccagcgcctggtgtgtacccaggaccccctagcggtccgggagcatacccctcgtcgggtcaaccgtcggccactggcgcatacccagccactggaccctacggtgccccggccggtccactgattgttccctacaatcttcctcttccaggtggtgtggtgcctcgcatgctgattactattctgggtactgtgaaacctaacgccaacagaattgccctggactttcaaagaggaaatgatgtcgcattccatttcaatccacggttcaatgaaaacaacagaagagtgatagtgtgtaacactaagctcgacaacaattgggggcgtgaagagcgccaaagcgtgtttccttttgagtccggaaaaccgttcaaaattcaagtcctggtggagcccgatcatttcaaggtggcagtgaacgacgcacaccttcttcagtacaaccatcgggtcaagaagttgaatgaaatctccaagctgggaatttccggcgacatagaccttacctccgcatcttacacgatgatc

SEQ ID NO: 15453 - DNA, 750 bp, synthetic construct
  misc_feature 1..750: note = source = /note="Description of Artificial Sequence: Synthetic coding sequence"
  source 1..750: mol_type = other DNA
atggcagataacttctcgctgcatgatgctttgagcggaagcgggaaccctaaccctcaaggatggccgggagcctggggcaatcagccagccggcgcaggaggctacccgggagccagctacccaggagcttaccctggacaggcaccgcccggagcctacccgggacaagccccgcctggagcgtaccctggagctcccggcgcttacccgggagcgccagccccaggcgtgtacccgggaccgccatcgggtcctggcgcatatccgtcatcgggccaaccgtcagcgacgggcgcgtacccagctaccggaccctatggcgctccggctggcccattgatcgtgccatacaatctgccgctgccgggcggagtggttccacgcatgcttatcactatcctgggcacggtcaagccgaatgcaaatcggattgcactggactttcagcggggtaatgatgtcgctttccatttcaacccacgctttaatgagaacaaccgcagagtgatcgtctgcaacaccaagttggacaacaactgggggcgggaagagcgccagagcgtgttccctttcgagtccgggaagccatttaagattcaggtgcttgtggagcccgaccacttcaaagtcgccgttaatgatgcacacctcctgcagtacaatcacagggtcaagaaactcaacgaaatctcgaagctcggaatctccggagacatcgacctgacttcggcttcctacaccatgatc

SEQ ID NO: 15454 - DNA, 750 bp, synthetic construct
  misc_feature 1..750: note = source = /note="Description of Artificial Sequence: Synthetic coding sequence"
  source 1..750: mol_type = other DNA
atggcagacaattttagcctgcatgatgctttgagcggttcggggaaccctaatcctcaggggtggccaggggcatggggcaaccagccagctggagcaggcgggtacccaggagccagttatcccggagcgtacccgggccaggcccccccaggggcgtaccccggccaggcgccaccaggtgcttatccgggcgctccaggagcctacccgggggctcccgcaccgggcgtgtatcccggtccccctagcggaccgggagcctacccctccagcggacaaccatcagccaccggagcataccccgccaccggtccatatggcgctcctgccggtccattgattgtgccttacaatttgccattgcccgggggtgtggtaccccgcatgttgattaccattctgggtacagtgaaacctaacgccaatagaattgcccttgactttcagcggggcaatgacgtggccttccattttaacccacgttttaatgaaaataatcgcagggtcattgtctgcaacaccaagctcgataataactggggtcgagaggagaggcagagtgtcttccctttcgaaagcggaaagcccttcaaaattcaggtcctagtggagcctgaccactttaaggtggctgtgaatgacgcacatcttttgcaatataaccatcgggtgaaaaagttgaacgagatctcgaagctcggcatctctggggacatcgacctcacatctgcgtcttataccatgatc

SEQ ID NO: 15455 - DNA, 750 bp, synthetic construct
  misc_feature 1..750: note = source = /note="Description of Artificial Sequence: Synthetic coding sequence"
  source 1..750: mol_type = other DNA
atggcggacaatttcagcctccatgatgcactttccggatcgggaaaccctaaccctcagggttggccgggcgcctggggaaaccaaccagcaggcgcaggtggttaccctggagcttcctacccgggcgcctacccaggccaagcacctccaggagcctacccaggtcaagccccgcctggagcataccctggtgccccaggagcttacccaggcgcacctgcccctggggtgtaccctggacccccgtcggggccaggagcatatccctcttcgggtcagccatctgctactggtgcatacccagccaccggaccctacggcgcacccgcaggacctttgatagtgccctacaatcttccactgccaggcggagtcgtgccccgcatgttgattactatcctgggcaccgtgaagcccaacgctaatagaatcgcactggactttcagaggggcaatgacgtcgcttttcactttaaccctagattcaacgaaaacaatcgacgagtcatcgtgtgcaacactaaacttgacaataactggggtagggaagagcggcagtcagtctttccatttgaatccggaaagccatttaagatccaagtcctggttgaacctgatcactttaaggtggccgtgaacgatgcccatctgctccagtacaaccaccgggtcaagaaactcaacgagatttctaagctcggtatttcaggtgacattgatctcacctcagcctcctacaccatgatc

SEQ ID NO: 15456 - DNA, 750 bp, synthetic construct
  misc_feature 1..750: note = source = /note="Description of Artificial Sequence: Synthetic coding sequence"
  source 1..750: mol_type = other DNA
atggctgacaacttttccctgcatgacgccctctctggttcaggaaacccaaatccgcagggatggcctggagcctggggtaaccagcctgccggggccggaggctacccgggagcttcgtacccgggagcgtacccaggacaagcgccgccgggcgcatacccgggacaggcccctcccggggcgtatccgggcgcgccgggcgcgtacccgggggcgccggctcccggcgtgtacccaggtccgccgtcgggaccaggtgcttacccgtcatcaggacagccttcggccacgggcgcctacccggcgaccggtccgtacggtgcgccagccggaccgctgatcgtgccatacaacctcccactccccggaggagttgtcccaagaatgttgatcaccatccttggcacggtcaagcccaatgccaataggattgcgctggacttccagcggggcaacgacgtggcgttccatttcaatcctagattcaacgagaataaccggcgcgtcattgtgtgcaataccaagctggacaacaattggggacgcgaagagagacagtccgtctttcctttcgaaagcggaaagcctttcaagatccaggtgctggtggaaccggaccactttaaggtggctgtcaatgacgctcatctcctgcaatacaaccaccgggtcaagaagctgaatgagatctcaaaactgggtatctcgggcgacatcgacctgacttcagcctcgtacactatgatt

SEQ ID NO: 15457 - DNA, 750 bp, synthetic construct
  misc_feature 1..750: note = source = /note="Description of Artificial Sequence: Synthetic coding sequence"
  source 1..750: mol_type = other DNA
atggcggataacttctctctgcacgatgccttgtccggctcaggaaatccaaacccccagggatggccgggagcctggggtaaccaacccgccggggccggcggataccctggggcctcctatccgggtgcttatccagggcaggcaccccccggcgcgtatccaggtcaagctcccccaggggcctatccaggggcccccggtgcctatcccggcgccccggctcctggcgtgtatcccgggccaccttcagggccgggtgcttatcccagctctggacaaccatctgcaaccggcgcctatccagccaccgggccatacggcgccccagccggacctctgattgtgccttataacttgccactccctggaggcgtggtgccccggatgcttatcacaatcctggggaccgtgaagcctaacgcaaatagaatcgctctggactttcaacgagggaacgacgtcgccttccacttcaatccccgcttcaacgagaataacagacgggtaattgtatgcaatacaaagttggataataactgggggcgggaggagcggcaatccgttttccctttcgagagcggtaagccctttaaaatacaggtgctggtggagcccgaccacttcaaggttgcagtgaacgacgcccacctcctacagtataaccaccgagtgaaaaaactgaatgaaattagcaagctgggaatttctggcgacatcgatctgactagtgcgtcctacacaatgatc

SEQ ID NO: 15458 - DNA, 750 bp, synthetic construct
  misc_feature 1..750: note = source = /note="Description of Artificial Sequence: Synthetic coding sequence"
  source 1..750: mol_type = other DNA
atggccgacaacttttccctgcatgacgccctttcgggaagcggcaacccaaaccctcaaggctggccaggagcatggggaaatcagccggccggggccgggggttacccaggcgcatcttacccaggggcttaccctggacaggcaccgccaggagcatacccgggtcaggctccaccgggggcctacccgggggcgccaggtgcttaccctggcgcgcccgcccctggagtgtaccccgggccgcctagcggcccaggcgcgtacccctcctcgggacagccgtcggccactggcgcctatcccgccactggaccgtacggagcgccagcaggtcccctcatcgtgccatacaacctccccctgcctggtggagttgtcccgagaatgctgatcaccattttgggtacggtgaaacccaacgccaaccgcatcgcccttgacttccaacgcggaaatgacgtggcttttcacttcaatcccaggttcaacgaaaacaacagacgggtgatcgtgtgcaatactaagctcgataacaattggggccgagaggaaagacaatcggttttcccgttcgagtcaggcaagccgttcaagatacaagtcctggttgagcctgaccatttcaaggtcgccgtgaacgatgctcacctcctgcagtataaccaccgggtgaaaaaactcaacgaaatcagcaagctcgggatctcgggcgacatcgatctgacctcggcatcctataccatgatc

SEQ ID NO: 15459 - DNA, 750 bp, synthetic construct
  misc_feature 1..750: note = source = /note="Description of Artificial Sequence: Synthetic coding sequence"
  source 1..750: mol_type = other DNA
atggccgataatttcagcctccacgacgcactttccggtagcggcaatcccaacccacaggggtggccaggggcctggggcaaccagccggcaggagccggaggttaccccggtgccagctatcctggtgcttatcctggccaggctcctcctggcgcataccctggacaggcccctcctggtgcgtacccaggcgctccaggagcatacccgggcgctcccgctccgggagtgtatcctggccctccctctggaccaggagcctatccttctagcggccagcctagtgccaccggggcgtacccagcaactggaccttacggcgctcccgcaggtcctcttattgtcccatataatctgccacttccaggcggagtggtgccaaggatgctgatcaccatactgggcaccgtaaaacccaacgccaacaggatagctctggattttcagcggggaaatgacgtggctttccacttcaacccaaggttcaatgaaaataaccggcgggtgatcgtttgtaacaccaagctcgacaataattggggtcgcgaggaaagacagtctgtgtttccatttgagagtggaaaaccgttcaaaatccaagtgcttgtcgagccagaccattttaaagttgccgtgaacgatgcacaccttcttcagtacaatcacagggtgaagaagttgaatgagatctccaagctgggtatttccggggacatcgaccttactagtgcctcctacactatgatt

SEQ ID NO: 15460 - DNA, 750 bp, synthetic construct
  misc_feature 1..750: note = source = /note="Description of Artificial Sequence: Synthetic coding sequence"
  source 1..750: mol_type = other DNA
atggcggacaacttctcgttgcacgatgcccttagcggtagtggcaacccgaatccacagggctggcccggagcttgggggaaccagccagccggcgccggagggtacccaggggcctcttatcccggggcctacccagggcaggcccctcccggggcctatccagggcaagccccacccggggcttatcctggtgcgcctggggcataccccggggcccccgcgccaggcgtctatccgggcccccctagtggacccggggcatatccaagttctggtcaacccagcgccacaggagcatacccagctactgggccgtacggcgcgcccgctgggcccctcatcgtcccttataatctacccctgcccggtggggtggttccacggatgctcatcacgatcctaggcactgttaaaccgaatgcgaacagaatcgccttggattttcaaaggggtaatgacgtggcctttcactttaacccccggtttaacgaaaataaccggcgcgtgatcgtctgcaacaccaagctggacaataactggggacgagaggaacggcagtccgtttttcccttcgagagtggaaagccattcaagatccaggtgctcgtcgagccagaccacttcaaagtggctgtaaatgatgcccacttgctgcagtataatcatcgagttaagaagctcaacgagataagtaaactcggcatctccggcgatattgacttaacaagtgccagttatactatgatc

SEQ ID NO: 15461 - DNA, 750 bp, synthetic construct
  misc_feature 1..750: note = source = /note="Description of Artificial Sequence: Synthetic coding sequence"
  source 1..750: mol_type = other DNA
atggctgacaacttctccctgcacgatgccctgagcggatcagggaaccccaacccacagggctggcccggtgcctgggggaaccaacctgcaggagccgggggataccccggagctagctatccgggagcctacccgggccaggcgccaccaggagcctatccaggccaggccccaccaggcgcttaccctggagctcccggcgcatatccaggagcacctgctccaggcgtctaccccggaccacccagcggtccaggagcttaccccagcagtggccagccctcggccaccggggcctaccctgcaaccggcccctacggcgctcctgccggcccactgattgtaccctacaatctccccctccctggaggcgtggtccctcgaatgctaattacgatactgggcactgttaaacccaacgccaaccgaatagcacttgactttcagaggggcaatgacgttgcatttcattttaacccacgcttcaacgaaaataaccgccgtgtgatcgtgtgtaacaccaagctcgacaacaattggggcagagaagaacgccagtctgtgttccctttcgaatcaggaaagcccttcaagatccaggttctggtcgagcctgaccatttcaaggtggcagtgaacgatgcccatcttctgcaatacaatcatcgggtgaagaagctgaatgaaatcagcaagctgggtatcagtggtgacatcgatctgacttcagcttcttacacaatgatt

SEQ ID NO: 15462 - DNA, 750 bp, synthetic construct
  misc_feature 1..750: note = source = /note="Description of Artificial Sequence: Synthetic coding sequence"
  source 1..750: mol_type = other DNA
atggccgataatttttctctccacgacgccctaagcgggtcaggcaaccccaacccccagggatggcctggggcctggggcaatcagcccgcaggcgcaggcggttatcctggggctagctacccaggcgcctaccctggtcaagctccacctggcgcttacccaggtcaggcccccccaggcgcataccccggggcaccgggcgcctacccgggcgccccagcgcctggggtgtaccctggcccacctagcgggcccggcgcctacccttcaagtggacaaccaagtgcaacgggcgcctaccccgccacaggcccatatggtgcccctgccgggccccttatcgtgccatacaatctgccgctgccaggcggcgtggtgccgcggatgctgatcacaattctgggaacggtcaaacccaacgcgaatcggattgctttagactttcaacgtggcaacgacgttgcctttcacttcaatccaagatttaatgagaataaccggcgtgttatcgtgtgtaataccaaacttgacaacaactggggtcgtgaagaacgtcagtctgtattcccatttgagtcaggcaagccatttaaaatccaagtgttggtggaaccagaccatttcaaggtggctgtaaacgatgctcacctcttgcagtacaaccaccgggtgaaaaaacttaatgagatctctaaactgggcattagcggagacatagatctgacgagtgctagctatacgatgatc

SEQ ID NO: 15463 - DNA, 750 bp, synthetic construct
  misc_feature 1..750: note = source = /note="Description of Artificial Sequence: Synthetic coding sequence"
  source 1..750: mol_type = other DNA
atggcggataatttttcgctacatgatgcgttatcgggttcgggtaatccgaatccgcaaggttggccgggtgcgtggggtaatcaaccggcgggtgcgggtggttatccgggtgcgtcgtatccgggtgcgtatccgggtcaagcgccgccgggtgcgtatccgggtcaagcgccgccgggtgcgtatccgggtgcgccgggtgcgtatccgggtgcgccggcgccgggtgtttatccgggtccgccgtcgggtccgggtgcgtatccgtcgtcgggtcaaccgtcggcgacgggtgcgtatccggcgacgggtccgtatggtgcgccggcgggtccgctaatagtaccgtataatttaccgttaccgggtggtgtagtaccgcgtatgttaataacgatattaggtacggtaaaaccgaatgcgaatcgtatagcgttagattttcaacgtggtaatgatgtagcgtttcattttaatccgcgttttaatgaaaataatcgtcgtgtaatagtatgtaatacgaaattagataataattggggtcgtgaagaacgacaatcggtatttccgtttgaatcgggtaaaccgtttaaaatacaagtattagttgaaccggatcattttaaagtagcggtaaatgatgcgcatctattacaatataatcatcgtgttaaaaaattaaatgaaatatcgaaactaggtatatcgggtgatatagatttaacgtcggcgtcgtatacgatgata

SEQ ID NO: 15464 - DNA, 750 bp, synthetic construct
  misc_feature 1..750: note = source = /note="Description of Artificial Sequence: Synthetic coding sequence"
  source 1..750: mol_type = other DNA
atggctgataatttttctctacatgatgccttatccgggtcagggaatcctaaccctcaggggtggcctggagcgtggggaaaccagcctgctggggccggagggtatccaggagcttcctatcccggagcgtatcctgggcaggcccctcccggagcctaccccggacaggccccacctggagcctatcctggggcaccaggggcttatccaggggcccccgctccaggggtgtatcccggaccacctagtggaccgggggcctatccaagttccgggcagccctcagccactggagcttaccctgccacagggccttacggggcgccagccggaccactgattgtgccatacaatttgcccctacccgggggagtcgttccacgaatgctaataactatactggggacagttaaacccaatgcaaaccggattgccttagatttccagagagggaacgatgttgctttccattttaaccctaggttcaacgaaaacaatcgccgggtcatagtgtgcaatacgaaactggataataactggggaagggaagaacgtcagtcagtcttccctttcgagtctgggaagcctttcaaaatccaggttctggtcgaacccgatcatttcaaagtagcagtgaacgacgcccatctgttacagtataatcatagagttaaaaaactgaacgaaataagtaaactggggatcagtggagacatagatctgacatctgcgtcatatactatgatc

SEQ ID NO: 15465 - DNA, 750 bp, synthetic construct
  misc_feature 1..750: note = source = /note="Description of Artificial Sequence: Synthetic coding sequence"
  source 1..750: mol_type = other DNA
atggctgacaatttctcattgcatgatgccctctctgggtccgggaaccctaatccccaggggtggccaggtgcctggggaaaccagcctgcgggggccggcgggtatccgggggctagctacccgggagcttacccagggcaggccccacccggcgcttatcccggacaggcccctcctggagcctatcccggggctccaggcgcctatcccggggcaccggcccccggggtttaccccggccccccttcaggccccggagcctatccttccagcggtcagccatcagcaaccggcgcgtaccccgctacggggccgtacggcgcgccagctgggcccttaattgttccttataacctgccgctaccaggcggggtggttccacgaatgctcatcactatcctaggaacagtcaaacccaacgccaacagaattgcgctggattttcagagggggaatgacgtggcattccactttaaccccagatttaacgagaataataggcgcgtgatcgtatgcaatacaaagctagataataattggggacgcgaggagcggcagagtgtgttcccctttgaatcaggaaaaccattcaaaatacaggtgctggtggaacctgaccacttcaaagtggcagtgaacgacgcgcacctcttacagtataatcatagggtgaagaaactgaatgagattagcaagctgggcatttctggcgacatcgaccttacctcagcctcctacacaatgatc

SEQ ID NO: 15466 - DNA, 750 bp, synthetic construct
  misc_feature 1..750: note = source = /note="Description of Artificial Sequence: Synthetic coding sequence"
  source 1..750: mol_type = other DNA
atggcggataatttttcactccacgatgcattgtcgggatctggcaacccaaatccacagggctggcccggcgcatggggcaaccagccagctggagctgggggttatcccggcgctagctatccaggggcctaccctgggcaagctcctcccggcgcttaccccggacaggcaccccctggcgcttatccaggcgccccaggagcttatcctggcgcgcccgcacctggagtctaccccggtccaccatcgggacctggcgcttacccttcaagcggacagccatccgccaccggagcgtaccctgccaccggcccctacggggcccctgccggtcccttgattgtcccctacaacctgccattgcccgggggcgttgtgccaaggatgcttattactatcctgggaacagtcaagccaaacgcaaatagaatcgccttagactttcaacgggggaatgatgttgcgtttcactttaacccacgctttaatgaaaacaacagacgcgtcatcgtctgcaatactaagctggacaataactggggacgcgaagaacgacagtcagtcttcccattcgaaagcggaaagccattcaaaattcaggtgctcgttgagcctgaccatttcaaagtggccgtcaatgatgcgcatcttctacagtacaatcatcgggtgaaaaaacttaatgaaatcagtaaactggggatttcaggtgacatagatcttacctctgcctcctacacaatgatt

SEQ ID NO: 15467 - DNA, 750 bp, synthetic construct
  misc_feature 1..750: note = source = /note="Description of Artificial Sequence: Synthetic coding sequence"
  source 1..750: mol_type = other DNA
atggccgacaacttcagccttcatgatgccttgtctggtagcggtaatcccaatcctcaaggctggcctggtgcatggggcaatcaacccgcaggagcgggcggttaccctggggcctcataccctggagcatacccaggccaggcacctccaggagcataccccggacaagcacctcctggcgcatacccgggagcgcctggcgcctatcctggagcaccagctcctggcgtctacccaggaccaccttcaggacccggtgcctacccatcgtcagggcaaccatccgccaccggcgcgtacccggctactggaccctacggtgcacctgcaggaccgctgatcgtcccatataacttgcctcttccaggcggtgtggtccctcgaatgctcatcaccatactgggtactgtaaagccgaacgcaaatcgtattgcgctggattttcagagaggaaatgatgtggcatttcactttaaccctcgttttaacgagaataaccggagagtgattgtgtgtaatactaaacttgacaacaattggggacgcgaggaaagacagagcgtgtttccattcgagagtggtaagccattcaaaatacaggtgttggtggaaccagaccatttcaaggtagctgtgaacgatgctcaccttctgcaatacaaccatagagtcaaaaaacttaacgaaatttcgaaacttggaatttccggcgacatcgatctcacctccgcttcctacacgatgatt

SEQ ID NO: 15468 - DNA, 750 bp, synthetic construct
  misc_feature 1..750: note = source = /note="Description of Artificial Sequence: Synthetic coding sequence"
  source 1..750: mol_type = other DNA
atggcagataatttctcactccatgatgccctgagtgggtctgggaatcccaatcctcagggatggcccggggcatggggaaaccagccagcgggggcaggagggtaccccggagcatcatatcctggagcgtaccccggacaggccccacccggggcctaccccggacaagcccctcctggagcataccctggggcgcctggagcctatcccggggcacccgcacccggggtgtatcctggaccaccgtccgggcccggggcctatccttcctctgggcagccttcagcaacaggagcatatcccgcgacagggccctatggagcccctgccgggcccctcatcgtgccttacaatttgccccttccagggggggtggttccccgcatgctcatcacaatcctggggacagtcaaacccaacgccaaccgaattgccctggatttccagcgcgggaatgatgtagcttttcatttcaatccacggttcaatgagaacaatcggagagttatcgtctgtaatactaaacttgataataactggggaagagaagagagacagtctgtttttccttttgaatcagggaaaccatttaaaatacaggtgctcgtggaacccgatcattttaaagtggcggtgaacgatgctcatcttctgcagtacaaccacagggtgaaaaaacttaatgaaataagtaagcttgggatttccggagatatagatctgacatctgcttcctatacaatgatc

SEQ ID NO: 15469 - DNA, 750 bp, synthetic construct
  misc_feature 1..750: note = source = /note="Description of Artificial Sequence: Synthetic coding sequence"
  source 1..750: mol_type = other DNA
atggcagataacttctcacttcacgatgccctgtcgggcagtggaaaccctaaccctcagggctggccgggagcttggggaaaccagccagccggggcaggcggataccccggggccagttacccaggggcctaccccggacaagccccgccgggtgcatatcctggtcaggccccgccgggggcctatcctggcgcccctggagcgtatcctggagccccggcccccggggtatatccaggaccgccgagcgggcccggagcatacccatctagcggacaaccaagtgcaacaggggcctaccctgcaaccggcccttacggcgcgccagcaggccctctgatcgtgccctataaccttccccttcctggcggagtagtcccaaggatgctgattaccattctgggcacagttaagcccaacgctaacagaatcgccctggacttccagagggggaacgatgtcgcctttcattttaaccctcggtttaacgagaacaatagaagggtgattgtttgtaatacgaagctggataacaactggggccgcgaagaaaggcagtctgttttcccatttgagtcgggcaagccctttaagattcaggtcctggtggaaccggatcacttcaaggttgcagttaacgacgcccacctgctgcagtacaaccacagagtgaaaaaattgaatgaaatctccaagcttggcatctctggggatattgatttgaccagtgcctcctatacgatgatt

SEQ ID NO: 15470 - DNA, 750 bp, synthetic construct
  misc_feature 1..750: note = source = /note="Description of Artificial Sequence: Synthetic coding sequence"
  source 1..750: mol_type = other DNA
atggccgacaacttttctcttcacgacgccttgtccggttccggcaaccccaatccacagggatggcctggagcatggggaaaccaaccagctggagccggcggctatcccggagcttcatacccaggcgcttatcccggacaggctcctcccggagcatacccaggtcaagcacctcctggcgcctaccctggtgcccccggagcttaccccggagcccccgcacccggcgtctaccccggtcccccctcaggtcctggagcttatccatcctcaggccaaccttccgcaaccggtgcctaccccgccacgggaccatacggtgccccagcgggacccctcatcgtgccttacaacctgccactgcctggtggcgtcgtacccaggatgctgatcaccatcctcggaactgtgaagccaaatgcaaataggatagcactggacttccaacgcggtaacgacgtcgccttccactttaacccaagattcaatgaaaacaataggcgcgtgattgtgtgtaacactaagctggataataactggggaagggaggaacgccaatcagtgttcccgttcgaatctggaaaaccatttaaaatccaggtactggtcgagcccgatcactttaaggtggccgttaatgacgcgcacctcctgcagtacaaccatcgcgtgaagaaactgaatgagatatcaaagctgggtatcagcggcgatatagacttgacttccgctagctacacaatgata

SEQ ID NO: 15471 - DNA, 750 bp, synthetic construct
  misc_feature 1..750: note = source = /note="Description of Artificial Sequence: Synthetic coding sequence"
  source 1..750: mol_type = other DNA
atggctgataactttagcctccacgatgccctgtccggctcagggaatccaaatccccagggatggcctggcgcctggggtaatcaacctgccggagccggagggtatcctggggcctcatatccgggagcgtaccccggtcaggcgccccctggcgcgtaccctgggcaggcaccgcccggtgcgtacccaggcgccccaggcgcttaccccggagcaccagccccaggtgtgtaccccggacctccctccggaccgggggcttatccttcatctggtcagccctctgccacaggagcttacccagctacaggcccatacggcgctcccgcaggcccgctcatagtcccgtataacctgcccctccccggaggagtggtgcctagaatgctgataaccatccttggcacagttaagcccaacgctaacagaatcgcattggacttccagcggggcaacgatgtagcctttcacttcaacccccgatttaatgaaaataaccgccgggtgattgtatgtaacaccaagctggacaataactggggacgcgaagaacgacagtccgttttccctttcgagtcgggcaagcccttcaagattcaggtactggtggagccagatcacttcaaagtcgcggtcaacgacgctcatctgctacagtacaaccaccgggtaaagaaacttaatgagatctctaaactcggcatttccggcgacattgacctgacaagcgctagctacaccatgatt

SEQ ID NO: 15472 - DNA, 750 bp, synthetic construct
  misc_feature 1..750: note = source = /note="Description of Artificial Sequence: Synthetic coding sequence"
  source 1..750: mol_type = other DNA
atggcagacaatttctctctccatgacgccctgtccggctctggtaacccaaaccctcaaggttggccaggtgcatgggggaatcagccggccggagcaggaggctatcctggggcatcctatccaggtgcatacccgggacaggcaccaccaggcgcttatcccggccaggcaccaccaggcgcctaccctggagcgcccggggcttaccccggcgcccctgcgcccggggtctaccccgggcccccatccggtcctggtgcatacccatcttccggacagccgtccgcgaccggcgcatacccggcaaccggcccttacggggctcctgcagggcccctgattgttccgtataatctccctctcccggggggcgtggtgccccgaatgctgatcacaatcctcggtacggtgaagccgaacgctaacagaatcgctctggatttccagcggggaaatgacgtggctttccatttcaatccacggttcaatgagaataaccgacgggtgattgtatgcaatacaaaactcgataacaactggggccgggaggagaggcagtccgtgttcccctttgagtcggggaagccttttaagattcaggtcctggtggagccagatcatttcaaagtcgctgtgaacgacgcgcacctgctgcagtacaatcaccgagtgaaaaagctgaatgagatttccaagctcggtattagcggagacatcgaccttactagcgcatcctacaccatgatc

SEQ ID NO: 15473 - DNA, 750 bp, synthetic construct
  misc_feature 1..750: note = source = /note="Description of Artificial Sequence: Synthetic coding sequence"
  source 1..750: mol_type = other DNA
atggccgacaacttctctttgcatgacgctctaagcggaagcggcaatccaaacccacagggatggccaggcgcgtggggcaaccagccagcgggagccgggggttatcctggtgcgtcttatcccggtgcttaccccggacaagcccctccgggtgcgtaccctggtcaggcgccacctggcgcttaccctggcgcgccgggtgcgtatccgggcgcgccagcaccaggggtgtaccctggcccaccatccggtcctggtgcatacccaagctccggccagccgtctgcgactggtgcttatccggctaccggtccttacggtgcgcctgctggacccctcatcgtaccgtacaacctgccgctccccggtggtgttgttccgcggatgctgattactatcctgggaactgttaaaccaaatgcgaaccgcattgcactggacttccagcgcggcaacgatgtcgcttttcacttcaacccgcggtttaacgagaacaaccgccgcgtgattgtttgcaacactaaactggataacaattgggggcgcgaggagcgtcaatctgtatttccgttcgagtcaggtaagcctttcaagattcaagttctggttgaacctgaccatttcaaagtggctgtgaacgacgcccacttgctgcaatacaatcatcgagtcaagaaactgaatgaaatcagcaagctgggtatttccggcgatattgatctgacgagcgccagctacaccatgatt

SEQ ID NO: 15474 - DNA, 750 bp, synthetic construct
  misc_feature 1..750: note = source = /note="Description of Artificial Sequence: Synthetic coding sequence"
  source 1..750: mol_type = other DNA
atggcagacaacttttcattgcacgatgcactgtcgggatcgggcaacccaaaccctcagggatggccaggagcttgggggaatcaaccagccggggcaggaggataccctggagcctcgtacccgggagcgtatccaggtcaggccccgccgggtgcctaccccggacaggctccgccaggagcgtaccccggagccccaggcgcttacccaggagccccggccccgggggtgtaccctggccctccatctggccctggagcctacccgtcctccggccagccaagcgccaccggcgcctaccccgccaccggcccatacggcgcccctgcaggccctttgatcgtgccatacaaccttccgctgcctggtggagtcgtccccagaatgctgatcactatcctggggactgtgaagccgaacgccaacaggatcgcgcttgactttcagcgcggaaatgacgtggcattccactttaatccgcgcttcaacgaaaacaacaggcgggtgatcgtctgtaacactaaactggacaacaattggggccgggaggaacgccagtcagtgttcccgtttgagtctgggaaaccattcaagatccaagtgctggtcgagccagaccacttcaaggttgcagtgaatgacgctcacctgctgcaatacaatcacagagtcaagaagctcaatgagatctccaagctgggcatctcaggagatatcgacctgacttccgcctcgtacaccatgatc

SEQ ID NO: 15475 - DNA, 750 bp, synthetic construct
  misc_feature 1..750: note = source = /note="Description of Artificial Sequence: Synthetic coding sequence"
  source 1..750: mol_type = other DNA
atggcagataacttctctctgcacgacgcgctgtccggaagtggtaatccaaaccctcagggctggccgggggcttggggcaatcagcctgccggagccggtggttatcccggagcctcttatccaggcgcgtatccgggacaggcgccaccaggtgcgtaccccgggcaagcaccgcctggcgcctacccaggtgcgccgggcgcgtacccaggagcaccagcaccgggagtctacccgggaccgccgtcaggcccaggagcttacccatcaagcggacagccctcagctactggggcttacccggccaccggtccgtacggtgcacctgcgggccccctcattgtgccttacaacttgccactccctggaggagtcgtgccccggatgctcattactatccttggaaccgtcaaaccgaacgcgaatagaatcgccctggacttccagcgtggaaatgatgtcgcctttcacttcaacccacggtttaacgaaaacaacagacgcgtgatcgtgtgcaacaccaagctggacaacaattggggcagggaggaacgccaatcggtgttcccgttcgagtccgggaagccattcaaaatccaggttctggtagagccggatcactttaaagtagctgtcaacgatgctcacttgctccaatacaatcaccgagtgaagaagctgaatgaaatctcgaagctcggcatctccggagacatcgacctgaccagcgcgtcatacactatgatc

SEQ ID NO: 15476 - DNA, 750 bp, synthetic construct
  misc_feature 1..750: note = source = /note="Description of Artificial Sequence: Synthetic coding sequence"
  source 1..750: mol_type = other DNA
atggcagacaacttctcgctgcatgacgcactttccggatccggtaatccgaacccacaaggatggcctggcgcatggggaaaccagccagcaggagccggaggttaccctggagccagctacccaggagcatacccgggccaagctcccccaggggcctaccccggacaggcgccccccggagcttaccctggcgcaccgggagcgtatccaggagcgccagcacctggagtctacccaggacccccgagcggacctggcgcgtacccttcttctggacagccttcagccaccggtgcgtacccagcaaccgggccttacggagcccctgctggacctctgatcgttccttataacctgccactgcccggtggcgtggtcccaagaatgctgataactattctcggtactgtgaagccaaatgcaaacaggattgctctcgactttcagcggggtaacgatgtggccttccacttcaaccctaggtttaacgagaataacagacgagtgatcgtctgtaacactaaacttgataacaactgggggcgtgaggaacgtcagagcgtgtttccatttgaatccggaaagccattcaagatacaggtgcttgtcgagcccgaccatttcaaggtggctgtgaatgatgctcatctcttgcaatacaaccacagagtgaagaagctgaacgaaatctcaaagctgggcatctccggcgatatcgacctgacgtccgcatcctacaccatgatc

SEQ ID NO: 15477 - DNA, 750 bp, synthetic construct
  misc_feature 1..750: note = source = /note="Description of Artificial Sequence: Synthetic coding sequence"
  source 1..750: mol_type = other DNA
atggcagataactttagcctgcatgatgcactgagtggatctggcaacccaaatcctcagggctggcccggggcctggggaaatcagccggccggtgccggcggctacccaggcgcatcctaccctggtgcctatccgggccaagcaccgccaggtgcgtatcctggccaggcgccgcctggagcctaccctggagcccccggagcgtacccgggagcacctgcgccgggtgtgtacccaggtcccccctccggtccgggagcttatccctcctcggggcagccatcggccaccggagcatacccggctactggtccgtacggggccccagccgggccactcattgtgccgtacaacttgccgcttccgggtggagtggtgccgcgcatgctgatcaccattttgggtactgtgaagcccaatgcaaacagaatagccctggacttccaacgggggaatgacgtggccttccactttaatcctagatttaacgagaataaccgccgcgtgatcgtgtgcaataccaagctcgacaacaactggggcagggaggaacggcagtcggtctttcctttcgagtcaggcaagcccttcaagatccaggtccttgtcgagccggaccatttcaaagtggccgtgaacgatgcgcacctccttcagtacaaccacagagtgaagaaattgaacgagatctccaagctgggaatctccggcgatatcgacctcacgtcagcttcgtacactatgatc

SEQ ID NO: 15478 - DNA, 750 bp, synthetic construct
  misc_feature 1..750: note = source = /note="Description of Artificial Sequence: Synthetic coding sequence"
  source 1..750: mol_type = other DNA
atggctgacaacttctctttgcacgatgccttgtctgggagcggcaatcctaacccacagggctggcccggagcgtggggcaatcagccggccggcgcggggggctaccctggggcctcctatcccggggcgtatccgggacaggcgccacccggagcataccctggccaggcccccccaggcgcgtatccaggcgcaccaggtgcctaccccggcgcgcccgcccccggcgtgtatcccggacccccctcaggtcccggggcatacccaagttcgggccagccctctgccactggcgcctacccagctactggtccttatggggctccagccggtcctctgatcgttccatataatttgcccctacccggaggcgttgtcccccgtatgttgatcactatcctggggactgtcaagcccaacgcaaatcgcatcgctttggacttccagcggggtaacgacgtggccttccatttcaaccccagatttaacgagaacaaccgacgggtgatcgtgtgtaacacaaagctggacaacaattggggccgcgaagagagacagagcgtgttcccttttgagagcggaaaaccctttaagattcaggtgctggttgagcccgatcacttcaaggtcgccgtgaacgacgcccatctgcttcagtacaatcaccgcgtgaaaaagctgaatgaaatcagcaaactggggataagcggagacatcgacttaacatctgcctcatataccatgatt

SEQ ID NO: 15479 - DNA, 750 bp, synthetic construct
  misc_feature 1..750: note = source = /note="Description of Artificial Sequence: Synthetic coding sequence"
  source 1..750: mol_type = other DNA
atggcagataacttctcactccacgacgcgctgtcgggatctggcaatcccaacccgcagggatggcctggagcctggggtaatcaaccagccggggcaggcggatacccgggagcgtcctacccaggagcatacccagggcaggcgcctcctggcgcttaccctggacaagcgccgcccggagcctatccaggagccccaggagcctaccctggggcaccagcaccgggggtgtacccaggaccgccgtcaggaccaggcgcttaccccagctctgggcagccatcagcgactggagcatacccggccactggcccgtacggcgcgccagccggcccgctcatcgtgccctataacctgcctttgccgggtggggtcgtgccgcgaatgctcattaccatcttgggcaccgtgaagcctaacgcaaaccggatcgccctggacttccaacgtggaaacgacgtcgccttccatttcaacccgaggttcaacgagaataaccgcagagtgatcgtgtgcaatactaagttggacaacaactggggccgcgaggaacgacagtcagttttcccgttcgagtcgggaaaacctttcaagatccaggtactggtcgaacccgatcatttcaaggttgccgtcaatgacgcgcacctgctgcagtacaaccaccgcgtgaaaaaactgaatgaaataagcaagctcggaatctccggagacatcgatctgacttcggccagctacactatgatt

SEQ ID NO: 15480 - DNA, 750 bp, synthetic construct
  misc_feature 1..750: note = source = /note="Description of Artificial Sequence: Synthetic coding sequence"
  source 1..750: mol_type = other DNA
atggcagataacttctcgctgcacgatgccctctcgggatctgggaatcccaatccccaggggtggccgggggcttggggcaaccaaccggccggtgctggcggataccctggggccagctacccgggtgcttatccgggacaggcgccgccgggcgcgtaccccggccaggctccacccggcgcctacccgggagccccgggtgcgtacccgggcgcacctgcgcccggtgtgtacccgggtccgccttccggccccggtgcatacccatcgtccggacagccaagcgccactggggcgtacccggcaactgggccttacggtgcacctgccggcccactcattgtcccgtacaacttgccgttgcctggaggagtggtcccacggatgctgattaccattctgggaacggtcaaaccgaacgctaaccgcatcgcactggactttcaacgcggcaacgacgtggcctttcatttcaacccaaggttcaatgagaataatcgtagagtgattgtgtgtaataccaaacttgacaacaactggggaagggaggaacgccagtccgttttcccgttcgaaagcggtaagccgtttaagattcaagtgttggtggagccggatcacttcaaggtcgccgtgaacgatgctcacctcctccagtacaaccatagagtgaagaaactgaacgaaatatcaaagctgggtatctcgggagacatcgacctcacctcggcgtcgtatactatgatc

SEQ ID NO: 15481 - DNA, 750 bp, synthetic construct
  misc_feature 1..750: note = source = /note="Description of Artificial Sequence: Synthetic coding sequence"
  source 1..750: mol_type = other DNA
atggccgacaacttttctctgcatgatgctctgtcagggagcggaaatcccaacccacagggatggcccggagcatggggtaatcagccagcaggggcaggtggctacccaggagcttcatatcctggcgcttatcccgggcaggccccccctggagcctatcctggccaagcccctccgggcgcctaccctggagcccctggagcatatcccggcgccccggctcctggcgtgtatcctggaccaccaagcggcccaggtgcttacccaagtagcgggcaaccatcggctactggagcctacccggccaccggaccttatggcgcccctgcaggcccacttatcgttccatacaaccttccccttcccggcggagtcgtgccacgcatgctgattaccatcttagggactgtgaagccaaatgccaaccgcatcgctttggattttcagaggggaaacgacgtcgcattccatttcaaccctaggttcaacgagaataacagaagagtgatcgtatgtaacacaaagcttgataacaactggggtagagaagagaggcagagtgtgttcccctttgaatcgggtaagcccttcaaaattcaagtgctggtcgaacccgaccactttaaggtggcagtcaacgatgcacacctgctgcagtacaatcatagagtgaagaaactcaacgaaatctcaaagctggggatatcaggagacattgacctcaccagcgcttcgtacacaatgatc

SEQ ID NO: 15482 - DNA, 750 bp, synthetic construct
  misc_feature 1..750: note = source = /note="Description of Artificial Sequence: Synthetic coding sequence"
  source 1..750: mol_type = other DNA
atggccgacaacttttcccttcatgacgctctctctggttcagggaacccaaacccacaaggatggcctggcgcttggggaaatcaaccagcaggtgcaggaggctacccaggagcctcgtacccaggtgcctaccccggtcaagcgcctcccggtgcataccctggtcaggcccctccaggagcttacccaggggcaccaggcgcgtaccctggggcgccagcaccaggagtgtatcccggacccccctcagggccaggcgcatacccttcatcgggacaacctagtgctaccggggcataccccgcaactgggccttacggggcacctgcaggacccctcatcgtcccttacaacctcccactcccgggaggagtggtgcctcgtatgcttattactattctcggaaccgtgaagccgaacgcaaaccgaatagcacttgatttccaacgaggaaacgatgtggcatttcactttaatcctaggtttaacgagaataatcgaagggtgatcgtttgtaacactaaactcgacaacaactggggtagagaagaaaggcagtcggtgttcccttttgagtccggtaagcccttcaagattcaggtgctggtcgaacctgatcactttaaggttgcggtgaacgatgcccatcttctgcagtacaaccatagagtgaagaagctcaatgaaatctcaaaactgggtatctcaggtgatattgacttgacgagcgcgtcgtacaccatgata

SEQ ID NO: 15483 - DNA, 750 bp, synthetic construct
  misc_feature 1..750: note = source = /note="Description of Artificial Sequence: Synthetic coding sequence"
  source 1..750: mol_type = other DNA
atggccgataacttcagtttacatgatgctttatctggtagcggcaatcccaacccgcaaggctggccaggagcctgggggaatcaacccgccggggctggcggctacccaggagcttcatacccaggggcttatcctggacaagctcctcccggagcatatcctggtcaagctccacccggagcctaccccggtgcccccggagcataccctggagcaccggcacccggcgtctacccaggccccccctccgggcctggcgcatatcctagtagcggacagccgagcgcgaccggagcctatccagccacaggaccatatggcgcacccgcaggcccactgatagtgccttataatctgccccttcccggaggggtggttcctcgcatgttaattacaattctgggaacagtgaagccaaatgccaacagaatcgctctcgattttcagaggggaaacgacgtggcctttcactttaatccccgttttaatgagaacaataggcgcgtgatcgtatgcaatacaaagctggacaacaactgggggagggaggagcgccagtcagtatttcctttcgagtccgggaagccatttaaaatccaagtgctggtggaacccgaccattttaaagtagcggttaatgacgcccatctgctccagtacaaccacagagtaaagaagctgaatgagatctccaagctgggaatttcgggagacatagacctcacctccgcttcctacactatgatc

SEQ ID NO: 15484 - DNA, 750 bp, synthetic construct
  misc_feature 1..750: note = source = /note="Description of Artificial Sequence: Synthetic coding sequence"
  source 1..750: mol_type = other DNA
atggccgacaatttttctttgcacgacgccttatcaggatcgggtaatccaaatccccaaggttggccgggagcttggggcaaccagcctgcaggggcaggtggttaccccggtgcaagttaccccggcgcatacccagggcaagcccctccgggtgcgtaccctgggcaggcgcctcccggggcttatcccggcgctcccggtgcatatcccggtgcgcccgcgccgggtgtctacccaggacctccgagtgggcctggagcgtatccgtctagcggacagccttcggctactggcgcatacccggccaccggtccctatggggccccggccggtcctctaatcgtcccatacaatttgcccctgcccggaggagtcgtcccgcgaatgctaatcactatactaggtacggtcaagcccaatgcgaaccgcatcgcacttgatttccaacgaggtaacgacgtcgccttccactttaatcctcgcttcaacgaaaataatcgacgagtgatcgtttgcaatacgaaactggataacaactggggtagggaagagagacaatcagtctttcccttcgaaagcggtaagcctttcaaaattcaagtcctcgtggaaccagatcactttaaggttgcagtgaatgatgcccatcttctacaatacaaccatagagtaaaaaagcttaatgaaattagcaagctcggtattagcggcgacatcgatcttacgtctgctagctatactatgatt

SEQ ID NO: 15485 - DNA, 750 bp, synthetic construct
  misc_feature 1..750: note = source = /note="Description of Artificial Sequence: Synthetic coding sequence"
  source 1..750: mol_type = other DNA
atggctgataatttcagtttacatgatgcattatctggtagtggaaatccaaatcctcaaggatggccaggtgcttggggaaatcaacctgctggagctggaggatatccaggagcttcatatccaggtgcttatcctggacaagcaccaccaggagcttatcctggacaagcaccaccaggagcttatccaggtgctccaggagcttatccaggtgcaccagcaccaggagtttatccaggaccacctagtggaccaggagcttacccatcatctggtcaaccatctgctactggtgcttatccagctacaggaccttatggagcacctgcaggtccattaattgtaccatataatttaccattaccagggggagttgtaccacgtatgttaatcactatcttgggtactgttaaaccaaatgctaacagaattgctttagatttccaaagaggaaatgacgttgcttttcatttcaatccaagattcaacgaaaataatagaagagttattgtatgtaatacaaagttggataataattggggacgagaagaaagacaatctgtttttccatttgaatcagggaaaccattcaaaatccaagtattagttgaaccagatcattttaaagttgcagttaatgatgcacacttgcttcaatataatcatagagttaaaaagttaaacgaaatttcaaaacttggtatttctggtgatatagatttaacttcagcttcatatacaatgatt

SEQ ID NO: 15486 - DNA, 750 bp, synthetic construct
  misc_feature 1..750: note = source = /note="Description of Artificial Sequence: Synthetic coding sequence"
  source 1..750: mol_type = other DNA
atggcagacaatttttcactccatgatgcgctttctggctccggcaacccaaacccccagggctggcccggagcttggggcaaccagcctgccggcgctggcgggtacccaggcgcaagttacccaggcgcttaccccggccaggctccccctggcgcataccctggacaagccccccctggagcatatccaggggctcccggagcttatcccggagcgcctgcaccgggggtgtatcctggtccaccttcaggaccaggcgcgtatcctagttccggtcagccctcggctactggagcatatcctgccaccggcccatacggtgctcccgcgggtcctctgatcgtaccttataatctaccattgccgggcggggtcgttccccgaatgctgatcaccattctgggaaccgtaaaaccaaatgccaaccgtattgccctggatttccaaagaggaaacgacgtcgcctttcacttcaacccccggttcaatgaaaacaacagaagagtgattgtttgtaataccaagctcgataacaactgggggagggaagagcggcaaagcgttttcccatttgagtcggggaaaccatttaagatacaagttctcgtagaacccgatcacttcaaagtcgctgtcaacgatgcacacctgctgcagtataaccatcgcgttaaaaaacttaacgaaatctctaagttaggcatctccggagacatcgatctcacttccgcttcgtataccatgatt

SEQ ID NO: 15487 - DNA, 750 bp, synthetic construct; identical to SEQ ID NO: 15462
  misc_feature 1..750: note = source = /note="Description of Artificial Sequence: Synthetic coding sequence"
  source 1..750: mol_type = other DNA

SEQ ID NO: 15488 - DNA, 750 bp, synthetic construct
  misc_feature 1..750: note = source = /note="Description of Artificial Sequence: Synthetic coding sequence"
  source 1..750: mol_type = other DNA
atggccgacaatttctcactgcatgacgcgctgtcgggatccggcaatcccaacccacaaggttggcctggcgcctggggaaaccagccagctggagccggaggataccctggagcatcttacccaggggcatatcccggtcaggcccctcccggtgcctacccaggtcaggcaccacccggggcttacccaggcgcacctggggcataccccggtgcgcctgctcccggagtctaccccgggcctccctctggcccaggagcctacccctctagcgggcagccgagcgccaccggagcttatccagctaccgggccctacggcgcgcctgcaggcccactaattgttccatacaatctgcccctgcctggaggggttgtcccccgcatgctgatcaccattctgggcaccgttaaacctaatgcgaacaggatcgcgttagacttccagcgaggtaatgatgtggcctttcactttaacccgcgattcaatgaaaacaacaggcgggtcattgtgtgcaataccaaattggacaacaactgggggcgcgaggagcgtcagtccgtgttcccattcgagtccggaaagccatttaagattcaggtccttgtggaaccagatcattttaaagttgcagttaatgacgcacatctgcttcaatacaaccatagagtgaaaaagctcaacgagatctctaaactgggtatctcaggagacattgatttgaccagcgcatcatacactatgatt

SEQ ID NO: 15489 - DNA, 750 bp, synthetic construct
  misc_feature 1..750: note = source = /note="Description of Artificial Sequence: Synthetic coding sequence"
  source 1..750: mol_type = other DNA
atggccgacaacttttcgcttcatgacgcgctttcgggaagcggtaaccccaacccacagggatggcctggagcatggggtaatcaacccgcaggcgccgggggctaccctggggcatcctatcctggtgcataccctgggcaggcgccgccgggggcctaccctggccaagcacctccaggcgcatacccgggcgcaccaggagcataccccggagcccctgcaccgggagtgtaccccgggccacctagcgggccgggagcatatccttcctcaggccagccaagcgcaaccggggcttaccccgcgactggtccttacggagcaccagcaggacctctcattgtcccctacaacctgcctcttcccggtggggtcgtgccacggatgttgatcactatacttggcaccgtcaagccaaacgcgaatagaatcgcactcgattttcaacgtggtaatgatgtcgcatttcatttcaatcctagattcaacgagaacaacagacgcgtgattgtctgtaataccaaactggacaacaattggggtcgagaagagagacagagcgtgttcccatttgagtccggcaagccttttaagatccaggtcctggtggaacctgatcacttcaaggtggcagtgaacgatgcacacctgctgcaatacaatcatcgggtcaagaagctcaacgaaattagcaaactggggatctcgggtgatatagatcttacttcagcctcgtacaccatgata

SEQ ID NO: 15490 - DNA, 750 bp, synthetic construct
  misc_feature 1..750: note = source = /note="Description of Artificial Sequence: Synthetic coding sequence"
  source 1..750: mol_type = other DNA
atggcggataattttagcctgcatgacgctctgtccggcagcggtaaccccaatccacagggatggccgggtgcctggggcaaccagcctgccggagctggaggttatcctggcgctagttaccctggtgcctaccccggacaggcccccccgggagcgtaccctgggcaggccccccccggagcgtatcccggcgcaccaggcgcatacccgggagccccggcacccggtgtctatcccgggcctcctagcgggccgggtgcctacccttcctcaggccaaccttcagcaacgggagcctaccctgcaacgggaccgtacggggctccggcgggacccctgatcgtgccatataatctcccacttccaggtggagtggtgccccgcatgctcatcacgatcctaggcactgtgaagcccaatgcaaacagaatcgcgctcgatttccaacgggggaatgacgttgccttccatttcaatcctaggttcaacgagaacaatagacgcgtaattgtgtgcaacactaagctagacaataattggggccgagaggaacgccagagtgtgttcccttttgaatcgggaaaaccctttaaaatccaagtccttgttgaaccagaccacttcaaagtagccgttaatgacgcccaccttctgcagtacaaccaccgggttaaaaagttgaacgaaatatctaagcttggaatcagcggtgacatcgatctaacctccgccagctatactatgatc

SEQ ID NO: 15491 - DNA, 750 bp, synthetic construct
  misc_feature 1..750: note = source = /note="Description of Artificial Sequence: Synthetic coding sequence"
  source 1..750: mol_type = other DNA
atggcagacaatttctctctgcatgacgcgctgtcagggtcgggtaatccgaacccccagggatggccgggtgcatggggcaatcagccagccggagccgggggctacccaggggcgtcatatccaggagcatacccaggacaagcacctccaggtgcttacccagggcaagcacctcctggcgcctatccaggagcgcctggtgcctatccgggcgcccctgcgcctggcgtctacccaggaccaccgtcaggaccaggagcctacccaagcagcggccaacccagcgctactggagcgtacccagcaacggggccttacggagcgccagccggtccactgattgttccctacaacctccctctgcctggaggcgtggtcccaagaatgcttattactatcctgggcactgtgaaacccaacgcaaacaggatagcactggatttccagagaggtaacgatgtcgcgtttcactttaacccaagatttaacgagaacaatcgacgggtgattgtgtgtaacacgaagctcgataacaattggggtcgggaagagcgccagtccgtgtttcctttcgagtcgggaaagcctttcaagatccaggtcctggtggaaccagatcactttaaggtcgcagttaacgatgcgcatcttcttcaatacaaccatagggtcaagaaattgaatgagatatcgaaacttggtatttctggtgatattgacttgaccagcgcgtcctacaccatgatt

SEQ ID NO: 15492 - DNA, 750 bp, synthetic construct
  misc_feature 1..750: note = source = /note="Description of Artificial Sequence: Synthetic coding sequence"
  source 1..750: mol_type = other DNA
atggctgacaacttttcgctccatgatgcactctcgggcagcggaaatccaaatccacagggttggccaggcgcatggggaaaccaacctgcaggtgcaggaggataccctggtgcaagctacccaggagcatacccaggccaagcccctccaggcgcatacccgggacaagctcctcccggggcataccctggggcacccggcgcataccccggcgcacctgccccgggagtctaccctggacctccttcaggtcccggagcgtacccgtcctcaggacaaccatcggctaccggagcataccctgccactggaccatacggagcgccagccggaccacttatcgtgccatacaacctgccactccctggaggtgtcgtgcccaggatgcttatcaccattctcgggaccgtgaagcctaacgctaaccggattgcccttgatttccagaggggtaatgatgtggccttccacttcaatccacgttttaacgagaataaccggagagtgattgtgtgtaataccaagctggataacaattggggtcgagaggagcggcaatcggtctttccttttgagtcgggtaagccatttaagattcaggtgcttgtcgagcctgatcactttaaggttgcagtgaatgacgcacacttgttgcagtacaatcatagggttaagaagctgaacgaaataagtaaactgggaatctccggagacatagaccttacctccgcaagctacactatgatt

SEQ ID NO: 15493 - DNA, 750 bp, synthetic construct
  misc_feature 1..750: note = source = /note="Description of Artificial Sequence: Synthetic coding sequence"
  source 1..750: mol_type = other DNA
atggctgacaatttttcgctgcacgatgcactgagcgggtcaggtaacccgaaccctcagggatggccgggtgcatggggaaatcagcccgccggcgcgggagggtacccgggagcctcctacccaggagcctatccaggacaggcgccaccaggcgcgtaccccggtcaagcgcctccgggtgcctatccgggtgctccgggggcgtaccctggagcacctgcccctggagtgtacccgggcccgccctcagggcccggagcctacccgtcgtctggccaaccgtcagccacgggagcttacccagctaccggaccgtacggagccccggccggcccgctgatcgtgccatacaatctgccgctccctggcggagtcgtgcctcggatgctcatcactatcctgggcactgtcaagccaaacgcaaatcgcatcgccttggatttccagcgcgggaatgatgtcgctttccacttcaacccgcggtttaacgagaacaacaggagagtcattgtgtgcaataccaaacttgacaataactggggaagagaagagcggcaatccgtgttcccattcgaaagcggaaagccatttaaaatccaggttctggtggagcccgatcacttcaaggtggccgtgaacgacgcgcatctgctccagtacaaccatcgcgtgaagaagctgaacgaaatctcgaagctcggaatttccggcgacatcgacttgacttcggcaagctacaccatgatc

SEQ ID NO: 15494 - DNA, 750 bp, synthetic construct
  misc_feature 1..750: note = source = /note="Description of Artificial Sequence: Synthetic coding sequence"
  source 1..750: mol_type = other DNA
atggcagataatttctccctgcacgacgctctcagcgggtccgggaatcctaatccgcaaggctggccaggcgcatggggaaaccaacctgctggcgcaggcggctatccaggcgccagctatccgggagcctacccgggacaggcccctcctggagcctaccctggccaagccccacccggggcttacccaggggccccaggcgcctatccaggggccccagccccaggggtttatcccggacctccttctggccctggggcctacccctctagcggacaaccgtccgccaccggagcctaccccgctaccgggccatatggtgcccccgctggacccctgatcgtcccttacaatctgccgcttcctggtggcgttgtgccgagaatgctgataaccattctcgggaccgtcaagcctaacgcaaaccgcattgcactcgacttccagcgaggaaacgacgtagcattccacttcaaccccagattcaatgagaacaatcggcgagtaattgtgtgcaacactaaactggataataattgggggagagaggagagacaatccgtgttcccctttgagtcaggaaagccatttaagattcaggtacttgtcgagcccgaccacttcaaggtggccgtcaatgacgctcatctactccagtataatcatagggtgaagaaactgaatgaaatctccaagctgggaattagtggcgacattgatttgacttccgcaagttacacaatgatt

SEQ ID NO: 15495 - DNA, 750 bp, synthetic construct
  misc_feature 1..750: note = source = /note="Description of Artificial Sequence: Synthetic coding sequence"
  source 1..750: mol_type = other DNA
atggccgataacttctccctgcatgacgccctttcgggaagtggtaaccctaacccacaaggatggccaggtgcttgggggaatcaaccagcaggagctggcggctaccctggcgcatcctaccccggcgcctaccccgggcaagcgcctccgggcgcatacccaggccaggccccacccggagcttaccctggggcaccaggagcataccctggagctcctgctcctggagtgtacccgggaccaccttcggggcccggtgcgtatccttcatcgggacagccctcggcgactggtgcatacccagcaaccggaccttacggtgcccctgcaggcccactgattgtgccatacaatctgcctcttcctgggggagtggtgccccgcatgcttataactatccttggtaccgtgaaaccaaacgcaaatcgcattgccctggattttcaaaggggtaacgacgtggcatttcatttcaacccccgttttaacgagaataacagacgcgtgattgtgtgtaatactaagttggacaataactggggtagagaagaacgccagtcggtgttccctttcgaaagcggcaaaccatttaagattcaagttctggtggagcccgaccactttaaggtggccgtaaacgatgcgcatctccttcaatacaaccacagggtgaagaaacttaatgagatctcaaagctgggtatctccggcgatattgaccttacttcagcgtcctataccatgatc

SEQ ID NO: 15496 - DNA, 750 bp, synthetic construct
  misc_feature 1..750: note = source = /note="Description of Artificial Sequence: Synthetic coding sequence"
  source 1..750: mol_type = other DNA
atggccgacaatttttcactgcatgatgctttgtcaggctctggaaatccgaatcctcaggggtggcctggcgcatggggtaatcagcccgctggagctggaggttacccgggagcttcatatcccggcgcttaccccgggcaagcgccgcccggggcataccccgggcaggcaccccccggcgcctatccaggtgcacctggggcgtaccctggtgcacctgctccgggagtatacccgggaccaccatcagggccaggcgcttaccccagttctggccaaccgtcagccaccggggcctaccctgcgactggcccgtatggggccccggccggacccttgatcgtgccctacaacctgccactgccaggcggcgtcgtacccaggatgcttattacgatcctcggcacggttaagcctaatgctaatcgcatcgctctggatttccagagagggaacgatgtcgcattccacttcaaccccagatttaacgagaacaaccggagagtgattgtgtgcaataccaagctggataacaattggggccgcgaggagagacaaagtgtgttccccttcgagagtgggaagccatttaagatccaggtgctcgtggaaccagatcattttaaagtcgcggtgaacgacgcacacctgttgcagtacaatcatcgagtcaaaaaattgaatgaaattagtaagctcgggatttctggggacatagacttgacctccgcaagttacaccatgatc

SEQ ID NO: 15497 - DNA, 750 bp, synthetic construct
  misc_feature 1..750: note = source = /note="Description of Artificial Sequence: Synthetic coding sequence"
  source 1..750: mol_type = other DNA
atggctgataacttttccctgcacgacgccctgagcggctccggaaatccgaacccgcagggctggccgggggcgtggggtaatcagccagcaggagcaggcggatacccaggcgcgtcgtatcctggcgcgtacccagggcaagctcctcctggcgcatacccgggacaggctcctccaggcgcctacccaggcgccccaggcgcttaccccggagcaccagcacccggagtgtatccagggcccccctccggaccgggcgcctacccgtcatccggacagccgtccgccaccggagcctatccggcgaccggcccatatggagcccctgccgggcctcttatagtcccttacaacctgccactgccaggcggcgtcgtgcctcgcatgctgatcactatcttgggtaccgtgaagcctaacgcgaacagaatcgccctggacttccaacgcggaaatgacgtggccttccatttcaacccgcgcttcaatgaaaacaatcgccgcgtgatcgtgtgcaataccaaactggataacaactggggtcgggaagagcggcaatccgtctttccgttcgaatcaggaaaaccgtttaagatccaagtcctggtggaaccagaccacttcaaagtggccgttaacgatgctcatctgctgcagtacaatcaccgcgtgaagaagctgaatgaaatttcgaagctcggaatttcaggagacatcgatcttacctccgcatcatacactatgatc

SEQ ID NO: 15498 - DNA, 750 bp, synthetic construct
  misc_feature 1..750: note = source = /note="Description of Artificial Sequence: Synthetic coding sequence"
  source 1..750: mol_type = other DNA
atggccgacaacttttctctgcatgacgcgctttctgggagcggcaacccaaatccccaaggctggcccggggcctgggggaaccagcctgcgggcgcaggagggtatcctggggcctcctaccccggcgcgtatcctggacaagcaccccccggtgcatatcctggccaggctccccccggggcctatccaggagccccaggcgcttacccgggcgcgcccgctccgggcgtctatccaggtccccctagtgggccgggggcatatccgagctccggccagccaagtgccacaggagcctatccagccaccgggccttatggcgctcctgcaggacccctcatcgtcccttacaacctgccgctgccaggcggggtggtgccaaggatgcttataacaattttgggcactgtgaagcccaacgccaaccgaatcgctctggactttcaacggggcaacgacgtagccttccactttaaccctaggtttaatgaaaataaccggcgggtgatcgtgtgcaataccaaactggacaataattggggccgggaggagagacagagtgtttttcccttcgagtctgggaaacctttcaaaatccaggtgctggtggagccagaccacttcaaggtggctgtgaacgacgcacacctgcttcagtacaaccatcgggtcaagaaactgaatgaaatcagtaagctcgggattagcggtgatattgacctgacttccgcttcctatacaatgatc

SEQ ID NO: 15499 - DNA, 750 bp, synthetic construct
  misc_feature 1..750: note = source = /note="Description of Artificial Sequence: Synthetic coding sequence"
  source 1..750: mol_type = other DNA
atggccgacaatttctcactgcatgacgccctgtccgggtctggaaaccctaatcctcagggatggccgggagcatggggcaaccaaccagcaggcgcaggcgggtaccctggggcatcgtaccccggagcataccccgggcaagcacctcctggagcatatccgggacaagcgcccccaggggcatacccaggggcaccaggtgcatatcccggagctcccgcacctggagtgtatccagggcctccctccggcccaggtgcgtatccgagctcgggtcaaccctcggcaactggtgcttaccccgcgaccggaccatacggtgcacctgccggcccccttatagtgccttacaacctgccgctgcctggaggcgtcgtgccaaggatgcttattaccatcctgggtactgtgaagcctaatgcaaataggattgcattggatttccagagaggaaacgatgtggcttttcacttcaatcctaggtttaacgagaacaatagacgcgtgatcgtgtgtaacaccaagttggacaataactgggggcgcgaagaaagacagtccgtgtttcccttcgaatcgggtaaacctttcaaaattcaagtgctggtcgagcccgaccatttcaaggtggcagtcaacgatgcacacctcctccaatacaaccatagagtcaaaaagctgaatgaaatctcaaagctgggtatttccggtgatatcgaccttacctcagcgtcctatacgatgatt

SEQ ID NO: 15500 - DNA, 750 bp, synthetic construct
  misc_feature 1..750: note = source = /note="Description of Artificial Sequence: Synthetic coding sequence"
  source 1..750: mol_type = other DNA
atggccgacaatttttccctccatgacgctctctccgggtcgggtaaccctaatcctcaaggttggcctggcgcttggggaaaccagcccgctggggctggcggataccctggagctagttatccaggcgcctatccaggccaggccccccccggagcctaccccggtcaggctccacccggggcttacccaggagcccccggtgcgtatcctggcgctcctgcgccaggcgtctaccctggtccacccagtggccccggagcctaccctagttctggccagccatctgcaactggagcatatccggcaaccggcccgtacggcgcaccagcagggcctctgattgtgccctacaacctgccactgcctggcggagtcgtgcctcgtatgttgataacaatcctggggacagtcaagcccaacgctaatagaattgcactggacttccagcgcggaaatgacgtcgctttccacttcaaccccaggtttaatgaaaacaaccggcgagtgattgtttgtaacacaaagctggacaacaactgggggagggaggaaaggcagtctgtttttccatttgagtccggcaagcctttcaagattcaggtactggttgaacccgaccatttcaaggtagcagtgaatgacgcacacttgttgcagtacaaccaccgcgtgaaaaaactgaatgaaatttccaagcttggaatctccggcgatattgatctgacttcagcatcttacaccatgatc

SEQ ID NO: 15501 - DNA, 750 bp, synthetic construct
  misc_feature 1..750: note = source = /note="Description of Artificial Sequence: Synthetic coding sequence"
  source 1..750: mol_type = other DNA
atggctgacaacttttcgcttcacgacgccctcagcggatcggggaacccgaatcctcagggatggccgggggcttggggcaatcagccagccggagccggcggatacccaggagcgtcgtacccaggcgcgtaccccggccaggctccgccgggagcttaccctggacaagcaccgccgggcgcctacccaggtgcgccaggcgcctacccgggcgccccagcacctggcgtctatcctggaccaccaagcggaccgggagcctaccccagctcgggacagcctagcgcgactggagcgtacccggcgaccggcccctatggagcacctgcaggccccctcatcgtcccgtacaacctgccgctgcccgggggagttgtgcctaggatgctgatcaccattctgggaaccgtgaagccaaacgcaaaccgcattgcactggacttccagagagggaatgatgtggcattccactttaacccgcggttcaacgagaataaccggagagttatcgtctgcaacaccaagttggacaataactgggggcgcgaggagagacaatcggtctttccgttcgaatccggtaagcctttcaagattcaggtgctggtcgagccagaccactttaaggtcgctgttaacgacgcacaccttttgcaatacaaccaccgggtgaaaaaactgaatgaaatctcaaagctgggcattagcggggacatcgatctgacgtccgcgtcgtacactatgata

SEQ ID NO: 15502 - DNA, 750 bp, synthetic construct
  misc_feature 1..750: note = source = /note="Description of Artificial Sequence: Synthetic coding sequence"
  source 1..750: mol_type = other DNA
atggccgacaacttctcgttgcatgatgccctctcagggagcggtaacccaaacccccagggctggcccggagcttgggggaaccagccggcaggagcggggggctatcccggcgcttcctaccccggagcgtaccccggccaagctcctcctggcgcctaccccggacaggcgcccccaggcgcatatcccggggcaccaggcgcttatcccggggccccagctcctggcgtatatccaggaccacccagcggccctggcgcctatccatcatccggacagccgtctgcaaccggggcgtaccccgcgaccggaccatatggcgcccctgcaggccccctcatcgtcccttataatcttcccctccctggtggagttgttcctagaatgctcattacgatccttggtactgtgaagccaaacgcgaatagaatcgctttggattttcagcgcggaaacgacgtcgcttttcatttcaatcctcgcttcaatgaaaataaccgccgagtgattgtctgcaatacgaaactcgataacaattggggacgggaggaaaggcagtcagttttcccatttgagagcggtaagccctttaagatccaggttttggtcgaacctgatcatttcaaggtcgctgtcaacgacgcccacctactgcaatacaatcaccgcgtaaaaaaactaaatgaaatctcaaaactcggcataagtggggatattgatcttacttctgcgagttataccatgata

SEQ ID NO: 15503 - DNA, 750 bp, synthetic construct
  misc_feature 1..750: note = source = /note="Description of Artificial Sequence: Synthetic coding sequence"
  source 1..750: mol_type = other DNA
atggccgataacttttccctacacgatgctttatccggttccgggaaccccaacccccagggttggccgggggcctggggtaaccagcctgccggagcaggagggtaccctggagcctcctaccccggcgcttatcctggtcaggcaccaccgggagcctatcctgggcaagctcctccgggcgcatatccaggggccccaggggcatatcctggggcgcccgcacccggggtttaccctgggcctcccagtggcccaggtgcgtacccatccagcgggcaaccttcagccacaggtgcatatcccgccaccggcccttacggagcccctgctgggcccctgatcgttccttacaatcttcccctgcccggaggagttgttccccggatgctgattaccatcctgggcacagtcaaaccaaatgcaaacaggatcgcgctggatttccagcgaggaaatgatgtagccttccactttaaccccaggttcaatgaaaacaataggcgcgtcatagtttgcaatacaaagctagataataactggggtagagaagaacggcagagtgtattccctttcgagagcgggaagccctttaagatccaggtgctagttgaaccggaccacttcaaggtcgcagtgaacgatgctcatctcttgcagtacaaccatcgggtaaagaagctcaatgagatttccaaactcggtatctctggagacatcgatctcactagcgcctcatacactatgatt

SEQ ID NO: 15504 - DNA, 750 bp, synthetic construct
  misc_feature 1..750: note = source = /note="Description of Artificial Sequence: Synthetic coding sequence"
  source 1..750: mol_type = other DNA
atggccgataacttctccctccacgacgcactgtctggaagtggcaatcccaaccctcaaggatggccaggagcctggggaaatcaacccgcaggcgccggaggctaccctggagcaagttatcctggggcgtacccaggtcaggctccccccggagcatacccagggcaggcaccccctggcgcctatcctggcgcccccggagcctatcccggagcccccgcgccaggagtataccccggcccaccatctgggccaggtgcatatccatcttcgggccaaccgtccgcgactggcgcttatcctgccacaggcccctacggcgctccagcaggacccctgatcgtgccgtataatctcccactgccgggcggggttgtgccgcgaatgcttataaccattctcggaaccgtgaaacctaatgcaaaccgcatcgcccttgactttcagagaggaaatgacgtggccttccacttcaatccccgttttaatgagaataatcgaagagtgatcgtgtgcaatacgaagctggataataactgggggcgtgaagaaagacagtcagtatttccgtttgaatccggaaaacctttcaaaatccaggtcctcgtagagccagatcatttcaaagtggcggtgaatgacgctcacctgctacagtacaaccacagggtgaaaaagttaaacgagatatccaagcttgggatatccggagacatcgaccttactagcgcctcatataccatgatt

SEQ ID NO: 15505 - DNA, 750 bp, synthetic construct
  misc_feature 1..750: note = source = /note="Description of Artificial Sequence: Synthetic coding sequence"
  source 1..750: mol_type = other DNA
atggctgacaatttctcgctgcacgatgctctctcgggcagcggcaacccgaacccacagggctggccgggagcctggggaaaccaaccggcaggcgccggaggataccctggtgcgtcttacccgggcgcctacccaggacaggcgcctccgggtgcctatccgggtcaggccccaccaggagcgtatccgggcgccccgggtgcgtacccaggggcgccggccccaggcgtgtacccgggaccgccgtcaggacccggcgcttatccgtcgtcaggccagccatcagccaccggagcttacccggctactggaccatatggtgccccggcggggccccttattgtcccgtacaacctgcccctgccaggcggagtcgtcccaagaatgctgatcaccatcctcggaactgtgaagccaaatgcaaatcgcatcgctctcgatttccagcgcggtaacgacgtcgccttccatttcaacccgcggttcaatgagaacaaccggcgggtgatcgtgtgcaataccaagctcgataacaattggggacgcgaagaacggcaatccgtgtttccatttgagtccggtaaaccattcaagatccaagttctggtcgagcctgatcatttcaaagtggccgtcaacgacgcacacctcttgcaatacaatcaccgcgtaaagaagctgaatgaaatctcgaagttggggatttcgggagacatagacttgacctcagcctcctacactatgatt

SEQ ID NO: 15506 - DNA, 750 bp, synthetic construct
  misc_feature 1..750: note = source = /note="Description of Artificial Sequence: Synthetic coding sequence"
  source 1..750: mol_type = other DNA
atggcagataacttttctctccacgacgcactcagcgggagcgggaatcccaacccccaaggctggcctggcgcctggggaaaccagccagcaggcgcagggggctatccaggcgccagctatccaggagcatatcctgggcaggcacctcctggggcctacccaggccaggcccctccgggcgcctatcctggggcccccggtgcttatcctggagctccggcgccaggcgtttatccaggaccgccaagtggaccaggagcctacccctcaagcggacaacccagcgcgacaggcgcttaccccgctacggggccctacggggcccccgcagggcccttgattgtgccttataaccttccattgcccggaggggtggtgccgcgtatgttgatcaccatattgggaacagtgaaaccaaacgccaacaggattgccctggatttccagcggggcaatgatgtggcttttcactttaacccaagatttaatgagaataatcgacgtgtaatcgtgtgcaatacaaaattagataacaattggggacgcgaggagagacaatccgtgtttccattcgagagtgggaagcccttcaaaatccaggttctagtggagcccgatcactttaaagtcgcagtcaatgatgcccacctactccaatataaccaccgggtgaagaaattgaatgagatatccaaactggggatcagtggggacatcgatctgacatcagcctcttataccatgatt

SEQ ID NO: 15507 - DNA, 750 bp, synthetic construct
  misc_feature 1..750: note = source = /note="Description of Artificial Sequence: Synthetic coding sequence"
  source 1..750: mol_type = other DNA
atggcagataacttttcgcttcacgacgcgctgtcgggttcgggtaaccccaacccacagggatggcccggagcatggggcaaccagccagcaggagcaggaggctaccccggtgcctcatacccaggagcgtaccccggccaagcgcctccgggagcctatcccggccaagcccctcctggagcgtacccaggcgctccaggtgcataccctggagcaccggcgcccggagtgtaccctggtccaccttcaggccctggtgcttacccgtcatccggccagcctagcgcaaccggagcatacccagctaccgggccttacggtgcacctgccggtccacttattgtgccgtacaatctgccccttcccgggggtgtcgtgcctcgaatgctgattactattctggggacggtcaagcccaacgcgaatcgtatagccctggactttcaacgcgggaacgacgtggcatttcatttcaatcctaggtttaatgaaaacaacagaagagtcatcgtctgtaacactaaacttgacaataactggggacgtgaggaacgccagtcggtctttccttttgaatcgggtaaacctttcaaaatccaagtccttgtcgagcccgatcacttcaaagtcgccgtcaacgacgcccatcttcttcaatacaatcaccgagtgaagaagttgaatgaaatctcgaagctgggaatttcgggggatatagatctgacttccgcatcgtacactatgatc

SEQ ID NO: 15508 - DNA, 750 bp, synthetic construct
  misc_feature 1..750: note = source = /note="Description of Artificial Sequence: Synthetic coding sequence"
  source 1..750: mol_type = other DNA
atggccgataacttctctcttcatgacgccctctcgggttccggcaaccctaaccctcagggctggcctggcgcatggggcaaccagccggccggtgccgggggttatcctggggcatcctacccaggtgcctaccctggccaggccccccctggagcataccccggccaggcgccccctggagcctatccaggtgcgcccggagcctaccccggcgcgcctgctcccggtgtctaccctggcccaccttctggcccaggagcctatccgtcttcgggtcagcccagtgctacgggcgcgtacccagccaccggtccgtacggcgcccccgccggtccccttattgttccatacaacctcccgcttcccggtggcgttgtcccgcgaatgctcatcaccatcttgggcactgtcaagcctaacgcaaaccgtatcgccctcgacttccagcgtggcaatgatgtggcattccatttcaatccccgcttcaatgagaacaatcgccgggttatcgtgtgcaacactaagttagacaataactggggacgcgaggaaaggcaaagcgtcttccccttcgagtctggtaagcccttcaaaattcaggtccttgttgagcccgatcacttcaaagtcgccgttaatgatgcccacctgctccaatataaccaccgcgtcaagaagctcaatgagatcagtaagcttggtatctcgggtgacattgacttgacatctgccagctataccatgatc

SEQ ID NO: 15509 - DNA, 750 bp, synthetic construct
  misc_feature 1..750: note = source = /note="Description of Artificial Sequence: Synthetic coding sequence"
  source 1..750: mol_type = other DNA
atggccgacaacttcagcttgcacgatgcactcagcggctcagggaaccccaaccctcaaggctggcccggggcctgggggaaccagccagcaggcgccggcggatatcccggggcaagctatccgggagcctaccccggtcaggccccacctggcgcctaccccgggcaggctccgccgggggcatatcctggagcgccaggggcatatcctggagcccccgcccctggggtatatcctggaccaccttcaggcccgggagcttaccccagcagcggccaaccatccgcaaccggcgcatatcccgctaccgggccgtacggtgctcccgcaggacccctcattgtgccgtacaatctgccattacccggcggagtggttcccagaatgttaatcacaatcttggggacagttaagccaaacgccaaccggattgctcttgatttccagcgagggaacgatgtggcctttcattttaaccccaggttcaatgagaacaatcggagagtgattgtgtgtaatacaaaactggataataactggggaagagaagaaagacagtctgttttccctttcgagagcgggaagcccttcaaaatacaagtccttgtggaacctgatcacttcaaggttgctgttaatgacgcacacctgctgcagtacaaccaccgagttaagaagctgaacgagatctccaagctggggatttccggagatatcgatttgacttcggcatcctatacaatgatc

SEQ ID NO: 15510 - DNA, 750 bp, synthetic construct
  misc_feature 1..750: note = source = /note="Description of Artificial Sequence: Synthetic coding sequence"
  source 1..750: mol_type = other DNA
atggcagacaacttctcgctccacgatgccttgagcggatcaggtaatccgaatccacaaggttggcccggagcttggggtaatcagccagccggggcgggcggatacccaggcgcatcttaccccggagcctatcccggccaagcgcccccaggtgcttatccgggtcaggctccaccgggcgcatacccgggggctccaggcgcatatcccggggcgccggccccgggagtgtacccaggccccccatccgggcctggggcatacccttcttccgggcaaccctcagccacgggcgcttacccggcgacaggcccgtatggggcccctgccggtccactcattgtcccctacaacctgccgctcccaggaggagtggtgccacgcatgctgattaccattctcgggaccgtcaaacctaacgctaacaggattgccctagacttccagagggggaacgatgtggcattccactttaatccccgcttcaatgaaaacaataggcgggttattgtgtgcaataccaaattggataataattggggaagggaagaacgccaaagtgtgttccctttcgagtccgggaaacctttcaagatccaggtgttggtggaacctgaccacttcaaagtagccgtgaatgatgcacacctgctgcagtacaaccatagggtaaagaagctcaacgagatctctaagctggggatctcaggcgatatcgatctaacatcagcatcctacacaatgatc

SEQ ID NO: 15511 - DNA, 750 bp, synthetic construct
  misc_feature 1..750: note = source = /note="Description of Artificial Sequence: Synthetic coding sequence"
  source 1..750: mol_type = other DNA
atggcagataacttttctctccatgacgccctgtcaggcagcgggaaccccaacccacagggctggcccggtgcatgggggaaccaacctgccggtgccggaggataccccggcgctagctatccaggggcttatcctggccaagctcctcccggagcatatcccggccaggctccacccggcgcctatccaggagccccgggcgcttatcctggagctccagcccccggagtgtaccccgggccccccagtggacctggagcctacccatcttccggccaaccttctgctaccggtgcctatccagcaaccgggccatacggcgcccccgctggccctttaatcgtgccctacaacctaccactcccaggcggtgtggtgccccgcatgctgattacaattctgggaacagtcaaaccaaacgcaaatagaatagccctcgattttcaaaggggtaacgacgtggctttccacttcaatcctaggttcaatgagaataaccggcgcgttatcgtttgcaacacaaaactggataacaactgggggagagaggaacggcagtccgtcttcccattcgagtccggcaagccttttaaaattcaggtgttggtcgaaccagatcacttcaaagtagccgtgaatgacgctcatttgctgcagtacaaccacagggtaaagaagctgaacgagatttccaagctcgggatcagtggcgatatcgacctgaccagcgccagttatactatgatt

SEQ ID NO: 15512 - DNA, 750 bp, synthetic construct
  misc_feature 1..750: note = source = /note="Description of Artificial Sequence: Synthetic coding sequence"
  source 1..750: mol_type = other DNA
atggcagataacttctcccttcatgatgcactgtccggatcaggaaacccaaacccacaagggtggcccggggcttgggggaaccagcctgccggagcgggtggctatcctggcgcaagctaccctggtgcataccctgggcaagcgcctccgggtgcctacccgggtcaggccccacccggagcgtacccgggcgcccccggagcatacccaggtgcccctgcaccaggagtctacccggggcctcccagcggtccaggagcgtacccctcatcaggacagccttcggcaacgggagcatatccagccaccggcccttacggagccccagcaggcccacttatagtgccgtacaacctgccactgcctggtggagtcgtccctcgaatgctgatcaccattctgggaaccgtcaagcctaatgcgaaccgcattgcactcgatttccaacgtgggaacgatgtcgcgtttcacttcaacccacggtttaatgagaataatcgacgggtgattgtgtgtaatacgaagctcgataacaattggggtcgcgaggaaagacaatccgtgtttcctttcgaaagcggtaaaccattcaagattcaagtgctcgtcgaacccgatcactttaaggtggccgtgaatgatgctcatttgcttcagtacaatcatcgggtgaaaaagctcaatgagatcagcaagttgggaatttcaggcgacatagaccttacctccgcttcctatactatgatc

SEQ ID NO: 15513 - DNA, 750 bp, synthetic construct
  misc_feature 1..750: note = source = /note="Description of Artificial Sequence: Synthetic coding sequence"
  source 1..750: mol_type = other DNA
atggccgacaacttctctctgcacgacgcactgagcggttctggtaatcctaatccccaaggctggccgggggcgtgggggaatcagcctgcgggggcggggggttatccaggagccagctacccaggggcttacccaggtcaagccccacccggcgcctatcccggacaagcgccacccggggcctaccccggagcacccggagcatacccaggcgctcctgccccaggcgtctaccctggtccacccagcggcccaggagcttatcccagttcggggcagcctagtgccactggagcgtaccctgcgacagggccctacggcgcccccgctggaccactgattgtgccatataatttgcctttgcccggtggcgtggtgcccagaatgctgattaccatcctgggcacggttaagcctaatgccaaccgaattgcattagatttccagagaggcaacgacgtagcatttcacttcaatccaaggtttaacgagaataatcgccgcgtgattgtgtgcaacactaagttggataataattgggggcgagaggaaagacagagcgtcttcccctttgagtccggcaagccatttaagattcaggtactggttgaaccagatcattttaaagtggcagtgaacgatgcacatctgctgcagtacaatcatcgggttaagaagctgaacgagatttctaaactaggtatttctggcgatatcgacctcaccagcgcaagctataccatgatc

SEQ ID NO: 15514 - DNA, 750 bp, synthetic construct
  misc_feature 1..750: note = source = /note="Description of Artificial Sequence: Synthetic coding sequence"
  source 1..750: mol_type = other DNA
atggccgacaacttcagcctacatgacgcgcttagtggcagcggaaacccgaacccccaaggttggcccggagcatggggtaaccaacccgctggggctggaggctaccccggagcaagctacccaggcgcctacccgggtcaggcgccacccggggcttaccccggacaggcccctccaggagcttatccaggcgctcctggcgcttatccaggcgctcccgcacccggagtatatcccgggcccccctcagggcctggggcgtatcctagtagcggacaacccagcgccaccggcgcataccctgctaccggcccgtatggagcaccagcgggccccctgatagttccgtacaatctgcccctgccggggggtgttgtaccgaggatgctgatcaccatcctcggaactgtgaaacccaacgccaataggatagcacttgatttccaaaggggcaacgatgtcgcctttcactttaacccaagatttaatgagaacaacaggagagtgatcgtctgtaatacaaaactggacaacaactggggcagagaagagcgccaatcagtctttcctttcgagagtggaaagcctttcaagatacaggtgttggttgaacctgatcatttcaaagtcgcagtgaatgatgcccacctgctgcagtataatcatagggttaaaaaactgaacgagatctccaagctgggcatctccggcgatatcgatctgacctccgcaagctataccatgatc

SEQ ID NO: 15515 - DNA, 750 bp, synthetic construct
  misc_feature 1..750: note = source = /note="Description of Artificial Sequence: Synthetic coding sequence"
  source 1..750: mol_type = other DNA
atggcggataactttagccttcatgacgccctttcgggttccggtaaccctaaccctcaagggtggccaggcgcatggggtaaccaaccggccggagcaggtggatacccaggtgcttcgtacccgggggcgtacccgggccaggcaccccccggcgcataccctgggcaagctcctcctggcgcttacccaggcgcccctggtgcttaccctggggcacctgcacccggggtgtatccaggacctcccagcgggcccggagcctacccatctagcggacagcctagcgcaactggagcatacccggccaccggtccatacggggcaccagcaggaccactgatcgtgccctacaaccttccattgccgggtggtgtggtcccgcggatgctcataactattctgggcacggtgaagcctaacgcaaatcgaattgcgcttgattttcaacggggaaacgatgtggcattccatttcaaccctaggttcaatgagaataaccgcagagtgattgtctgtaataccaaactcgataacaattggggaagggaagagaggcagtcagtgtttccatttgagtcgggcaagccattcaagattcaggtgctggtcgaaccggatcactttaaggtcgcagtgaacgacgcacatctgctgcagtacaaccaccgggtcaagaagttgaatgagatatccaagctgggtatttcaggggacattgatcttacctcggcatcctatactatgatt

SEQ ID NO: 15516 - DNA, 750 bp, synthetic construct
  misc_feature 1..750: note = source = /note="Description of Artificial Sequence: Synthetic coding sequence"
  source 1..750: mol_type = other DNA
atggccgataacttcagtttgcacgatgctttaagtggaagtggaaatcctaatccccaagggtggcccggggcgtggggaaaccagcccgcaggcgctggaggatacccaggggcttcctacccgggtgcctacccaggccaggccccccccggagcatatcccgggcaggctccgcccggggcctatccaggtgcccccggggcctaccccggcgcccctgctcctggggtctatcctgggcccccatctgggcccggcgcttatccctcttcaggccaacccagtgctactggtgcctaccccgcaacaggcccctacggcgcccccgccggccccctgatagtgccatataacctcccactgcctggcggggtggtccccaggatgctcatcaccattcttggcactgtgaagcccaacgcgaacaggatagccctggatttccagcgaggaaatgatgtcgcgtttcacttcaacccccggtttaatgaaaataacagacgagtcatagtctgcaacaccaaacttgacaacaattgggggcgcgaagagcgtcaatccgttttcccctttgagtctggcaaaccatttaagatccaggtattggtggagccagatcatttcaaagtagcagtgaacgacgcccacttgttgcaatacaaccatcgcgtgaaaaaactcaacgagataagcaaactggggatttctggcgatatcgatctgactagcgcatcctacaccatgatt

SEQ ID NO: 15517 - DNA, 750 bp, synthetic construct
  misc_feature 1..750: note = source = /note="Description of Artificial Sequence: Synthetic coding sequence"
  source 1..750: mol_type = other DNA
atggccgacaacttcagtcttcatgatgcacttagtggatcaggaaacccaaatccacagggatggcccggcgcttggggaaaccaaccggctggagcaggagggtatccaggagcctcatatccgggagcttaccctggacaggccccccctggcgcctatccaggccaagctccacccggcgcctatcccggcgcgccaggagcgtatccaggtgcaccagctccaggtgtttaccctggtccaccatcgggcccgggtgcttacccaagctcgggacaaccaagcgcaactggagcatacccagcaacaggaccctatggtgcaccagccggaccacttatagttccatacaatcttcctttgccaggaggtgttgtgccgcgaatgcttatcacgattctgggaacagttaagcctaatgccaatcgtattgctctcgacttccagagaggcaatgacgtagcttttcattttaacccgcggttcaacgagaataataggagggtgatcgtctgtaatactaaactggacaacaattggggcagggaagaacgtcaatctgtgttcccattcgaatctggaaaaccgttcaaaatacaggttctcgttgaaccggaccattttaaagtcgccgtcaatgatgctcacttgttgcaatataatcatcgagtaaaaaaattgaatgagatctcgaagctaggaataagcggagatattgatctaacctcagctagctatacaatgatt

SEQ ID NO: 15518 - DNA, 750 bp, synthetic construct
  misc_feature 1..750: note = source = /note="Description of Artificial Sequence: Synthetic coding sequence"
  source 1..750: mol_type = other DNA
atggcggacaacttcagcctccacgacgcactgtcgggcagcggaaaccccaaccctcagggatggccaggcgcttggggcaaccagcctgctggcgccggaggatacccaggagcgtcatacccgggagcctaccctggccaggcccctccgggcgcctatcccggacaggcgccgcctggtgcatacccaggtgcaccaggggcctaccccggcgctccagcaccgggagtgtaccccgggccaccgtcgggaccaggagcctatccctcctcagggcaaccgtcggcgacgggtgcctacccggcgaccggaccgtacggagcccccgctggtccgctcatcgtgccgtacaacctgccgctccctggaggagtcgtgccgcgcatgctgatcactatcctgggcaccgtgaagccgaatgctaatagaatcgcccttgatttccaacgggggaacgacgtcgccttccacttcaacccgagattcaatgagaataatcggcgcgtgattgtgtgcaacaccaagctggacaataactggggaagagaagagcgccagtcggtgtttccatttgagtccggaaaaccattcaaaatccaagtgctggtagaaccagaccactttaaggtagctgtcaacgatgcgcatctccttcagtacaatcatcgggttaagaagctgaacgaaatttcaaaattggggataagcggtgatatcgatctcacttcggcgagttacaccatgatc

SEQ ID NO: 15519 - DNA, 750 bp, synthetic construct
  misc_feature 1..750: note = source = /note="Description of Artificial Sequence: Synthetic coding sequence"
  source 1..750: mol_type = other DNA
atggctgacaacttctccctgcatgatgcactaagcggctcaggaaacccgaacccccaaggctggccaggcgcgtggggcaaccaaccagctggtgccggcggatatccaggtgcctcgtacccaggggcctacccaggacaggcacctccgggtgcgtaccccggtcaggcgccgccaggagcttaccccggagctccaggcgcctaccctggtgcgccagctcccggggtttacccaggccccccaagcggaccaggcgcgtatccgtcgagtggtcaacccagcgcaactggagcctatccggccacgggcccgtatggcgcaccagcgggacccttgatcgtcccatataatctcccgctgccaggcggcgttgtaccacggatgctgatcacgatactgggcaccgtcaagcccaatgcaaatcggattgcccttgactttcagcgcgggaacgacgtggcattccacttcaaccccagattcaacgagaacaaccggagagttattgtttgcaatacaaagcttgataataattggggccgagaggagcgccaaagcgtgttcccattcgaatcaggcaagccattcaaaatccaagtactagtggaacctgatcactttaaggtagctgtcaacgatgcacacctactgcagtacaaccatcgcgtcaaaaaactgaacgagatcagcaagctagggatatccggagacattgatttgacctcggcaagttacacgatgatc

SEQ ID NO: 15520 - DNA, 750 bp, synthetic construct
  misc_feature 1..750: note = source = /note="Description of Artificial Sequence: Synthetic coding sequence"
  source 1..750: mol_type = other DNA
atggccgataacttctccctgcacgacgccctgtccgggtctggcaatccgaacccccaagggtggcctggtgcttgggggaatcagccggcaggtgccggaggatacccgggagcatcttacccgggcgcttacccaggtcaggcacctcctggcgcgtaccctggacaggccccgcccggagcctatccgggtgccccaggagcatacccgggtgcaccggcacctggagtgtacccgggaccgccgtcgggccctggagcttacccgtcgagcgggcagccgtcggcaaccggagcatatcccgctactgggccgtacggcgccccggcgggacctctgattgtcccgtacaacttgcccctgcccggaggtgtggttccgcgaatgttgatcaccatactggggaccgtcaagcccaacgccaaccggatcgcgcttgatttccagaggggaaatgatgtggcgtttcactttaacccacggtttaacgagaacaatagacgcgtgatcgtgtgcaacaccaaactggacaataactggggaagagaggagcgccaaagcgtgttcccattcgaatcgggaaagccgttcaagatccaagtcctcgttgagcctgaccatttcaaggtggcggtcaacgatgctcacctgctccaatacaaccaccgcgtgaagaagctgaatgagatctcaaaacttgggatttccggcgatatcgatctgacctcggctagctacaccatgatc

SEQ ID NO: 15521 - DNA, 750 bp, synthetic construct
  misc_feature 1..750: note = source = /note="Description of Artificial Sequence: Synthetic coding sequence"
  source 1..750: mol_type = other DNA
atggcagacaatttcagcctccacgacgccctttccgggtccggaaatccaaatcctcaagggtggccgggtgcgtggggaaatcagccggctggagccggtggctaccctggtgctagctatcctggcgcctaccctggacaagcgccgccaggggcttacccggggcaggcacctccaggagcctatcccggcgccccgggggcctaccctggcgccccggctccgggagtctacccaggaccaccatcgggtcctggagcatacccgtccagcggacaaccatccgcgaccggagcgtatccggccactggtccttacggcgctcccgcgggaccactcatcgtcccgtacaacctgccgctccctggaggagtcgtgccgcggatgttgattactatcctcggaaccgtgaagccaaacgccaacagaattgctctcgattttcagagaggcaacgacgtggcgttccatttcaacccgagattcaacgagaataacaggcgcgtcatcgtctgcaataccaagctggacaacaactggggacgcgaggagcggcagtccgtttttccgttcgaaagcggaaagccgttcaagattcaggtgctggtggagcctgaccacttcaaagtcgcagtgaatgatgcacatctcctgcagtacaaccaccgcgtcaagaagctgaatgaaatcagtaaactggggatttccggagacatcgatctcacttccgccagctacaccatgatc

SEQ ID NO: 15522 - DNA, 627 bp, synthetic construct
  misc_feature 1..627: note = source = /note="Description of Artificial Sequence: Synthetic coding sequence"
  source 1..627: mol_type = other DNA
atgggttcagtgagtaatcagcaattcgctggaggttgcgcgaaagctgccgaagaagcccctgaggaggctcccgaagacgccgcccgcgctgcagatgaacctcagctcctgcatggcgccggtatatgcaagtggttcaatgtccgcatgggcttcgggtttctcagcatgactgctcgcgctggagtggccttggatccgccagtagacgtgttcgtgcatcagagcaaattgcatatggaggggttccggtccctaaaagaaggcgaggccgtggagttcacctttaagaagtccgctaaagggctcgagagtatccgcgtgacaggaccaggcggcgtgttctgtataggctctgagcgtcgccctaagggaaaatctatgcaaaaacggaggagcaagggcgaccgatgctacaactgtggcgggctggaccatcatgctaaggagtgtaagttgcctccccaacccaaaaaatgtcatttttgtcagagcataagccacatggtggcatcctgtccccttaaggcgcagcaaggtcccagcgctcaaggaaagcctacttattttagagaagaggaagaggaaattcatagcccaacgttactgcccgaagcacagaat

SEQ ID NO: 15523 - DNA, 627 bp, synthetic construct
  misc_feature 1..627: note = source = /note="Description of Artificial Sequence: Synthetic coding sequence"
  source 1..627: mol_type = other DNA
atgggttccgtcagcaaccaacaatttgcaggtggttgcgcaaaggcagcagaagaggcccctgaagaagccccggaagatgcagcacgagccgcggatgaaccacaactccttcatggagcaggcatctgtaaatggttcaacgtgaggatggggttcggatttctctcaatgacggcccgcgcgggagtggccctggatcctcccgtggacgtctttgtgcatcagagcaagctccacatggagggtttcagatcacttaaggagggcgaggctgtggaatttacttttaagaaatcagcgaagggactggaatctatcagagtcaccggtcctggtggagtgttctgtatcggatccgaacgcagaccaaagggtaagtcaatgcaaaagcggcggtccaagggcgatagatgctacaactgtggtgggttggatcatcatgcgaaggagtgtaaactgcctcctcagcctaagaaatgtcatttttgtcaatcgatatcgcatatggtggcctcctgccccctgaaggcacagcaaggcccatcagcacagggaaaacctacctactttcgcgaagaggaagaagagattcattcccccactctgcttcctgaggcgcaaaac

SEQ ID NO: 15524 - DNA, 627 bp, synthetic construct
  misc_feature 1..627: note = source = /note="Description of Artificial Sequence: Synthetic coding sequence"
  source 1..627: mol_type = other DNA
atgggcagtgtgagcaaccagcagttcgcgggaggatgcgccaaggctgcagaggaagctcctgaggaggcaccagaagatgccgcccgggctgctgacgaaccacaactgctccacggtgcaggaatttgcaaatggtttaatgtgcgcatggggttcggattcctgtccatgaccgcacgggcgggggtggcactggacccacccgtagacgtgttcgtgcatcaatccaagttgcacatggaggggttcagatccctgaaggagggtgaggccgtggagttcaccttcaagaagagcgctaagggactggaatccatccgggtgacgggaccgggaggcgtgttctgtatcgggagcgagaggcggcctaagggtaaatcaatgcagaagagacgctcgaagggagatcgctgctacaattgcggaggactcgatcatcacgccaaggagtgtaagctcccaccacaaccgaaaaagtgccacttttgccagtcgatctctcacatggtcgcatcgtgtccgctcaaggcccagcaaggcccatcagcgcagggcaagccgacctacttccgcgaagaagaagaggagatccactctccgactctgcttccggaggctcaaaac

SEQ ID NO: 15525 - DNA, 627 bp, synthetic construct
  misc_feature 1..627: note = source = /note="Description of Artificial Sequence: Synthetic coding sequence"
  source 1..627: mol_type = other DNA
atgggtagcgttagtaatcagcagttcgccggaggctgtgcaaaggcagcagaggaagccccagaggaggctcctgaagacgctgccagagccgccgatgagcctcagctcctacatggggcgggcatatgcaagtggttcaacgtgcgcatgggtttcgggttcttgagtatgactgctcgagccggcgtggcgctggaccccccagtggatgtgtttgtgcaccaatcaaagctgcacatggaggggttcaggtcattgaaggagggagaggccgtagagttcacattcaagaagagtgccaaagggctcgagtccattcgggttaccggcccgggaggagtgttttgtattgggagtgagcggcgacccaaaggcaagtccatgcagaaacgtagaagcaagggtgacagatgctacaattgtggtggcctggaccatcacgctaaggagtgtaaactgccaccacagcccaagaagtgccatttttgccagtccatatcacatatggtggcgtcctgcccgttgaaagcgcagcaagggccctcagcccagggcaagcccacatacttccgcgaagaagaagaggaaatccattccccaaccctcttacccgaagctcagaac

SEQ ID NO: 15526 - DNA, 627 bp, synthetic construct
  misc_feature 1..627: note = source = /note="Description of Artificial Sequence: Synthetic coding sequence"
  source 1..627: mol_type = other DNA
atggggtctgtttccaaccagcaattcgcagggggatgcgccaaggctgccgaggaagcacctgaagaggctccggaagacgctgcccgcgcagccgacgaacctcagctcctgcacggagccgggatatgtaagtggtttaacgtgaggatggggttcgggtttctgagtatgaccgcccgagccggtgtcgcactagatccacctgtagatgtgttcgtgcaccagtccaagcttcatatggaaggttttagatcccttaaagagggcgaggcagtggagttcacatttaagaagagcgcaaaggggctggaaagcataagggtgaccggtccaggtggtgtgttctgcatcggaagtgaacgcagacccaagggcaagtccatgcaaaaacgccgttccaaaggagaccgatgttataattgcggaggcctcgatcaccatgcaaaagaatgtaagctccccccacagccaaaaaaatgccatttctgtcaatcaatctcacacatggtggcgagttgccctttgaaagctcagcaggggcccagcgctcagggaaagcccacctatttcagagaggaggaggaggagattcatagccctaccctgctgcctgaagctcagaat

SEQ ID NO: 15527 - DNA, 627 bp, synthetic construct
  misc_feature 1..627: note = source = /note="Description of Artificial Sequence: Synthetic coding sequence"
  source 1..627: mol_type = other DNA
atggggagtgtcagcaatcagcagttcgcaggtgggtgcgcaaaggcagcggaggaagcacccgaagaagcccccgaggacgcagcccgggcagccgacgagccccagctactccacggagccggcatctgcaagtggttcaacgtccgcatggggttcggcttcttgagtatgacagcgcgggctggagttgcgctcgacccccccgttgatgtattcgtccatcagtcaaagctgcatatggagggtttcagatcactcaaggaaggagaagccgttgaattcacattcaagaaatctgctaagggcctcgagagtataagggttaccggtcctgggggcgtgttctgcatcggaagcgaaagacgccctaaaggaaaatcgatgcagaagcggagatctaagggtgaccggtgctacaattgcggtggacttgatcatcatgctaaggaatgcaagctgcctccgcagcccaagaagtgtcacttttgtcagtccattagccatatggttgccagctgtccgctgaaagcccaacaaggccctagcgctcagggtaaaccaacctatttccgggaagaagaggaggaaatccattcccccacactgctgcctgaggcacagaat

SEQ ID NO: 15528 - DNA, 627 bp, synthetic construct
  misc_feature 1..627: note = source = /note="Description of Artificial Sequence: Synthetic coding sequence"
  source 1..627: mol_type = other DNA
atgggatcagtatctaaccagcagtttgccggggggtgcgccaaagccgctgaggaagcccccgaggaagcacccgaagatgccgcccgagccgctgacgagccacagcttttacacggagcagggatatgtaagtggttcaatgtgaggatggggtttggatttttgagtatgacagcacgcgccggggtcgccctagatccccctgtggacgtgttcgtacaccaatccaaactgcacatggaaggatttcggagtctcaaagagggagaagccgttgagtttacttttaagaaatccgctaaagggcttgaatccatacgggtgacaggacccgggggggtcttctgcatcgggagtgaaaggcggccaaaagggaagtccatgcagaagcggaggtctaagggggatcgatgctataactgcggagggctcgatcatcatgccaaagaatgcaaactgcctccacaacccaagaaatgccacttctgtcaatccatcagtcatatggtggcctcatgtccactcaaagcacagcaggggccttccgcccagggaaaacctacttattttcgagaggaagaagaggagatccactcacctactcttctgcctgaagctcagaat

SEQ ID NO: 15529 - DNA, 627 bp, synthetic construct
  misc_feature 1..627: note = source = /note="Description of Artificial Sequence: Synthetic coding sequence"
  source 1..627: mol_type = other DNA
atgggaagtgtgtctaatcagcagttcgccggtggatgcgcaaaggccgcagaggaggctcctgaagaagcccctgaagacgctgctagagcagctgatgagcctcagctcctgcacggtgccggcatatgcaagtggttcaacgtgcgtatgggtttcggatttttgagcatgactgccagagcaggcgtagcactcgatccaccagttgacgtttttgtgcaccaaagtaaactgcacatggaaggcttccgctctttgaaggagggagaggccgtggaattcacattcaaaaagtctgccaagggcctcgaaagcatcagggtgaccggtcccggtggtgttttctgcatcggtagtgagcgccgtccaaaaggtaagtccatgcaaaagcgtaggagcaaaggcgaccgctgctacaactgcggtggccttgaccatcacgccaaggagtgtaaactgccaccacagccaaagaagtgccacttttgtcagagtatatctcacatggtcgcttcctgtcccctcaaagctcagcagggtccctcagcccagggtaagccaacatacttcagggaggaagaagaggagatccactcccctactcttctgcctgaagcccagaac

SEQ ID NO: 15530 - DNA, 627 bp, synthetic construct
  misc_feature 1..627: note = source = /note="Description of Artificial Sequence: Synthetic coding sequence"
  source 1..627: mol_type = other DNA
atgggctcggtatcgaaccagcagttcgccgggggatgcgcgaaagccgccgaagaggccccggaggaggcccccgaggatgcggcaagggccgcggatgagccgcagttgctgcatggagcgggcatctgtaagtggtttaacgtgagaatgggattcggattcctttcgatgacggcacgggccggcgtcgccctcgacccaccagtcgacgtgttcgtccaccagtccaaactgcacatggagggattcagatctctcaaggaaggtgaagcagtcgaattcacttttaagaaaagtgctaagggcctcgagagcattcgcgtgactggaccgggaggggtgttctgcatcggatcagaacgtcgccccaagggcaaaagcatgcagaagcggagatcaaaaggagatcgctgttacaactgtggaggattggatcaccacgcaaaggaatgcaaattgccccctcaacctaagaaatgccacttttgccaatccatctcgcatatggtggcgtcctgcccgctgaaggctcagcagggtccgtctgctcaggggaagccaacctacttcagagaagaggaggaagagatccatagccccaccctgctgcctgaagcgcaaaac

SEQ ID NO: 15531 - DNA, 627 bp, synthetic construct
  misc_feature 1..627: note = source = /note="Description of Artificial Sequence: Synthetic coding sequence"
  source 1..627: mol_type = other DNA
atgggctctgtgtccaatcagcaattcgcaggcgggtgcgccaaggctgccgaggaagcccctgaagaggcgcctgaagacgccgcacgggccgccgatgagcctcagctactgcatggtgctgggatttgtaagtggtttaatgtgcggatggggtttggtttcctctccatgacggccagagccggcgtcgccctggatcctccagtcgatgtattcgtgcaccagtccaagctccatatggaggggttccggagtctaaaagaaggtgaggcggtggagtttacatttaagaaatcagccaaaggattggagagcattcgcgtcaccggtcccggtggagtcttctgcatcggcagcgagcgacgacctaaagggaagagcatgcagaaaagacgctccaaaggcgaccgctgctacaattgcgggggtctcgaccatcatgcaaaggaatgcaagctcccgcctcagcctaaaaaatgccatttttgccagagcattagtcatatggtagccagttgcccgctgaaggcccagcagggacccagcgcacagggtaaaccgacatatttccgcgaggaggaagaagagatccactcgcctactctgctccccgaagcccaaaac

SEQ ID NO: 15532 - DNA, 627 bp, synthetic construct
  misc_feature 1..627: note = source = /note="Description of Artificial Sequence: Synthetic coding sequence"
  source 1..627: mol_type = other DNA
atgggaagcgtgtccaaccagcaattcgcgggaggttgcgccaaggctgctgaggaggctccagaggaagcccccgaagatgcggcacgggcggcagatgaaccgcagcttctgcacggggcgggaatctgtaagtggttcaatgtccgcatgggattcggattcttgtccatgactgcaagggccggagtcgcactggaccctccagtggatgtattcgtgcatcagagcaagttgcacatggaaggatttcggtcattgaaggaaggagaagcagtggaattcactttcaagaaaagcgcgaagggtctggagtcaatccgggtcactggtccaggaggagtgttttgcattggcagcgagagacgcccaaagggcaagtccatgcagaaaaggagatccaagggggaccggtgctacaattgcgggggactggatcatcatgctaaggaatgtaagttgccacctcagccgaagaaatgccacttctgccaatcgatttcacacatggtggcctcatgcccgctcaaggcccagcagggaccttccgctcagggcaaacccacttacttccgagaagaggaggaagaaatccatagcccgaccctgctgcccgaggcgcaaaac

SEQ ID NO: 15533 - DNA, 627 bp, synthetic construct
  misc_feature 1..627: note = source = /note="Description of Artificial Sequence: Synthetic coding sequence"
  source 1..627: mol_type = other DNA
atggggtctgtcagcaatcagcaattcgccggcggttgtgcaaaggccgcagaagaagctcccgaagaggcccccgaggatgccgcccgggccgctgacgagccacagctgctgcacggagctggcatctgtaagtggtttaatgtgcgcatgggctttgggtttctctccatgacagctagggccggggtagccctggatccacctgtagatgtgttcgtccaccagagcaagctccatatggaggggttcagatcattgaaagaaggtgaggccgtggaatttacatttaaaaaatctgctaaaggactggagtctatccgggtcacgggacccgggggtgtgttctgcatcgggagtgaacgccgccccaaaggtaagagcatgcagaaacgcaggtctaagggtgatcggtgttataattgcggtgggctcgaccatcatgctaaagagtgcaagttgccaccccagcctaaaaaatgtcatttttgccagagtattagccacatggtcgctagttgtccactcaaggctcaacagggcccgtccgcccaaggcaaaccgacgtacttcagagaggaggaggaggagatacactcacccaccttgcttccggaagcacagaac

SEQ ID NO: 15534 - DNA, 627 bp, synthetic construct
  misc_feature 1..627: note = source = /note="Description of Artificial Sequence: Synthetic coding sequence"
  source 1..627: mol_type = other DNA
atgggatcagtctcaaatcagcagttcgcaggcggatgcgcaaaagccgcggaggaggcacccgaagaggccccagaagatgccgctcgcgccgcagatgaaccacagttgcttcatggggcagggatttgtaagtggttcaacgtgcggatgggattcggcttcctgtccatgacagcccgcgcaggcgtcgccctggatcctccggtggatgttttcgtgcatcagtctaaacttcatatggagggattccgttccctgaaagagggggaggccgtggaattcactttcaagaagagcgccaagggcctagaatccatccgcgtgaccggtccagggggggtgttctgtattgggtcagagcgccgtccaaaagggaagtctatgcagaagaggcgttctaagggagatagatgttataactgtggaggtttggatcatcatgctaaggagtgcaagttacctccccagcctaagaagtgtcatttctgccaaagcatctcgcacatggttgctagctgccctctgaaggcgcagcaggggccttccgcccaaggcaaacccacctatttccgagaagaggaggaagaaattcactctcctactctgctccccgaggcacaaaac

SEQ ID NO: 15535 - DNA, 627 bp, synthetic construct
  misc_feature 1..627: note = source = /note="Description of Artificial Sequence: Synthetic coding sequence"
  source 1..627: mol_type = other DNA
atgggtagtgtgtctaatcagcagtttgctggcggctgtgctaaggccgcggaggaggcacctgaggaagctccagaggacgcagcgagagccgctgacgaaccccaacttctgcacggcgccggaatttgtaagtggtttaatgtcagaatgggcttcggcttcctgagcatgactgcccgagccggcgtggcgttggatcctcccgtggacgtgttcgtacaccagtccaagctgcatatggaaggatttcgtagcctgaaagagggcgaagcagttgagtttacatttaaaaagtctgctaagggactggagtccatccgagtgactggaccgggtggagtcttttgcatcggttccgagcggcgacctaagggaaagtccatgcagaagagaaggagcaagggggacaggtgctataattgcggtgggctcgatcaccacgccaaggagtgtaagctcccacctcagccaaaaaaatgtcacttctgccaaagcataagccacatggtagcttcctgtcccttaaaagcacagcagggcccctctgcccaagggaaacctacttactttagggaggaggaggaggagatccactcccctacactgctgcctgaagcacagaac

SEQ ID NO: 15536 - DNA, 627 bp, synthetic construct
  misc_feature 1..627: note = source = /note="Description of Artificial Sequence: Synthetic coding sequence"
  source 1..627: mol_type = other DNA
atgggctccgtctccaaccagcagtttgctggtggctgcgccaaggccgccgaggaggcccccgaggaagcacctgaggacgcagcacgggcggctgacgagcctcaactgttacacggtgccggcatttgcaaatggtttaatgttcggatgggcttcggcttcctgtcaatgaccgctagggcaggcgttgctctggaccccccggttgacgtgtttgtgcaccaaagcaagttacatatggaaggcttcagatccctcaaagagggggaggccgtggagtttacattcaagaaatctgctaagggcttggaatctatcagggtcaccggaccgggaggagtattttgcataggcagtgaacgtcgccccaagggtaaaagtatgcagaaacggcgcagcaaaggggacaggtgttacaactgtggcggtctagaccatcacgcaaaagagtgcaaactcccgcctcagcctaagaagtgccatttctgtcagtcaatctctcatatggtggccagttgtcctctgaaggcacagcaggggccctccgcgcagggcaagccaacatactttagagaggaagaagaagagatccattctcccaccctgctgcccgaagcacaaaac

SEQ ID NO: 15537 - DNA, 627 bp, synthetic construct
  misc_feature 1..627: note = source = /note="Description of Artificial Sequence: Synthetic coding sequence"
  source 1..627: mol_type = other DNA
atgggtagtgtgagcaaccaacagttcgcaggagggtgcgctaaagccgcggaggaggccccggaggaggcgcctgaggatgccgcgagggccgccgacgagccacagcttctgcacggagccggaatctgtaagtggttcaacgtaagaatgggatttggctttttgagcatgactgctagggccggcgttgccctggacccacccgtggatgtgttcgtgcaccagtctaagcttcacatggaaggcttcagatccctgaaagagggagaagccgtagagttcactttcaaaaaatcagcgaaaggactggagagcattagagtgaccggaccaggtggcgtgttttgtatagggagtgagagaagaccgaaaggcaagtctatgcaaaagcgaagaagtaaaggggatcggtgttataactgcggagggttggaccaccacgcaaaggaatgtaaactgcctccccagccgaaaaaatgccatttttgtcagtccatatcacatatggttgctagttgcccactgaaggcccagcagggtccctctgcccagggcaagccaacctactttagggaagaagaggaagagatccattcgccaacacttcttcctgaggcgcaaaac

SEQ ID NO: 15538 - DNA, 627 bp, synthetic construct
  misc_feature 1..627: note = source = /note="Description of Artificial Sequence: Synthetic coding sequence"
  source 1..627: mol_type = other DNA
atgggatccgtgtcgaatcaacagttcgcaggaggctgcgcgaaggcggcagaagaagcacctgaggaggctcctgaagatgccgccagagctgcggacgaacctcagctcttgcacggcgccgggatctgtaagtggttcaacgtgcggatgggattcggtttcctctctatgaccgcccgcgccggagtcgccctggatccgccagttgacgtgtttgtgcatcagtcaaagctgcacatggagggatttcgctcccttaaggagggagaggcggtggagttcactttcaagaagtcagccaaaggactcgaatcgatccgggtcaccggtccgggaggcgtgttctgcatcggctcggaaagacggccgaaggggaagagcatgcaaaaacgacgctccaagggcgacaggtgctacaactgcggaggactggaccaccatgccaaagagtgtaaactcccgccacagccgaagaagtgccatttctgtcaatcgatttcccacatggtcgcgagctgccccctgaaagctcagcaagggccatcagcacagggtaagccgacttactttcgcgaagaagaagaggagatccacagcccaacgctgctgcccgaagctcagaac

SEQ ID NO: 15539 - DNA, 627 bp, synthetic construct
  misc_feature 1..627: note = source = /note="Description of Artificial Sequence: Synthetic coding sequence"
  source 1..627: mol_type = other DNA
atgggaagtgtgtctaaccagcagttcgcaggcggctgcgcaaaggctgccgaagaggcaccggaggaagctcctgaagatgccgcacgcgctgctgacgaaccacagctcctgcacggagccgggatttgcaagtggttcaacgtgcgcatgggttttgggttcctttccatgactgcgcgcgccggagtggcgctggaccccccagtggacgtgtttgtgcaccagagcaagttgcatatggagggatttagaagcctcaaggagggagaggctgtggagtttacttttaagaagtcggccaaagggctcgaatcgatccgggtgacgggaccaggaggagtcttttgcatcgggtcagaacggcggcccaagggtaagtcaatgcagaaaagacggtcaaagggcgatcggtgctataactgcggaggactcgatcaccacgccaaagagtgcaagctgccgccacaacctaagaagtgccacttctgccagtccatcagccacatggtcgcgtcgtgcccgctcaaggcccaacaggggccatccgcccagggcaagccgacttacttccgcgaggaagaagaagaaatccattccccgaccctcctgccagaggcccaaaac

SEQ ID NO: 15540 - DNA, 627 bp, synthetic construct
  misc_feature 1..627: note = source = /note="Description of Artificial Sequence: Synthetic coding sequence"
  source 1..627: mol_type = other DNA
atgggtagtgtttcaaaccaacagttcgccggtggctgcgctaaagctgctgaggaggcaccagaggaggccccggaagatgcagcaagagctgcagacgagccacaattgctccatggcgctggcatttgcaagtggttcaacgttagaatgggattcggtttcctttcaatgactgcccgggcaggagttgcccttgaccccccagttgatgttttcgtgcatcaatccaagttgcatatggaggggttcagaagcctcaaggagggtgaagcagtcgagttcacctttaaaaagtctgcaaagggtctagaaagcattagggtcaccggccctggaggtgtgttttgtataggttctgagcgtagaccaaagggcaaaagcatgcagaagcggagatccaagggtgacagatgttataactgcggtggccttgatcaccatgccaaggaatgtaagcttccaccgcaacctaagaagtgtcatttctgtcaatccattagccatatggtcgctagctgcccattgaaggctcagcaagggccatctgctcaggggaagcccacttatttcagggaagaggaagaagagatccactctcctacattgttaccagaagctcaaaat

SEQ ID NO: 15541 - DNA, 627 bp, synthetic construct
  misc_feature 1..627: note = source = /note="Description of Artificial Sequence: Synthetic coding sequence"
  source 1..627: mol_type = other DNA
atggggagtgtgagcaaccagcagttcgcaggtgggtgcgccaaagcggcagaggaggctcccgaagaagcacctgaagatgcggcaagggcagcagatgaaccacaactcctgcacggggcaggaatctgcaagtggtttaatgtgcgcatgggatttggcttcctttcgatgactgccagagccggcgtggcgcttgatccccctgtcgacgtctttgtccaccaatccaaactgcatatggaaggctttaggtcactgaaagagggggaagcagtggaattcacctttaagaagagcgcaaagggacttgaaagcattagagtgaccggaccagggggagtgttttgcattggttcggaaaggcggccaaagggaaagtcaatgcagaaaaggagatcaaagggtgaccgctgttacaactgcgggggacttgatcatcatgcaaaggaatgtaagctccctccccaaccaaagaagtgtcatttctgccaatccatttcccatatggtggcatcctgtccactcaaggcccagcagggaccttctgcgcaaggaaagccaacttactttagagaagaagaggaggaaatacatagccccacccttctccctgaagcacagaac

SEQ ID NO: 15542 - DNA, 627 bp, synthetic construct
  misc_feature 1..627: note = source = /note="Description of Artificial Sequence: Synthetic coding sequence"
  source 1..627: mol_type = other DNA
atgggcagtgtgtctaatcagcaattcgccggcggatgcgcaaaggctgcggaggaggcgcctgaggaggctcctgaggacgccgccagagctgccgatgaacctcaactgcttcacggagccggcatatgtaaatggttcaacgttcgcatggggttcggttttttgagcatgacagcaagggccggcgtggcacttgatcctccggtagacgtctttgttcatcaaagcaagttgcacatggagggattcagaagtttaaaagagggggaagctgttgagttcacctttaaaaaaagtgcaaaaggcttagagagtatccgtgtcacaggccccgggggagtcttttgcattggatcagaacgcaggcccaaaggcaagtctatgcagaaacgtcgcagcaagggagatagatgttataactgtggcggcctggaccaccacgcaaaagaatgcaagctcccccctcagcccaaaaaatgtcacttttgccaatctatcagccatatggtggcttcatgtccactcaaagcacaacagggacccagcgcgcagggcaagccaacttatttccgggaggaggaggaagaaatccattctcctactctcttgcctgaggcacaaaat

SEQ ID NO: 15543 - DNA, 627 bp, synthetic construct
  misc_feature 1..627: note = source = /note="Description of Artificial Sequence: Synthetic coding sequence"
  source 1..627: mol_type = other DNA
atgggatccgtctccaaccaacagttcgcaggaggctgcgcaaaggcggcagaagaggcaccagaggaagcgcctgaagacgcagcgcgggctgccgacgagcctcagctgctgcacggagccggaatctgtaaatggtttaatgtgcgaatgggatttggattcctttctatgaccgctagggccggcgtcgccttggacccgcctgtggatgtctttgtgcatcagtcaaagctgcacatggagggcttccggagcctgaaagaaggggaagccgtagaatttacatttaaaaagtctgcaaagggactggaatcaattagggttaccggccccgggggagtattttgcatcggtagtgagcggcgtcccaaggggaagagcatgcagaaacggcgcagcaaaggagaccggtgttacaattgcggcggcctagaccaccacgccaaggaatgcaagctgccccctcaacctaagaagtgccacttttgccagagcataagtcatatggtggcctcctgcccactgaaagcacagcaaggtccttctgcccagggcaaacctacatactttcgggaggaggaagaagagatacattcacctaccctgctgcccgaagcccaaaac

SEQ ID NO: 15544 - DNA, 627 bp, synthetic construct
  misc_feature 1..627: note = source = /note="Description of Artificial Sequence: Synthetic coding sequence"
  source 1..627: mol_type = other DNA
atgggatcggtgtccaatcagcagttcgccggcggctgtgcaaaggctgcagaggaggcccccgaggaagctcctgaggatgccgcaagagcggctgatgaaccacagctgctgcatggggcgggcatatgtaaatggttcaatgtacggatggggttcggttttctcagtatgactgcgcgagccggcgtggccctggatcctccggtggatgtgtttgttcaccagtcgaaactccacatggagggttttcgttctcttaaagagggcgaggcagtggagtttacctttaaaaagtcagcgaaaggtcttgagtcaatcagagtcactggaccagggggtgtgttctgcatcggttcggagcgccggccaaaagggaagtcaatgcagaagaggcgctccaaaggtgaccggtgttacaattgcgggggcctggaccaccacgccaaagagtgcaagctgcctcctcagcctaaaaagtgccatttctgtcagtcaatctcccatatggtggcctcttgcccacttaaggcccaacagggacccagcgcccagggaaagccaacatacttccgcgaggaagaagaggagatccatagtcctactctgctgccagaggcccagaac

SEQ ID NO: 15545 - DNA, 627 bp, synthetic construct
  misc_feature 1..627: note = source = /note="Description of Artificial Sequence: Synthetic coding sequence"
  source 1..627: mol_type = other DNA
atgggttcggtctcaaaccagcagttcgctggtgggtgtgcaaaagccgccgaggaggcaccagaggaagctcccgaggatgcggcccgtgcggcggacgaaccccagttgctgcacggggcagggatttgtaagtggttcaacgtgcgaatgggatttggattcctctcaatgacggcccgtgcgggagttgcgctggacccccctgttgatgtgttcgtccatcagtctaagctgcacatggagggatttcgatctcttaaggaaggagaagctgtggaattcacgtttaagaagagtgctaaggggttagagtctatccgcgtcacgggccctggtggagttttttgtatcgggtccgagagaagacctaagggcaaaagcatgcaaaagagacgatccaaaggcgaccggtgctacaactgcggtggcctcgatcaccacgctaaagagtgtaagctaccccctcagcctaagaagtgccatttctgtcagtcaatttcgcacatggtcgcgtcgtgtcctctgaaggcgcagcagggtccgagcgcacaggggaaacccacttacttccgagaggaggaggaggagatacacagccccacactactgccagaagcccagaac

SEQ ID NO: 15546 - DNA, 627 bp, synthetic construct
  misc_feature 1..627: note = source = /note="Description of Artificial Sequence: Synthetic coding sequence"
  source 1..627: mol_type = other DNA
atgggatcggtgagcaatcaacaatttgcaggcggttgtgcaaaggcagcagaagaagccccagaggaagcaccagaggacgcagctcgcgcagcagatgagcctcagctgctgcatggagcaggaatctgtaagtggtttaatgtgcggatgggtttcggtttcctttcgatgaccgcacgggcaggggtggctcttgatccgccggtggacgtgttcgtccaccagtcgaaacttcacatggaaggatttcggtcccttaaggaaggcgaggcggtggagtttacctttaagaaatcagcaaagggtctggagagcatcagggtgactggccccgggggagtgttctgtatcggctccgaacgtcgacccaaggggaagtcaatgcaaaagaggcggtcgaagggtgacagatgctacaattgtggaggattggatcatcatgctaaggaatgtaagctccctcctcagcccaagaagtgccatttttgccagtcaatttcccatatggttgcttcgtgtcctcttaaagctcaacaaggaccttccgcacaggggaagcctacgtactttcgcgaagaagaggaagaaatccattcgcccactcttctgccagaagcacagaac

SEQ ID NO: 15547 - DNA, 627 bp, synthetic construct
  misc_feature 1..627: note = source = /note="Description of Artificial Sequence: Synthetic coding sequence"
  source 1..627: mol_type = other DNA
atggggtccgtctccaatcaacagtttgccggcggctgcgctaaggccgccgaggaagcccctgaggaagctcctgaggacgccgcaagggcagctgacgagccacagttgcttcacggggccggaatttgcaagtggttcaacgtacgcatgggtttcggttttctctctatgaccgcacgcgcaggcgttgcactggacccccccgtggacgtcttcgtgcaccagagcaaactgcacatggagggttttaggagcctgaaggaaggggaggcagtcgaattcacgtttaagaagagcgccaaagggcttgaaagtatccgtgtgaccggccccggtggggtcttttgtatagggtccgaacgaagacccaagggaaagagcatgcaaaagagacgcagcaaaggagacaggtgctacaactgcggaggcctggatcatcacgccaaagagtgcaagctgcccccccagcctaagaagtgccacttctgtcagtcgatcagccacatggttgccagctgtcctctgaaggctcagcagggtcccagcgctcagggcaagcctacgtactttagggaggaggaggaagagatccattccccaacacttttgcctgaagcgcagaat

SEQ ID NO: 15548 - DNA, 627 bp, synthetic construct
  misc_feature 1..627: note = source = /note="Description of Artificial Sequence: Synthetic coding sequence"
  source 1..627: mol_type = other DNA
atgggcagtgtttcaaatcagcagttcgctggaggatgcgcaaaggcagccgaagaggctcccgaagaagcgcccgaagacgctgctagggccgctgacgagcctcagttgcttcacggcgctggcatctgcaagtggtttaatgttagaatgggatttggctttctctctatgactgctagggccggcgttgctcttgatcccccagtggatgtgtttgttcatcaatccaaactccacatggagggtttcaggagtctgaaggaaggcgaggctgttgaattcactttcaaaaaaagtgccaaggggttggagtctatccgcgtgaccggccctggaggagtgttctgcatcggaagtgagcgtaggcccaaaggaaagtctatgcaaaaacggaggagcaagggggatcgctgttataattgcggtgggctagatcaccacgctaaggagtgtaaactgccaccccaacccaagaaatgtcacttttgccaaagcatcagccatatggtggcctcctgccccttgaaggctcagcagggccccagcgcgcaggggaagccgacctactttcgcgaggaggaggaggagatccattccccgaccctgctccctgaagcgcagaac

SEQ ID NO: 15549 - DNA, 627 bp, synthetic construct
  misc_feature 1..627: note = source = /note="Description of Artificial Sequence: Synthetic coding sequence"
  source 1..627: mol_type = other DNA
atgggatcagtgagtaaccagcagttcgccgggggctgcgcaaaggcggctgaagaggcccctgaagaggctcctgaggatgctgcaagagccgctgacgaaccacaactgctgcatggcgccggaatctgtaagtggtttaatgtgcggatggggtttgggtttctgtctatgaccgccagagctggagtagccctggatcccccagtggacgtcttcgttcaccaatccaagctgcacatggaagggtttcgctccctgaaggagggggaggctgtcgaattcacctttaagaaatctgccaaagggctggagagtatccgcgtgacaggtcctggcggcgtgttttgtatcggctctgagagaaggcccaagggcaaatccatgcagaaacggcgttccaaaggcgatagatgttataattgcggcgggctggatcatcacgctaaggaatgtaaactgcccccgcagcccaagaagtgccacttctgccagagcatcagtcatatggttgccagctgcccactaaaggcccagcaaggcccctctgctcagggcaagcccacttactttcgggaagaggaggaggaaattcactcccccactcttctgcccgaagcacagaat

SEQ ID NO: 15550 - DNA, 627 bp, synthetic construct
  misc_feature 1..627: note = source = /note="Description of Artificial Sequence: Synthetic coding sequence"
  source 1..627: mol_type = other DNA
atgggatccgtgtcaaatcaacagttcgcaggcggttgtgccaaggccgccgaagaggcgccggaagaggctccagaggatgccgcacgcgctgcggatgagccgcagttgcttcacggcgcaggaatctgtaaatggtttaatgtacggatgggattcgggttcctgtcaatgactgccagggcgggtgttgcactggatcctcctgtcgacgtgtttgtgcaccagtcaaaactccacatggaaggcttccgctccctgaaagagggggaggctgtcgaatttacgttcaaaaagtcggccaagggcctggaatccatacgcgtcactggacctgggggagttttttgtatcggttcggaaagacggccaaaaggaaagtcaatgcaaaaaaggcggtccaagggcgaccgatgctacaactgcggagggctcgaccatcatgctaaggagtgcaagctgccgccccagccgaagaagtgccatttctgccagtcgatcagtcacatggtggcgtcgtgcccactcaaggcccaacagggtcctagcgcgcaaggaaagccaacctacttccgagaagaggaagaagaaattcactcgccgactctgctgcccgaagcccagaac

SEQ ID NO: 15551 - DNA, 627 bp, synthetic construct
  misc_feature 1..627: note = source = /note="Description of Artificial Sequence: Synthetic coding sequence"
  source 1..627: mol_type = other DNA
atgggttcggtgtcgaatcagcagttcgctggtggctgtgctaaagctgccgaagaagcccctgaggaagctccggaggacgccgctcgggccgcggatgaaccccagctgctgcatggagccggaatttgtaagtggtttaacgtgcgcatgggatttggctttctcagcatgaccgcgcgcgcaggagtggctctggatccgcccgtggacgtctttgtgcatcaatcgaagctgcacatggagggattccggtcgctgaaggaaggagaagcagtggaattcaccttcaagaaatctgctaaaggcctggaatcaatcagagtgaccggaccgggtggcgtcttttgcatcggaagcgagcgccggccgaaaggcaaatccatgcaaaagcgccgcagcaagggcgaccgatgctacaactgcggaggactcgatcaccacgccaaggagtgtaagctgcccccacagcctaagaagtgtcatttttgccagagcatctcccacatggtcgcttcgtgtcctctgaaggcacagcaggggccctcagcccaaggaaagccaacttacttccgcgaggaggaagaggagatccactcacctaccctcctgcctgaagcgcagaac

SEQ ID NO: 15552 - DNA, 627 bp, synthetic construct
  misc_feature 1..627: note = source = /note="Description of Artificial Sequence: Synthetic coding sequence"
  source 1..627: mol_type = other DNA
atgggttccgtgtccaaccaacagtttgcaggaggatgcgctaaggcagcagaggaggcaccagaagaagcacctgaagatgctgcgcgtgctgcagatgaacctcaactgctccatggtgcgggaatctgcaagtggtttaatgtgcgtatggggttcggatttctctctatgaccgctcgagccggggtcgcactggaccctcccgtggacgtctttgtccaccagtctaaacttcatatggaagggtttagatcccttaaggaaggagaggcagtggaattcacttttaagaagagcgccaagggcctggagtcgattagggtcactggaccaggaggcgtgttttgtatcggatccgaacgcagacctaagggaaagtcaatgcaaaaaagacggtccaagggcgaccgctgttacaattgtggaggactggatcatcacgcaaaggagtgcaagttgcccccacaaccaaagaagtgtcacttttgtcaatcaatttcacatatggtcgcatcatgtccccttaaagcacagcagggacccagcgcacagggaaagcctacctactttcgcgaagaagaagaggaaattcatagcccgaccctgctgccagaggcacagaat

SEQ ID NO: 15553 - DNA, 627 bp, synthetic construct
  misc_feature 1..627: note = source = /note="Description of Artificial Sequence: Synthetic coding sequence"
  source 1..627: mol_type = other DNA
atggggagcgtctctaatcaacaattcgcgggcggatgcgccaaggctgccgaggaggccccagaggaggcccctgaggacgccgctcgtgcggcagatgagcctcagctgctgcatggggctgggatttgcaaatggtttaacgtgcggatgggattcgggtttttgagcatgacagcgcgcgccggcgtggctctggacccgcccgttgatgtgttcgtccaccagagtaagctccacatggaaggctttcgttcactgaaggaaggcgaggcggtggagtttacgtttaagaaaagtgcaaaagggctggagagtatccgggtgacgggccccggcggggtcttctgcatcgggagcgaaagacggccgaagggaaagagtatgcagaagcggcgcagcaagggcgacaggtgctacaactgcggcggcttggatcaccatgccaaagagtgcaagctacctccccagcctaagaagtgccatttttgccagagcattagccatatggtagcctcttgtcctttgaaggcacagcaggggcctagtgcgcaaggcaagccaacttatttccgagaagaggaggaggaaatccattcccccacgcttctcccggaagcccagaac

SEQ ID NO: 15554 - DNA, 627 bp, synthetic construct
  misc_feature 1..627: note = source = /note="Description of Artificial Sequence: Synthetic coding sequence"
  source 1..627: mol_type = other DNA
atgggtagtgtctcgaaccaacagttcgctggcggttgtgcaaaggcggccgaggaggcccccgaggaagcccctgaggacgcggcccgcgccgctgacgagcctcagctgcttcacggcgctggaatctgcaagtggttcaacgtgcgcatgggtttcggattcctgagtatgaccgctcgcgccggcgtggccctcgatccgcccgtcgatgtctttgtgcaccagtccaaattgcacatggaaggcttccgtagtcttaaggagggtgaggccgttgagtttacatttaagaagagtgcgaagggacttgagtctatcagggtgaccggtccggggggcgtgttctgcatcgggtctgagcgccgcccaaagggcaagtctatgcaaaagcgtaggtcgaagggagacaggtgctacaactgcggaggactcgatcaccacgcgaaggagtgcaagttgccaccccagccgaagaagtgccacttctgccagtcgatctcccacatggtcgcttcctgccctctgaaggcccagcagggaccctccgcgcaggggaagccgacatacttccgtgaggaggaggaggagattcactcacccacgctccttcctgaggcccagaat

SEQ ID NO: 15555 - DNA, 627 bp, synthetic construct
  misc_feature 1..627: note = source = /note="Description of Artificial Sequence: Synthetic coding sequence"
  source 1..627: mol_type = other DNA
atgggatctgtcagcaaccagcaatttgccggaggctgtgctaaagcggcagaagaagctcctgaggaagcacccgaagatgcagcgagagctgcagatgaacctcaactgctgcacggggctggcatttgtaaatggttcaatgtgaggatgggttttgggttcctttccatgactgccagagccggagtcgctctggacccaccggtggatgtgttcgtccatcagtcaaagctccacatggagggtttcagatcccttaaggaaggagaagcagtcgaatttaccttcaagaagagtgcaaaaggactcgaatccatcagggtgaccggtccaggcggtgtgttctgtattgggagcgaaagacgcccaaaaggcaagtcaatgcagaagcgaagatcgaagggcgatagatgttacaactgcggaggactcgaccatcatgcaaaggagtgcaagctcccaccacagcccaagaaatgtcatttttgtcagtccatctcgcacatggtcgcaagctgcccacttaaagctcaacaaggaccctccgcccagggaaaacccacctactttagagaggaagaggaggaaattcatagccctactcttctgccagaagcccagaat

SEQ ID NO: 15556 - DNA, 627 bp, synthetic construct
  misc_feature 1..627: note = source = /note="Description of Artificial Sequence: Synthetic coding sequence"
  source 1..627: mol_type = other DNA
atgggttcggtatcaaaccaacagtttgcaggcggatgcgcaaaagccgcggaagaagctcctgaggaagccccggaagatgccgcccgagccgcggatgagcctcaattgcttcacggggcagggatttgtaagtggtttaacgtgaggatgggattcggttttctgtcgatgactgctcgggcaggtgtggccctggatcctcccgtggacgttttcgtccatcaatccaagttgcacatggaaggatttagaagcctgaaggaaggcgaagccgtcgaatttactttcaagaaatccgcaaaggggctcgaatcgatccgagtcaccggacccggcggggtgttctgcataggatcggaacgccgcccaaagggaaagtcgatgcagaaacgccgatccaagggagacaggtgttacaattgtggcggacttgatcatcacgcaaaagagtgtaagctccccccacaacctaagaagtgtcatttttgtcagtcgatttcccatatggtggcatcctgccccctgaaagcacagcaagggccttcagcacaagggaaaccaacttacttccgcgaagaggaagaggaaattcactcccccaccctcctccctgaagcacagaac

SEQ ID NO: 15557 - DNA, 627 bp, synthetic construct
  misc_feature 1..627: note = source = /note="Description of Artificial Sequence: Synthetic coding sequence"
  source 1..627: mol_type = other DNA
atggggagcgtttcgaaccagcagttcgcaggggggtgtgccaaagccgccgaggaggcacccgaggaagctccagaagacgccgcaagggcagccgacgagccccagctgctccacggcgcaggtatctgcaaatggtttaatgtgcgaatgggattcggcttcctgtctatgactgcgagagctggggtggccttagaccccccagtggatgtatttgtgcatcaaagcaaactgcatatggaaggcttcaggtcgctcaaagaaggggaagccgtggagttcaccttcaagaaaagcgcaaagggcttggagtctatccgagtgacaggcccgggcggagtgttttgcattggaagtgaacggcgaccaaaaggcaaaagcatgcaaaaacgtcggagcaagggtgatcgatgttacaattgcggagggcttgaccatcatgccaaggaatgtaaactgcccccccaacccaagaaatgtcacttttgccagtcaatctcacatatggtcgcgtcttgtcctctgaaagcacagcagggcccaagcgcgcagggcaagcctacttactttagggaggaagaggaggagatacacagtccgaccctactgccggaggctcagaac

SEQ ID NO: 15558 - DNA, 627 bp, synthetic construct
  misc_feature 1..627: note = source = /note="Description of Artificial Sequence: Synthetic coding sequence"
  source 1..627: mol_type = other DNA
atgggctcagtcagtaaccaacagttcgccggtggatgtgccaaagccgctgaagaggctccagaggaggcccccgaggatgccgcccgagccgccgacgagccacaactccttcacggcgccggaatttgtaagtggtttaacgtgcgtatgggcttcggattcctctctatgacagccagggccggcgtggccttagatccccctgtggatgtgttcgtgcaccagtcaaagctgcatatggagggcttccgtagcctgaaagaaggagaggccgtagagttcactttcaaaaagtctgctaagggactggagtcgatccgagtcacaggacccgggggcgttttttgtattggaagcgagaggcggcccaaggggaagagcatgcagaagcgacggagcaaaggagaccgttgttataactgtggcgggttggaccatcacgcgaaggaatgtaagctacccccgcagccgaaaaagtgccatttttgccaatccatcagccatatggttgcttcgtgtccattaaaggcgcagcaggggccatcggcgcagggtaaacccacctatttcagagaggaagaagaggaaattcacagtccaactctgctcccagaagcccaaaac

SEQ ID NO: 15559 - DNA, 627 bp, synthetic construct
  misc_feature 1..627: note = source = /note="Description of Artificial Sequence: Synthetic coding sequence"
  source 1..627: mol_type = other DNA
atgggaagcgtcagcaaccagcaattcgccgggggatgcgccaaggcagcagaagaagcacccgaagaagcaccggaagatgcggctcgggcggctgatgagccacaattgcttcatggggcaggtatttgcaaatggtttaatgtgcggatgggtttcggattcctttcgatgaccgcacgggccggagtcgcgctcgaccctcctgtggatgtctttgtgcaccagtcaaaactgcatatggaaggatttagatccctgaaagaaggtgaggcagtggaattcactttcaagaagtcggccaaagggctcgaatcgatccgtgtcactggaccaggtggtgtcttttgcatcggatccgagcgcagaccgaaaggcaagtcaatgcaaaaacgtcggtccaagggagacagatgttacaattgtggtggtcttgatcatcatgccaaggaatgcaaacttccgcctcaacctaagaagtgccacttctgtcaatcaatttcacatatggtcgcatcctgtcccctgaaggcacaacagggcccttccgcacagggaaagccaacctacttcagagaggaagaggaagaaatccattcgcctactcttctgcctgaggcacaaaat

SEQ ID NO: 15560 - DNA, 627 bp, synthetic construct
  misc_feature 1..627: note = source = /note="Description of Artificial Sequence: Synthetic coding sequence"
  source 1..627: mol_type = other DNA
atgggctcggtatcgaaccaacagttcgctggaggatgtgctaaggctgcggaagaggctccggaagaagcccctgaggatgccgcacgggcggccgatgagccccagctcctgcacggagccggaatctgcaagtggttcaacgtcaggatgggttttggattcctgagcatgacggcacgggccggagtcgcactggatccacccgtggacgtctttgtgcaccagtccaaactgcatatggagggcttccggtcccttaaagaaggtgaggcggtcgaattcacttttaagaaatcggcaaagggactcgaaagcatccgcgtgaccggcccaggaggtgtgttctgcatcggaagcgaaagacgcccaaagggaaagtcaatgcaaaagaggcggtccaagggtgacaggtgttacaattgcggcgggctggaccaccacgccaaggaatgcaaactccccccacagccgaagaagtgtcacttctgtcagtcaattagccatatggtggctagctgccctcttaaagctcaacagggtccatcggctcaggggaagccgacctacttccgcgaagaggaagaggagattcattcccctaccctgctgccggaggcacagaac

SEQ ID NO: 15561 - DNA, 627 bp, synthetic construct
  misc_feature 1..627: note = source = /note="Description of Artificial Sequence: Synthetic coding sequence"
  source 1..627: mol_type = other DNA
atgggcagcgtgtctaaccagcaattcgcgggaggttgcgcgaaggccgcggaagaggctcctgaagaggcccctgaggacgccgctagggcagccgacgaaccacaactcctgcacggcgcaggaatttgcaagtggttcaatgtgcgtatgggatttggcttcctttctatgactgcgcgggcgggtgtcgctctcgatcctccagtggatgtgttcgtccatcaaagtaaactccacatggaaggcttcaggtcactgaaagagggtgaggcagtcgaatttaccttcaaaaagtccgccaaaggattggagtcgatcagagtaactggtccgggcggggtgttctgcatcgggtcggaacgccggccgaagggaaagtctatgcagaagcggcgctccaagggagacagatgttacaactgcgggggactggaccatcatgcaaaggaatgtaagctcccgccacagccgaagaaatgtcacttctgccagagcatctcgcacatggtggcctcatgcccgctgaaggcccagcaggggccgtccgcccaaggcaaacctacctactttagagaggaagaagaggaaatacactcccctacgctgttgcccgaagctcagaat

SEQ ID NO: 15562 - DNA, 627 bp, synthetic construct
  misc_feature 1..627: note = source = /note="Description of Artificial Sequence: Synthetic coding sequence"
  source 1..627: mol_type = other DNA
atgggaagcgtgagtaatcagcagttcgcaggaggatgcgccaaggctgccgaggaagctccagaagaggcacccgaggacgcagcgcgcgctgccgacgaacctcagctgctccatggtgcagggatttgcaagtggttcaacgttcgcatgggatttgggttcttgagcatgaccgcccgcgcgggcgtcgctctggacccgcctgttgacgtgtttgttcatcagtccaagttgcacatggaggggttcaggtcattgaaagaaggagaggcggtggagttcacattcaaaaaatccgccaaagggcttgagtctattcgcgtcacagggcctggtggagtattttgcatcgggagtgaacgaaggcctaagggaaagagcatgcagaagagacggtccaagggtgataggtgctacaattgcgggggactcgaccaccatgcaaaggagtgtaagttaccaccccagccgaaaaagtgtcacttctgtcagtctatatcacacatggtcgcgagttgccctctgaaggctcagcagggcccctctgcgcagggtaaacctacctacttccgcgaagaagaagaggagatccattctcccacgctgctgccagaagcccagaat

SEQ ID NO: 15563 - DNA, 627 bp, synthetic construct
  misc_feature 1..627: note = source = /note="Description of Artificial Sequence: Synthetic coding sequence"
  source 1..627: mol_type = other DNA
atggggtctgtctcgaatcagcaattcgctggcggctgtgccaaggctgccgaagaggcgcctgaagaagcccccgaggatgcggcccgagccgccgatgagccccagctcctgcatggagctggtatctgtaagtggttcaatgtgcgaatgggattcgggttcctgagcatgactgcaagagctggtgtggcgctggacccccccgttgacgtgttcgtgcaccagtcgaagctgcacatggagggctttcgatctctgaaggagggcgaggccgtagagtttactttcaaaaaatctgccaaaggtttggaatcaataagggtaacaggacccggcggagtgttctgtatcgggtcagagaggagaccaaagggtaagtccatgcagaagcgaagaagcaagggtgaccgctgttataactgcggagggcttgaccaccacgcgaaggaatgtaaactgcctcctcagcccaagaaatgtcacttctgtcagagcattagtcatatggtcgcaagttgtcccttgaaagcccagcaggggcctagcgcccagggtaagcccacttatttcagagaagaggaagaagaaatccacagtccaaccctgcttccagaagctcagaat

SEQ ID NO: 15564 - DNA, 627 bp, synthetic construct
  misc_feature 1..627: note = source = /note="Description of Artificial Sequence: Synthetic coding sequence"
  source 1..627: mol_type = other DNA
atggggagtgtgagcaaccagcagttcgccgggggatgtgccaaggccgcagaggaagcacccgaggaagcccctgaggacgctgctagggcagctgatgaaccccagctgctacacggagctggcatctgtaaatggtttaatgtcaggatgggattcggattcctaagtatgaccgcgagggccggcgtcgcgttggaccctcctgttgacgtgttcgtccaccagtccaaactccatatggaagggtttaggtctttgaaggagggggaggctgttgagttcacatttaagaagtcagccaaaggcctggagagcatcagggttacaggtcccggcggtgtgttttgtattggatccgagaggcgccccaagggtaagtccatgcaaaaaagacgctcaaaaggcgatcgatgctataactgcggcggactggaccatcacgccaaggaatgtaaactgcccccacaacctaagaaatgtcatttttgtcagtctatctcccacatggtggcttcatgtccacttaaagcccaacagggtccatccgcccaagggaaacctacatactttcgcgaggaagaggaggagatacacagtccaactttgctaccggaggctcagaac

SEQ ID NO: 15565 - DNA, 627 bp, synthetic construct
  misc_feature 1..627: note = source = /note="Description of Artificial Sequence: Synthetic coding sequence"
  source 1..627: mol_type = other DNA
atgggctccgtctcgaaccaacaatttgccggcggatgtgcaaaggcagccgaagaagcgccagaagaggcccctgaggatgcggcaagagcagccgatgagcctcaactcctccacggtgcagggatctgcaaatggtttaatgtccgaatgggctttggatttctctcgatgaccgctagggcaggagtggcgctcgatcctccagtcgacgtttttgtgcatcaatccaagctccatatggaaggatttcgctcgcttaaagaaggtgaagcagtggagttcacctttaagaagagcgcaaaaggactggagtcgattcgggttaccgggccaggaggagtcttttgtatcggatccgaacgccgccctaagggcaagtcaatgcagaagcggcggagcaaaggtgatagatgttacaactgtggaggcctggaccaccacgcaaaggaatgcaagctgcctccacaacccaaaaagtgtcacttctgccagtcgatatcgcatatggtggcctcgtgtcctctcaaggcccaacaaggtccctcagcccagggaaagcctacctactttcgtgaagaggaagaagagattcactcacccactctgctcccagaggcccagaac

SEQ ID NO: 15566 - DNA, 627 bp, synthetic construct
  misc_feature 1..627: note = source = /note="Description of Artificial Sequence: Synthetic coding sequence"
  source 1..627: mol_type = other DNA
atgggctctgtttccaatcagcaatttgctggaggctgcgcaaaagccgctgaggaggcgcctgaagaggcacctgaagatgctgcccgcgccgcagatgagccccaactcctgcacggcgctggaatctgtaagtggtttaacgtaagaatgggattcggtttcctttccatgacagcccgcgccggtgtggctctggacccacctgtcgacgtgttcgtccaccaaagtaagctccatatggaaggttttcgcagtctgaaggagggtgaagccgtcgagtttacttttaagaagagcgccaagggactggaaagtataagagtcactggacctggtggtgtattctgtatcggatccgaacgccgccctaagggaaagtccatgcaaaagcgcaggtccaagggtgaccgctgttataactgtggtggtctcgaccaccatgccaaggagtgcaaactgcctccacagcccaagaagtgccacttttgccaatccatcagccacatggtcgcgtcttgtcctttgaaagcccagcaaggaccatctgcgcagggtaaaccgacctacttcagggaggaggaggaggaaatacactctcctaccctcctccctgaggctcagaac

SEQ ID NO: 15567 - DNA, 627 bp, synthetic construct
  misc_feature 1..627: note = source = /note="Description of Artificial Sequence: Synthetic coding sequence"
  source 1..627: mol_type = other DNA
atgggttctgtctccaaccagcaattcgcgggtggttgcgccaaggcagcggaggaagctccagaggaagcccctgaggacgcagcgcgcgcggctgacgagccgcagctgttgcatggcgccggtatttgcaaatggtttaacgtccgaatgggcttcgggtttctgtcgatgactgcacgcgcgggcgtcgcactggatccgcctgttgacgtattcgtgcaccagagcaaactgcatatggaaggcttccgcagccttaaggagggcgaggccgtggagttcacttttaaaaaatccgctaagggtctggagtcaattcgcgttaccggtcctggtggagtgttctgtatcggatccgagcgccgtccgaaaggcaagagcatgcaaaagagacgtagcaagggggaccgctgttacaattgcggaggattggaccaccatgcgaaggagtgcaaactgcccccgcaaccaaaaaagtgccatttctgccagtccatcagccatatggtggccagctgcccgctgaaggcgcagcagggtccatcagcccagggaaagccgacctatttccgagaggaagaggaagagatccatagcccgactctgttgccggaagcccaaaac

SEQ ID NO: 15568 - DNA, 627 bp, synthetic construct
  misc_feature 1..627: note = source = /note="Description of Artificial Sequence: Synthetic coding sequence"
  source 1..627: mol_type = other DNA
atgggatcagtttcaaatcaacaatttgctggaggttgtgctaaggctgctgaagaagcaccagaagaagcacctgaagatgcagcaagagctgcagatgaaccacaattattgcatggagcaggtatttgtaaatggtttaatgttaggatgggttttggatttttatcaatgactgctagagcaggagtggctttagatccaccagttgatgttttcgttcatcaatcaaaattacatatggaaggattcagaagtctaaaagaaggtgaagcagttgaatttacttttaaaaagagcgctaaaggattagaatcaattcgtgttacaggtcctggaggtgttttttgtataggaagtgagagaagaccaaaaggtaaatcaatgcaaaaaagaaggagtaaaggagatagatgttataactgtggaggacttgatcatcatgcaaaagaatgtaaattaccaccacaaccaaaaaaatgtcatttttgtcaatcaatttctcacatggtggcaagttgccctttaaaagctcaacaaggtccatctgctcaaggaaaaccaacttattttagagaagaagaagaagagatccattctccaacgttgcttccagaagcacaaaat

SEQ ID NO: 15569 - DNA, 627 bp, synthetic construct
  misc_feature 1..627: note = source = /note="Description of Artificial Sequence: Synthetic coding sequence"
  source 1..627: mol_type = other DNA
atgggctcggtttcaaaccaacagtttgccggagggtgcgcgaaagccgccgaagaagctccagaagaagcccctgaggacgctgcgagagcggctgacgagcctcagctgctgcacggtgccggaatatgtaagtggttcaacgtgagaatgggtttcggatttctctctatgacagcacgggcaggggttgctctggaccctccagtggacgtgtttgtgcaccagagtaagctgcacatggagggattcaggagcctgaaagaaggcgaggcagtcgaatttactttcaaaaagtccgctaaaggactcgagagcatccgggttacgggccctgggggcgtgttctgtatcgggtccgagagaaggcctaaagggaagagtatgcaaaagaggcgtagcaagggggatcgctgttacaattgtggtggccttgatcatcatgctaaggaatgcaaactccctcctcagcctaaaaagtgtcatttctgccagtctatttcccacatggtggcttcgtgccccttaaaggcccagcagggtccatctgcacagggcaagcctacctatttccgtgaggaggaggaggagattcattctccaaccttgctgccagaagcccagaat

SEQ ID NO: 15570 - DNA, 627 bp, synthetic construct
  misc_feature 1..627: note = source = /note="Description of Artificial Sequence: Synthetic coding sequence"
  source 1..627: mol_type = other DNA
atgggatcagtctccaatcaacaattcgccggtggctgcgcgaaggcagcagaggaggctccggaagaagctccagaagatgcagcaagagccgcagacgaaccgcagctcctccacggcgccggaatctgcaagtggtttaacgtccggatggggttcggcttcctctcaatgactgcccgcgcgggggtggccctcgacccccctgtggacgtgttcgtgcaccagtcgaagctgcatatggagggctttcgtagcctgaaggagggagaggccgtggagttcacctttaagaaatcagccaaggggctggagtctatccgggttacgggccctggtggagtgttctgcatcggatcagagcgccgccctaagggaaaaagtatgcagaagagacgatctaaaggcgatcgatgctacaactgtggaggcctggaccatcatgccaaagaatgcaaacttccgccgcaaccaaagaagtgccacttttgtcagagcatatcccacatggtcgcatcgtgtccactgaaagcgcagcaggggccttcggcgcagggtaagccgacctactttagggaagaagaagaagagattcacagccccactctgttgcccgaagcgcaaaat

SEQ ID NO: 15571 - DNA, 627 bp, synthetic construct
  misc_feature 1..627: note = source = /note="Description of Artificial Sequence: Synthetic coding sequence"
  source 1..627: mol_type = other DNA
atgggatcagtgtcgaaccaacaatttgcgggaggatgtgccaaggcggccgaggaggccccggaagaggccccggaggacgccgcacgcgccgcggacgagccgcagctgctgcatggagcgggaatctgtaagtggttcaatgtcagaatgggatttggattcctctcaatgacggctagagcgggtgtcgcgctcgatccacccgtggatgtgttcgttcaccaatcaaagctgcacatggaaggatttaggtcactgaaggagggggaagccgtcgaattcaccttcaagaagagcgccaagggattggaatccatccgggtgactggaccgggcggggtgttctgcatcggatcagaaaggcgcccaaaggggaagtcgatgcagaaaagacgctccaagggggacaggtgctacaactgtggaggactggaccaccatgccaaggaatgtaagctgccaccgcagccgaaaaagtgccacttttgccagtcaatttcacacatggtcgcatcctgcccactgaaggctcagcagggaccctccgctcaagggaagcctacttacttccgcgaagaggaggaggaaatccattctccaaccttgctccccgaggcccagaat

SEQ ID NO: 15572 - DNA, 627 bp, synthetic construct
  misc_feature 1..627: note = source = /note="Description of Artificial Sequence: Synthetic coding sequence"
  source 1..627: mol_type = other DNA
atgggttcggtctcaaaccaacaattcgccggaggttgcgcaaaagccgcggaggaggcgcccgaggaggccccggaagacgctgcccgtgcagcagatgagccgcaactcttgcacggcgcaggcatctgtaagtggttcaatgtgcgtatgggatttggctttctttcgatgacagcgcgggccggcgtggctctggatccgcccgtggacgttttcgtgcaccaaagcaagctccacatggaaggcttccgaagtctgaaggaaggcgaggcggttgagtttacgttcaaaaagtcggctaaaggccttgagagtatcagggtgactggccccgggggtgtcttttgcatcggcagcgagcggcgcccgaagggcaagtctatgcagaagcgtcgaagtaagggcgatagatgctacaattgcggtggtctggatcaccacgccaaggaatgcaagctccctccgcaacccaagaagtgccacttttgccaatcgatttcccacatggtggctagttgcccattgaaggctcagcagggacctagtgctcagggaaaacccacctactttagggaggaggaggaagagattcactcgccgaccctgctgcccgaggcccagaat

SEQ ID NO: 15573 - DNA, 627 bp, synthetic construct
  misc_feature 1..627: note = source = /note="Description of Artificial Sequence: Synthetic coding sequence"
  source 1..627: mol_type = other DNA
atgggaagcgtttctaatcagcagtttgcaggcggctgtgctaaggccgcagaggaagcacctgaggaagctcccgaggatgcagcacgggctgccgacgaaccacagcttctacacggagcagggatctgtaaatggttcaacgtaaggatggggttcggcttccttagcatgacagcccgcgcaggcgtggctctggatccccccgttgatgtctttgttcaccaaagcaaactacacatggaaggctttcgcagccttaaagagggggaagcggtggaattcacttttaaaaagagtgcaaagggccttgaatccatccgtgttacaggacccggcggagtcttttgcatcgggagtgagcgtcgcccaaagggaaagagcatgcagaagcggcggtccaagggagaccgatgttacaattgcggaggcctcgatcatcacgctaaggaatgtaagttgccgcctcagcccaagaagtgtcacttctgccagagcatctctcatatggtcgcctcgtgccctctgaaagcccagcagggaccctcagcgcaagggaagccaacttacttccgcgaggaggaggaggaaattcacagccctactcttctcccagaggctcagaat

SEQ ID NO: 15574 - DNA, 627 bp, synthetic construct
  misc_feature 1..627: note = source = /note="Description of Artificial Sequence: Synthetic coding sequence"
  source 1..627: mol_type = other DNA
atgggctctgtctccaatcagcaatttgccggcggttgtgccaaagctgctgaggaagcccctgaggaagccccagaggatgccgcgcgggccgcagacgagccacaactgctccatggggcaggcatatgtaaatggtttaatgtgaggatgggcttcgggtttctttctatgacagctagggcaggcgttgcactcgatcctcccgtggacgtctttgtacaccaaagcaagttgcacatggaaggcttccgcagtctgaaggagggcgaggccgtcgaattcacattcaaaaaaagtgccaagggactcgagtcaatccgggtaaccggcccagggggagtcttctgtattggaagtgaacgccggcccaagggcaaatcaatgcaaaagcggcggagcaagggagatcgatgctataactgtggcggcctggatcatcacgcaaaagaatgcaaactgcccccccagcccaagaaatgccacttctgccaaagcatcagccatatggtcgcttcttgccccctcaaagcccagcaggggccttccgcgcaggggaagcccacatacttccgcgaggaggaggaagagattcacagccccacactcctccccgaggctcagaac

SEQ ID NO: 15575 - DNA, 627 bp, synthetic construct
  misc_feature 1..627: note = source = /note="Description of Artificial Sequence: Synthetic coding sequence"
  source 1..627: mol_type = other DNA
atgggatctgtctccaaccaacaatttgccggaggctgcgccaaagctgcagaagaggccccagaagaagctcccgaggacgccgccagggctgcggacgagccacaactcctgcacggtgctgggatctgcaagtggttcaatgtgcggatgggattcgggttcctgtccatgactgcccgagcgggtgtagcgcttgaccctcctgtcgatgtgttcgtgcatcagtcaaagctccacatggaaggatttaggtcactcaaggagggagaggcagtggaattcaccttcaagaagtcggccaagggacttgagagcatccgcgtgactggcccagggggcgtgttctgcatcggatcggagcgccggccaaaaggaaagagcatgcagaaacgcagatcaaagggagacagatgttacaattgcggaggcttggatcatcatgcgaaagaatgtaagctgccccctcagccaaagaagtgccacttttgtcagagcatctcccacatggtcgccagctgtccgctcaaagctcagcagggacctagtgcacaggggaagccaacctactttcgcgaggaagaggaagagatccactcaccgacgctgcttcctgaggcccaaaat

SEQ ID NO: 15576 - DNA, 627 bp, synthetic construct
  misc_feature 1..627: note = source = /note="Description of Artificial Sequence: Synthetic coding sequence"
  source 1..627: mol_type = other DNA
atgggctctgtctccaatcagcagttcgccggagggtgcgccaaggcggccgaggaggcaccggaggaagcgcctgaagatgctgcccgggcggcagacgagccacagctgctgcatggtgctggaatctgcaagtggttcaatgtcagaatgggattcggttttctgtcgatgactgctcgggccggagtggctctggacccgcccgtggacgtgttcgtgcatcagtccaaactccacatggagggcttcagatccctcaaggaaggagaggcagtggagttcactttcaagaaatccgccaagggacttgaatccatccgggtgaccggcccgggaggggtgttctgtatcggatcagaacgtcggcctaaggggaagtcgatgcagaaaagaagatctaagggggacagatgctacaattgcggcggattggaccaccacgcgaaggaatgtaaactgccgccccagcctaagaagtgccatttttgccaatcaatcagccatatggtggcatcgtgccccctgaaagcccagcaaggaccttcagcacagggaaagccgacttacttcagggaagaagaagaggaaattcatagcccgactcttctgccggaagcgcagaac

SEQ ID NO: 15577 - DNA, 627 bp, synthetic construct
  misc_feature 1..627: note = source = /note="Description of Artificial Sequence: Synthetic coding sequence"
  source 1..627: mol_type = other DNA
atgggaagtgtgagcaaccaacaatttgcgggtggttgtgcaaaagcagccgaagaagcacctgaagaggcacctgaggatgcagcgagggcggccgacgagccacagctgctccacggagcaggtatctgtaagtggttcaacgtgagaatgggatttggttttctcagcatgaccgcgcgtgccggcgtggcgttggatcccccggtggacgtgttcgtgcatcagagtaagctgcatatggaagggttccgtagccttaaggaaggggaggccgtggaattcactttcaagaaaagcgctaagggactggaatccattcgagttactggcccaggtggcgtattttgcattggatctgagagaaggcccaagggtaaatcgatgcaaaagaggcgttccaagggcgacagatgttacaattgtggagggcttgatcatcacgccaaggaatgcaagctgccaccccaacctaaaaagtgtcatttttgccagtccatctcacacatggtcgcttcatgtcctctgaaggcacaacaaggaccctcggcccagggtaaaccgacctactttcgcgaagaggaagaggagatacattcacctacccttctccccgaagcacaaaac

SEQ ID NO: 15578 - DNA, 627 bp, synthetic construct
  misc_feature 1..627: note = source = /note="Description of Artificial Sequence: Synthetic coding sequence"
  source 1..627: mol_type = other DNA
atgggcagtgtctcgaaccagcagttcgcgggcggttgcgcgaaagccgcagaggaagccccggaggaggccccggaggatgcagcacgcgccgcggacgagccacaacttctccatggtgcaggaatctgcaaatggttcaacgtgagaatgggatttgggttcttgtcaatgaccgcgagggcgggcgtcgctctggacccgccggtggatgtgttcgtgcaccagtcaaagctgcacatggaagggttccggagtctcaaggagggagaagccgtggaattcaccttcaagaaatcggcgaagggcctggaaagcatccgggtgactggaccaggcggagtgttttgtatcggctcagaacgtcggccaaaaggaaaatcaatgcaaaaaagacgaagcaagggagatcgctgctacaattgcggtggactggatcaccatgcgaaggagtgcaagctgcctccgcagcctaagaagtgtcatttttgtcaatccatttcccatatggtcgcttcctgcccgctgaaggcacaacagggaccaagcgcccaaggtaagccgacctacttccgggaagaagaagaggaaatccactccccgacgctccttccagaggctcagaat

SEQ ID NO: 15579 - DNA, 627 bp, synthetic construct
  misc_feature 1..627: note = source = /note="Description of Artificial Sequence: Synthetic coding sequence"
  source 1..627: mol_type = other DNA
atgggttcggtgtccaatcaacagtttgcaggaggctgtgcaaaagctgccgaggaggcacccgaggaagcacccgaggatgcagcccgcgcagcagatgaacctcaacttcttcatggagccggaatttgcaagtggtttaacgtgagaatgggttttggatttttgtccatgaccgcgagagcaggagtcgccctcgatcctcctgtggatgtgttcgttcatcaaagcaaacttcatatggaaggttttcgttcgttgaaggaaggggaagcggtggaatttactttcaagaaatccgcgaagggactggaaagcattagggtcactggaccgggaggcgtcttttgtatcgggtcggaaagacgtccgaagggaaagtcgatgcagaagagacgttcgaaaggagataggtgttacaactgtggtggtcttgaccatcacgcaaaggagtgtaaactgccacctcagcctaagaaatgccacttctgtcagagcatttcacacatggtcgcatcgtgccctcttaaagctcaacaaggtccttccgcgcaaggtaagccaacttactttagagaagaggaagaagagatacattcccctacgctgcttcccgaggcacagaac

SEQ ID NO: 15580 - DNA, 627 bp, synthetic construct
  misc_feature 1..627: note = source = /note="Description of Artificial Sequence: Synthetic coding sequence"
  source 1..627: mol_type = other DNA
atggggtcggtgtccaatcaacaatttgcaggaggatgcgcaaaggccgcagaagaagcacctgaagaagcaccggaagatgcagccagagcagcagatgagccccagctcctccacggagcaggaatatgcaagtggttcaatgtccgaatgggttttggtttcctctcaatgaccgcacgggccggtgtggcgcttgacccgccagtggatgtctttgtgcatcagtcgaaactgcatatggaaggttttagatcacttaaggaaggagaagctgtggaatttaccttcaaaaagtcggcgaagggtctggagtccattcgcgtgacgggtcccggtggtgtgttctgtatcggttccgaacggcggccaaaaggaaagtccatgcaaaaaaggagatccaaaggcgaccgctgttacaactgcggcggacttgatcatcatgccaaggaatgtaagctgcctccgcaacccaaaaagtgccatttttgtcaatcgattagccacatggtcgcaagctgtccactcaaggcgcaacagggcccaagcgcacaaggtaaacccacttactttagggaggaggaagaagaaattcactcacctacgctgttgcctgaggcccagaac

SEQ ID NO: 15581 - DNA, 627 bp, synthetic construct
  misc_feature 1..627: note = source = /note="Description of Artificial Sequence: Synthetic coding sequence"
  source 1..627: mol_type = other DNA
atggggtccgtgtcgaatcaacagttcgccggtggatgtgcaaaagcggctgaggaagcacccgaagaagcgcctgaagatgcggcccgcgcagcggacgaaccgcagcttttgcacggcgccgggatctgtaaatggtttaatgtccgcatgggtttcggcttcctgagcatgaccgcaagagcaggggtggcgctcgatccgcctgttgatgtgttcgtgcaccagagcaaattgcacatggaaggattccggtcgctgaaggaaggagaggctgtggaattcactttcaagaagtccgcaaagggcctggagtcgatccgggtgaccggaccagggggagtgttctgcatcggctccgaaagacgcccaaaaggcaaatcaatgcaaaaacggagaagcaagggtgataggtgttataactgtggaggactggaccatcatgcgaaagaatgcaagctgccaccgcaaccaaagaagtgccatttttgccaatccatcagccatatggtggcgtcatgcccactcaaagcccagcagggaccgagcgctcagggcaagccgacctacttccgggaggaagaagaggagatccattcaccgacgctgctcccagaagcgcagaac

SEQ ID NO: 15582 - DNA, 627 bp, synthetic construct
  misc_feature 1..627: note = source = /note="Description of Artificial Sequence: Synthetic coding sequence"
  source 1..627: mol_type = other DNA
atggggtcggtgagcaatcaacagttcgccggaggatgcgcaaaagcagccgaagaagcaccagaggaagcacctgaagatgctgctcgggccgcagatgagcctcaactgttgcatggcgctggaatttgcaagtggttcaacgtgcggatgggcttcgggttccttagcatgactgcaagggcaggggtggccctggatcctccagtcgatgtgtttgtgcaccagtcgaaactccacatggaaggttttaggtcgcttaaggaaggcgaagcagtcgaattcacctttaagaagagcgcaaaggggctcgagtccattcgcgtgaccggtccaggcggagtgttttgtattggctcggaaaggcgccctaagggaaagtcaatgcagaagcgcagatccaagggagacagatgctataactgtggaggactcgaccatcatgcgaaagagtgcaagttgccgccgcaaccaaaaaagtgtcatttttgtcaatccattagccatatggtggcgtcgtgtccactgaaggcacagcagggcccctcggcgcaaggaaaaccgacctactttcgcgaagaagaagaggaaatccattcccccaccctgcttcccgaggctcagaat

SEQ ID NO: 15583 - DNA, 627 bp, synthetic construct
  misc_feature 1..627: note = source = /note="Description of Artificial Sequence: Synthetic coding sequence"
  source 1..627: mol_type = other DNA
atgggttcggtcagtaatcagcaattcgcaggagggtgtgcgaaagcagcagaagaagccccagaggaggcacccgaggacgccgcgcgcgccgctgacgaaccacagctgcttcatggagccggaatctgtaagtggttcaacgtgcggatgggatttggtttcttgtccatgactgctcgcgcaggtgtcgcactggatcctcctgtcgacgttttcgtgcatcaaagcaagctccacatggaggggttccggagcctgaaagagggagaggccgtggaatttacttttaagaaatcagcaaaaggcctcgaatcaatcagagtgactggaccgggtggagtgttttgcatcggatcggaacggcgccctaagggtaagtccatgcaaaagaggcgatcaaaaggtgatcggtgctacaactgcggaggcctggatcatcatgcgaaggaatgtaagttgccacctcaaccgaagaagtgtcatttttgtcagagcatttcccatatggtggcctcctgcccactcaaagcacaacaagggccttcggcacaaggtaagcccacctactttagggaagaggaagaggaaattcatagcccaactcttcttcccgaagcacaaaat

SEQ ID NO: 15584 - DNA, 627 bp, synthetic construct
  misc_feature 1..627: note = source = /note="Description of Artificial Sequence: Synthetic coding sequence"
  source 1..627: mol_type = other DNA
atgggctcggtgagcaatcagcagtttgcgggagggtgtgcaaaggccgcggaagaggctccagaagaagctccggaggacgccgcgagggccgccgacgaaccgcagctgctgcacggcgctggaatttgcaaatggttcaacgtgaggatgggattcggttttctctcgatgaccgcccgggctggcgtcgcactcgatccgccagtcgacgtgtttgtgcaccagtcgaagttgcacatggaaggatttcgctccctgaaagagggcgaagccgttgagttcacgtttaagaagtcagccaagggactggaatcgattagagtgactggacccggaggggtgttttgcatcgggtcggagcggcgaccaaagggcaagtcgatgcaaaaacgcagatcgaagggagataggtgctacaactgtggaggactcgaccaccatgcgaaggagtgcaagctgccgccgcaacctaagaagtgccacttctgtcagtccatctcacatatggtggcatcatgcccgttgaaggcccaacaaggaccgagcgcccaaggaaagcctacctacttccgcgaagaagaggaagagatccacagcccaaccctccttccagaggctcagaat

SEQ ID NO: 15585 - DNA, 627 bp, synthetic construct
  misc_feature 1..627: note = source = /note="Description of Artificial Sequence: Synthetic coding sequence"
  source 1..627: mol_type = other DNA
atgggttccgtcagcaaccaacagttcgctggggggtgcgcaaaagcagccgaagaggctcccgaagaagcgccagaagacgctgccagagccgctgacgagccacagctgctgcatggcgccggaatctgcaagtggtttaatgtcaggatgggattcggctttctatctatgaccgccagagccggggtcgccctggatcctcctgtcgacgtcttcgtccatcaatctaaactgcatatggaggggttccgatctctgaaagaaggggaagctgtggagttcactttcaaaaagtctgccaaaggactggagtctattagggtgacaggaccagggggtgtgttctgcatcggttctgaaaggcggcctaagggaaagtctatgcagaaaaggagatctaagggggataggtgctataattgtggtggattggaccaccatgcaaaggagtgtaaattgccaccccagcccaagaagtgccacttctgtcagtccatctcccatatggtcgcatcatgcccactgaaggcgcaacagggccccagcgcccagggtaaaccgacgtacttccgggaagaggaagaagaaattcactcacccacactgctcccagaggcacagaac

SEQ ID NO: 15586 - DNA, 627 bp, synthetic construct
  misc_feature 1..627: note = source = /note="Description of Artificial Sequence: Synthetic coding sequence"
  source 1..627: mol_type = other DNA
atgggcagcgtaagcaatcaacaattcgcaggcgggtgcgcaaaggccgccgaggaggctcctgaggaggccccagaggacgctgcacgggctgccgacgagccccagctgttacatggcgcaggaatctgcaaatggttcaacgtaaggatggggtttggcttcctctcaatgacagccagagccggagtggccctggaccccccagtggatgtcttcgtccaccaaagtaagctgcacatggagggatttcggagcctcaaggagggggaagccgtcgagtttacattcaaaaaatctgccaaggggctggagtccattagagtgaccggccccgggggggtgttttgcatcggctcagagaggcggcctaagggaaagagcatgcagaagaggcgtagcaagggagacaggtgttacaattgtggaggactggaccaccacgctaaggagtgcaaattacctcctcagccaaagaaatgtcatttctgtcaaagtatcagtcatatggttgccagttgcccactcaaagcccagcagggcccatccgctcaaggcaaacccacttatttccgggaggaagaggaagagatacattccccaaccctgctccccgaagcccaaaat

SEQ ID NO: 15587 - DNA, 627 bp, synthetic construct
  misc_feature 1..627: note = source = /note="Description of Artificial Sequence: Synthetic coding sequence"
  source 1..627: mol_type = other DNA
atggggtcagtgtccaaccagcagtttgctggcggttgcgctaaagccgccgaggaagccccggaagaagctccggaggacgcagcccgcgcagccgatgagccccagttgctgcatggtgctggcatctgcaagtggtttaatgtgcggatgggattcggatttttgtcaatgacggctagggcaggcgtcgcgctcgatccacccgttgatgtcttcgtgcatcagtctaaactgcacatggagggatttcggtctttgaaagagggtgaggcagtggaatttacctttaaaaaaagtgctaagggcctcgaaagtatacgcgtgactgggcccggtggagttttctgtatcggcagcgaaaggcgtccaaaaggcaaatccatgcaaaagcggaggtccaagggcgataggtgctacaattgcggcggtctagatcaccacgccaaggagtgcaagctgccgccccagccaaagaaatgtcacttttgccagagcatctctcacatggtggcatcttgcccattgaaagcccagcagggaccttcggctcagggcaagccaacctatttccgtgaggaagaggaagaaatccatagccctacccttctgccagaggcgcaaaat

SEQ ID NO: 15588 - DNA, 627 bp, synthetic construct
  misc_feature 1..627: note = source = /note="Description of Artificial Sequence: Synthetic coding sequence"
  source 1..627: mol_type = other DNA
atgggaagcgtgagcaatcagcagtttgcaggagggtgcgcaaaggctgccgaagaggctcctgaggaagcacctgaagacgccgcccgggctgctgacgagcctcagctcctacatggtgccggaatctgcaagtggtttaacgtgcgcatgggatttggcttcctgagcatgacggcacgggccggtgtggcactcgatcctccggtcgatgtcttcgtacatcagtcaaaacttcatatggagggcttcaggtctttgaaagagggcgaggcggtggaattcacgtttaagaagtccgccaaaggactggaatccataagagtcactggcccggggggtgtgttctgtattggcagtgagagacgccccaaaggaaagtcaatgcagaaacgtagaagtaagggagaccgttgttataactgcggtggcctcgatcaccatgcaaaagagtgcaaactgccgcctcagcccaaaaaatgccacttttgccagtccatttctcatatggtagccagctgtccgttgaaagctcagcagggacccagcgctcagggcaagcctacgtatttccgcgaagaggaggaagagatccactctcccacccttctccctgaagcccagaat

SEQ ID NO: 15589 - DNA, 627 bp, synthetic construct
  misc_feature 1..627: note = source = /note="Description of Artificial Sequence: Synthetic coding sequence"
  source 1..627: mol_type = other DNA
atgggttcagtgagcaatcagcagttcgccggaggatgcgctaaagcggcggaagaagcccccgaggaagcgcccgaggatgcggcccgggcagcagatgaaccgcagctgttgcacggagcggggatctgcaaatggttcaacgtccggatgggatttggattcctctcgatgacggcacgcgctggagtggccctggatcctccagtggacgtgttcgtgcatcaatcgaaacttcacatggaagggttcagatcgctgaaggagggagaagccgtcgagttcacgttcaagaagagcgccaaaggactggaatcaatccgggtgactggaccgggaggagtgttctgtatcggatccgaacgcaggccaaaagggaaatccatgcaaaagcggcgatccaagggggaccgctgctacaattgtggcgggctggaccaccacgcaaaggaatgtaagctccccccacagccgaagaagtgccacttttgccagtccatttcgcatatggtcgcctcgtgcccactgaaggcccagcagggcccaagcgcccaagggaagcctacttacttccgggaggaggaggaagagatccatagcccaactctgttgcctgaagctcagaac

SEQ ID NO: 15590 - DNA, 627 bp, synthetic construct
  misc_feature 1..627: note = source = /note="Description of Artificial Sequence: Synthetic coding sequence"
  source 1..627: mol_type = other DNA
atggggtctgtgtcgaaccagcagttcgcaggcgggtgcgccaaggccgccgaggaagcgcccgaagaagctcctgaggatgccgcccgcgcagccgatgaacctcaattgcttcacggggccggtatatgtaagtggttcaatgtgagaatgggcttcggattcctttccatgaccgccagagccggggtcgctttggacccacccgtcgatgtcttcgtccaccagagcaaactgcatatggagggatttcgcagtctgaaggaaggcgaagcagtagaattcacttttaaaaagtcagctaaagggttggaatctattagagtgaccgggcctggcggcgtgttttgcataggttcggagcgacggcctaagggcaaaagtatgcaaaagcgtcggagcaagggcgacaggtgctacaactgtggtgggctagaccatcacgctaaggaatgtaagttaccaccacagcctaagaagtgtcacttttgccaaagcatttctcatatggtggcatcatgccccctgaaggctcagcaagggccatccgcccaagggaagccgacttattttcgtgaggaggaagaggagatacatagcccaacgctacttcctgaggcacagaat

SEQ ID NO: 15591 - DNA, 627 bp, synthetic construct
  misc_feature 1..627: note = source = /note="Description of Artificial Sequence: Synthetic coding sequence"
  source 1..627: mol_type = other DNA
atgggatctgtaagtaaccagcagttcgctggggggtgcgccaaagctgctgaggaagccccagaagaggctcctgaagatgccgctcgggctgcagatgaacctcagcttcttcatggggcggggatttgtaagtggtttaatgtgcggatgggatttgggtttctgagtatgacagctcgagccggggtggcactagatcctcccgtcgatgtttttgtgcaccagtcaaaattacatatggaaggattccgctcccttaaagaaggagaggctgttgaatttacttttaaaaaatctgccaaaggactcgaatctattagagtgacagggcccggaggggttttttgcatcggatccgaaagacgccccaaagggaaatccatgcagaaaaggcgctcgaagggagatagatgttataattgtggagggctcgatcatcatgcaaaagaatgtaagcttcctcctcagcccaagaaatgccatttttgccagtccatatcacacatggttgcatcctgcccacttaaagcccaacagggaccctcagctcaggggaagcccacgtacttccgggaagaagaagaagaaatccattctccaacactactcccagaagcacagaac

SEQ ID NO: 15592 - DNA, 627 bp, synthetic construct
  misc_feature 1..627: note = source = /note="Description of Artificial Sequence: Synthetic coding sequence"
  source 1..627: mol_type = other DNA
atgggatccgtcagcaaccaacagttcgcgggcgggtgcgcaaaggctgccgaagaagcaccagaagaagcccccgaggacgcagccagggcagctgatgaaccccagctgctacacggtgccgggatttgtaaatggtttaatgttaggatggggttcggatttctgtctatgaccgccagagctggggtggcgctcgatccgcctgtggacgttttcgtgcaccaaagcaaactgcatatggaggggtttcgctctctgaaagagggcgaggccgtggagtttacctttaagaagtccgccaagggactcgagtcaataagggtgaccggaccgggtggagtattctgcatagggtccgaaagaagacctaaaggcaagtctatgcaaaagaggaggtcaaagggagacagatgttataactgcgggggactggatcatcatgcaaaggaatgcaaactaccacctcaacctaagaaatgccatttctgccaatctatctcccatatggttgcaagctgtccgctcaaagcccagcaggggccctcagctcaaggaaaacctacttacttccgagaagaggaagaagaaatccacagtccgactctgcttccggaagcacaaaat

SEQ ID NO: 15593 - DNA, 627 bp, synthetic construct
  misc_feature 1..627: note = source = /note="Description of Artificial Sequence: Synthetic coding sequence"
  source 1..627: mol_type = other DNA
atgggatcggtgagcaatcaacagttcgcgggcggctgcgcaaaagcagcagaagaagcacccgaagaagcaccggaggacgccgcccgggcagcagatgaacctcagctgttgcacggagcaggaatctgcaagtggttcaacgtccgcatgggatttggatttctgtccatgactgccagagcaggagtcgcactcgatccacccgtggacgttttcgtgcatcaaagcaaactccatatggaagggtttcggtccttgaaagaaggagaggcagtggaatttacctttaagaagagcgcaaaaggacttgagtcgatccgtgtcactggacctggtggagtgttctgtatcggctcggagcgcagaccgaaggggaagtctatgcaaaagaggcgatccaagggggatcgatgttacaactgcggtggtcttgaccatcatgctaaggaatgcaagctccctccacaacctaagaaatgtcatttttgtcagtccatctcacacatggtggctagctgccctttgaaagcccaacaaggaccatcagcacagggcaaacccacctactttagagaagaagaggaggaaatccattcgcccacgcttcttcctgaagcgcagaac

SEQ ID NO: 15594 - DNA, 627 bp, synthetic construct
  misc_feature 1..627: note = source = /note="Description of Artificial Sequence: Synthetic coding sequence"
  source 1..627: mol_type = other DNA
atggggtctgtgtctaatcaacaattcgcaggtggatgcgcaaaggctgcagaagaagccccagaggaagccccagaagatgccgctcgggctgctgacgagccgcaactgctccacggagcaggaatatgcaagtggtttaatgtgcgtatgggatttggatttttgtcgatgactgcacgagccggagtcgcactggatccaccagtggatgtatttgtacaccaatccaaactgcatatggaaggatttcgtagcctaaaagaaggggaggctgtggaatttactttcaagaaatcagctaagggcctggaaagtatacgggttacaggtccaggtggagtattctgtattgggtctgagcgaaggcctaaagggaagtcgatgcaaaaaaggcgaagtaaaggagatcgatgctacaattgcgggggtttggatcatcatgccaaagagtgtaagctgccgcctcaaccgaaaaagtgccatttttgtcaatctatatcccacatggttgccagctgcccactgaaagctcaacaggggcctagtgcccaaggtaaaccgacttatttcagggaggaagaggaagaaattcactccccaactctgcttccagaggctcaaaac

SEQ ID NO: 15595 - DNA, 627 bp, synthetic construct
  misc_feature 1..627: note = source = /note="Description of Artificial Sequence: Synthetic coding sequence"
  source 1..627: mol_type = other DNA
atggggtcagtgagcaatcagcagttcgcaggtggctgcgccaaagctgctgaagaagctcccgaggaggcgcccgaagacgcagctagggctgccgacgagccgcagctgcttcacggagccgggatatgtaagtggtttaatgtcaggatggggtttggttttctgtccatgactgctagggctggagtggccctcgacccgcccgtggatgtttttgtgcaccagagcaagctgcatatggaaggattccgctctctcaaggagggagaggccgtggaatttacatttaaaaaatctgccaagggcctggagagtattagggttacaggcccaggcggggttttctgcatcggctctgagcgcagaccgaagggaaagtccatgcaaaaaaggcgctctaaaggcgatcgatgctataactgcggcggcctcgaccatcatgcaaaagagtgcaaactgccaccacaaccaaagaagtgtcacttctgtcagtccatctcccacatggtggcttcctgcccacttaaagcgcagcaaggcccttcagcacagggcaaacccacctattttagggaagaggaggaggaaatccactcccccactctcttgccagaggctcagaat

SEQ ID NO: 15596 - DNA, 627 bp, synthetic construct
  misc_feature 1..627: note = source = /note="Description of Artificial Sequence: Synthetic coding sequence"
  source 1..627: mol_type = other DNA
atgggaagcgtcagcaatcagcagttcgctggtggatgcgcgaaagccgccgaagaagcgcctgaggaggcgccagaggacgcagcccgggccgcagacgagcctcagctgctccacggtgccggaatctgcaaatggtttaacgttagaatgggattcggattcctgtcgatgactgcacgtgcgggcgttgcactggaccctccagtggatgtgtttgtgcatcaatcgaaattgcacatggaagggtttcggtcgctcaaggaaggcgaagcagtggagttcactttcaagaaatccgcgaaaggactggaatcgatccgggtgactggaccggggggtgtgttttgcattggatcagagaggcgcccgaaagggaagtctatgcagaagcgccggtcaaagggagatcggtgttacaactgcggaggactcgaccaccatgcaaaggaatgcaagctgccacctcagcctaaaaagtgtcatttctgccaatcaatatcacatatggtggcctcctgtccgctgaaggcccagcagggacccagcgcgcaagggaagccgacttacttccgcgaggaggaagaggaaatccattcgccgacgcttctcccggaagcccaaaat

SEQ ID NO: 15597 - DNA, 627 bp, synthetic construct
  misc_feature 1..627: note = source = /note="Description of Artificial Sequence: Synthetic coding sequence"
  source 1..627: mol_type = other DNA
atggggagcgtgtctaaccagcagtttgccgggggctgcgctaaggcagccgaggaagcccccgaagaggcccctgaggatgccgcgcgggcggctgacgaacctcagctgctgcatggcgcaggaatatgcaaatggtttaatgtgcgaatgggtttcggcttcctgagcatgaccgcacgcgccggagtggccctcgaccccccagtggatgtatttgtccaccagagtaagttgcatatggaggggtttcggtctctgaaagaaggggaggcagtggaattcacttttaagaaaagcgctaagggcctggaaagcatacgagttacggggcctgggggagtgttttgcatcgggagcgaacgtaggcccaaggggaagagtatgcaaaagcgcaggtccaagggagaccgttgctacaactgcggcggcttggatcaccacgcgaaggagtgcaagctccctcctcagccaaaaaaatgtcatttctgccaaagtatatcccacatggtggctagctgtcccctgaaggcccaacaaggtccatcagcacaaggcaaacctacttatttcagggaggaagaggaggagatccattcccccacactgctgccggaggcacagaac

SEQ ID NO: 15598 - DNA, 627 bp, synthetic construct
  misc_feature 1..627: note = source = /note="Description of Artificial Sequence: Synthetic coding sequence"
  source 1..627: mol_type = other DNA
atgggatctgtctcaaaccaacagtttgcaggaggatgtgcgaaggcggctgaagaagcgcctgaggaggctccagaggatgcagcaagagcagcagatgaacctcaactgctccacggggcagggatttgtaagtggttcaacgtgaggatggggttcgggtttctctccatgactgctcgggccggtgttgcactcgaccctcctgtggatgtctttgtgcaccaatcgaagctgcacatggaaggatttcgctccctcaaagaaggcgaagccgtggagtttaccttcaagaaaagcgcaaagggccttgaatcaataagagtgaccggtcctggaggagtcttttgcattggttcagaacgtagaccgaaggggaaatcgatgcagaagaggcgctcgaagggcgatcggtgctataactgcggaggcctggatcatcatgcgaaggagtgcaaactgcccccacaaccgaagaagtgtcacttttgtcaatcgatttcacacatggtggcaagctgtccacttaaggcacagcaagggccatcagcacagggaaagccaacctacttcagagaagaggaagaagagattcactcgcctacgcttcttcctgaggcccagaac

SEQ ID NO: 15599 - DNA, 627 bp, synthetic construct
  misc_feature 1..627: note = source = /note="Description of Artificial Sequence: Synthetic coding sequence"
  source 1..627: mol_type = other DNA
atgggctccgtgtccaaccagcagttcgctggagggtgtgcgaaagcagctgaagaggcccccgaagaagcaccggaagatgccgcacgcgccgcagacgaaccccaacttctccacggagcgggtatctgtaagtggttcaacgttcggatgggttttggattcctttcaatgactgctagggcaggggtcgcactggatcctccggtcgacgtctttgtgcaccaatcaaaactgcacatggagggctttaggtcgcttaaggaaggagaggccgtggaatttaccttcaagaaatccgccaagggtctggagtccatccgggtgaccggaccagggggtgtcttttgtatcggtagcgaacgacgtcccaagggaaagtcgatgcaaaagcggagatccaagggagatagatgttacaattgtggcggactcgatcatcatgcaaaagaatgtaagttgcctcctcagccaaagaagtgccacttttgtcaatccatttcgcatatggtcgcgtcctgtccacttaaggcgcaacagggtccatcggcgcagggcaaaccaacttactttagagaagaggaggaagagatccatagcccgacccttttgccagaggcacaaaac

SEQ ID NO: 15600 - DNA, 627 bp, synthetic construct
  misc_feature 1..627: note = source = /note="Description of Artificial Sequence: Synthetic coding sequence"
  source 1..627: mol_type = other DNA
atggggtcagtgagtaaccaacagtttgccggcgggtgcgcgaaggccgcagaggaggctcctgaagaggcaccggaagatgcagcaagagcagcagatgagccacagctcctccatggagctggaatatgtaaatggtttaatgtgcgcatgggttttggatttctgtcgatgactgctagagcaggagtcgcgctcgatcctccagtggacgtgttcgtgcatcaatcaaaacttcatatggaaggctttaggagcttgaaagaaggcgaagccgtggagttcacttttaagaagtccgcaaaaggattggaatctatacgcgtgacgggaccagggggcgtattctgcattgggtcagagcgtcgcccaaagggtaagagcatgcagaagaggcggtccaagggtgaccgatgttacaactgtggtggactcgatcaccacgctaaagaatgtaagttgccaccgcaacctaagaaatgtcacttctgtcagtcgatttcgcatatggtggcatcgtgcccactgaaggcgcaacaaggaccaagcgcacaaggaaagcccacctactttcgtgaggaagaagaggagatccattcgcccaccctgctgccggaagcacagaat

SEQ ID NO: 15601 - DNA, 627 bp, synthetic construct
  misc_feature 1..627: note = source = /note="Description of Artificial Sequence: Synthetic coding sequence"
  source 1..627: mol_type = other DNA
atgggatctgtatcaaatcagcaatttgcggggggatgtgccaaagctgctgaagaagcgccggaggaggccccggaagacgcggcgcgggcagctgatgaaccgcaactgttgcatggtgcgggaatttgtaaatggtttaatgttcgtatgggctttggcttcctctccatgaccgcccgggcgggggtggcgcttgacccgccagtagacgtgtttgtacatcagagtaagcttcatatggagggattccgcagcttaaaagagggagaagcagtggagtttacttttaagaagtccgctaaaggacttgagagcatccgggtaacgggacctggcggggtcttttgtattggaagtgaacgtagaccaaaaggcaagtcaatgcaaaagcgccgatccaaaggagatcggtgctataattgtgggggtttagatcatcacgcgaaagaatgtaagcttccgccacaacccaaaaaatgtcacttttgtcagagtatttcgcacatggtcgctagctgtccgcttaaagcccagcaaggcccaagtgcacagggcaaaccgacgtactttagagaggaggaagaagagattcattcccctacccttctcccggaagcacagaac

SEQ ID NO: 15602 - DNA, 627 bp, synthetic construct
  misc_feature 1..627: note = source = /note="Description of Artificial Sequence: Synthetic coding sequence"
  source 1..627: mol_type = other DNA
atgggctcagtgagcaatcaacagtttgcaggcggttgcgcaaaagctgctgaagaggcacctgaagaggcgcccgaggatgcagctagggctgctgacgagccccaactgctgcatggcgccggaatctgcaaatggtttaacgtgcggatgggattcggttttctgtcgatgacagccagagctggtgtggccctggacccacccgtggacgttttcgtgcatcaaagcaagttacatatggaaggctttcggtctcttaaagagggggaggccgtcgaatttacctttaaaaagtctgctaagggtcttgagtcaatccgagtgaccggccccgggggggttttctgtatagggagcgaacggcgccctaaaggtaagagtatgcaaaagcggcggtcaaaaggcgatcgctgttacaactgcgggggcctggatcaccacgccaaagaatgtaagctgcctccccaaccgaagaaatgccacttctgtcaatctatctcgcatatggtggcatcttgccccctgaaggcccagcagggtccctccgcacaggggaagcctacatatttcagggaggaggaggaggaaatccactcccccaccctccttcctgaagcccagaac

SEQ ID NO: 15603 - DNA, 627 bp, synthetic construct
  misc_feature 1..627: note = source = /note="Description of Artificial Sequence: Synthetic coding sequence"
  source 1..627: mol_type = other DNA
atgggtagcgtgagcaaccagcagttcgcaggaggctgtgctaaggcagccgaagaggctcctgaggaagcacctgaggatgccgctagagcggctgatgagcctcagctcctccatggagctggcatctgtaagtggttcaatgtgagaatgggcttcggattcctgtctatgaccgctcgcgccggcgttgcccttgatcctccggtagatgttttcgtgcaccaatccaagctgcatatggagggatttcgatcccttaaggagggcgaggccgtcgagtttacatttaagaagagcgccaaagggctggaaagcatccgagtgacagggccgggcggtgtgttttgcatcggatctgagcggaggcctaagggtaagtccatgcagaagcgacggagtaaaggtgatagatgctataactgtggggggctggaccatcatgctaaggaatgcaagctgcctcctcagcctaagaagtgccatttttgccagagcatctcccatatggtcgccagttgtccactgaaagctcagcagggacccagtgcgcaaggtaagccaacctatttccgagaagaggaagaagagattcactctccaactctactccctgaggcccagaat

SEQ ID NO: 15604 - DNA, 627 bp, synthetic construct
  misc_feature 1..627: note = source = /note="Description of Artificial Sequence: Synthetic coding sequence"
  source 1..627: mol_type = other DNA
atgggcagtgtgtccaatcagcaattcgctggcggatgtgccaaggcagccgaagaggcaccagaagaagcccctgaagacgctgcaagagctgctgacgagccacaactgttgcacggcgccggtatatgcaagtggtttaatgtgagaatgggatttggctttctaagcatgaccgcccgcgccggggtagcccttgatccgcctgttgacgtgtttgtccatcagtctaaactgcatatggaaggtttccgaagcctgaaagaaggggaggccgtagaattcaccttcaagaagagcgccaaaggcctggagagcatcagggtgacaggtccaggcggagtgttttgcatcggtagtgagcggcgacctaaggggaaaagcatgcaaaaaaggcgaagtaaaggagaccgctgttataactgtggcggattggatcaccatgcaaaggaatgcaaactccctccacaacctaagaagtgccacttttgccagagcatttcacatatggtcgctagctgtcctcttaaagcccagcaggggccatccgcccagggcaagcctacctactttagagaggaggaagaagagatccactcccccactctcctgcccgaggcccagaac

SEQ ID NO: 15605 - DNA, 627 bp, synthetic construct; identical to SEQ ID NO: 15604
  misc_feature 1..627: note = source = /note="Description of Artificial Sequence: Synthetic coding sequence"
  source 1..627: mol_type = other DNA

SEQ ID NO: 15606 - DNA, 627 bp, synthetic construct
  misc_feature 1..627: note = source = /note="Description of Artificial Sequence: Synthetic coding sequence"
  source 1..627: mol_type = other DNA
atgggttcggtttcgaatcaacaatttgcgggtggttgtgcgaaagcggcggaagaagcgccggaagaagcgccggaagatgcggcgcgagcggcggatgaaccgcaactattacatggtgcgggtatatgtaaatggtttaatgtacgtatgggttttggttttttatcgatgacggcgcgtgcgggtgtagcgctagatccgccggttgatgtatttgttcatcaatcgaaattacatatggaaggttttcgatcgttaaaagaaggtgaagcggtagaatttacgtttaaaaaatcggcgaaaggtttagaatcgatacgagtaacgggtccgggtggtgttttttgtataggttcggaacgtcgaccgaaaggtaaatcgatgcaaaaacgacgttcgaaaggtgatcgttgttataattgtggtggtttagatcatcatgcgaaagaatgtaaattaccgccgcaaccgaaaaaatgtcatttttgtcaatcgatatcgcatatggtagcgtcgtgtccgttaaaagcgcaacaaggtccgtcggcgcaaggtaaaccgacgtattttcgtgaagaagaagaagaaatacattcgccgacgctattaccggaagcgcaaaat

SEQ ID NO: 15607 - DNA, 627 bp, synthetic construct
  misc_feature 1..627: note = source = /note="Description of Artificial Sequence: Synthetic coding sequence"
  source 1..627: mol_type = other DNA
atgggatccgtgagcaaccaacaattcgccggcgggtgcgctaaggccgctgaggaagccccggaagaagctccagaggatgcggcgcgcgcggctgacgagcctcagctgctccacggggcaggaatctgcaagtggtttaacgtccgaatggggttcggcttcctgtccatgacggccagagccggcgttgccctcgatccaccggtcgacgtgttcgtgcaccagagcaagctgcacatggaaggatttcgctcgctgaaggaaggagaagccgtcgaatttacttttaagaagtccgcgaaaggattggagagcatcagagtgaccggcccgggaggtgtgttctgcatcggaagcgaaagacggccgaagggaaagtctatgcagaagcgaagatcaaaaggagataggtgctacaattgcggtggactggatcaccatgccaaggagtgtaaacttccgccgcagccaaagaagtgccatttctgccagtcgatctcgcacatggtcgcctcatgccccctcaaggcgcaacaaggcccatcagcgcagggaaaacctacctactttcgcgaggaggaagaagagatccacagcccgaccctgctgccggaagcgcaaaat

SEQ ID NO: 15608 - DNA, 627 bp, synthetic construct
  misc_feature 1..627: note = source = /note="Description of Artificial Sequence: Synthetic coding sequence"
  source 1..627: mol_type = other DNA
atggggtctgtgagtaatcagcagtttgcggggggttgcgcaaaggctgctgaagaagcaccagaggaagctcctgaagatgccgcccgcgcagccgatgagccccaactgttgcacggagccggcatttgtaagtggttcaacgtgcgcatgggatttggcttcctgtcaatgaccgccagagcgggggtggcactcgacccacctgtcgacgtgttcgtgcaccagtcaaaactccatatggagggatttcggtccttgaaggagggagaagccgtcgagtttacattcaaaaagtccgcgaagggccttgaatcaatccgcgttacaggaccagggggcgtcttttgtatcggcagcgaacggcgaccaaagggtaagtcgatgcagaaacgaaggagtaagggtgaccgatgttacaattgcggtggcctggaccaccacgcaaaggagtgcaagttacctccccagcccaaaaagtgtcatttttgccagtctataagccatatggtggcttcttgtcctctcaaggcgcaacaggggccctccgcacagggtaaacccacttatttcagggaggaagaggaagagattcattctccaactctcctcccagaggcgcagaat

SEQ ID NO: 15609 - DNA, 1197 bp, synthetic construct
  misc_feature 1..1197: note = source = /note="Description of Artificial Sequence: Synthetic coding sequence"
  source 1..1197: mol_type = other DNA
atgaaaatgcgcttcttagggttagtggtctgcctggtgctgtggacccttcactcagagggttcccgtgggaaactgaccgccgtggacccagaaacaaacatgaatgtgtctgaaatcatttcttattggggttttcccagtgaggagtacctcgtagagacagaggacgggtacatactttgtctgaatagaattcctcacggtagaaagaatcattcagataagggcccaaagccagtggtgttcttgcagcacggcttactggctgattcaagtaactgggtcaccaacttggcaaatagttctctgggatttattctcgctgacgcggggttcgatgtctggatgggcaattcccgaggcaacacttggagcagaaagcacaagacgctgtcggtgagtcaagatgagttttgggctttcagctatgatgaaatggccaagtacgatctgccggctagcatcaactttattctgaacaagaccggacaagagcaggtttattatgtcggacactctcagggaactacaattggtttcatcgccttttcccagatccccgagttagccaaacgcataaaaatgtttttcgcactgggtccagtggcgagcgtcgcattctgcacgagccccatggccaagttgggccgcctccctgaccacctcattaaagatctgttcggggacaaggagttcctaccccagagtgcgtttcttaagtggttagggacccatgtgtgcacgcatgtaatcctcaaggaactctgcggcaatctgtgttttctgctctgcgggtttaatgagaggaacctcaacatgagccgggtggacgtctacaccacccattcacccgctggaacatccgtgcagaatatgcttcattggtcgcaggctgtcaaattccagaagttccaagctttcgattggggaagttctgcgaagaattatttccactataatcagtcatatccacccacatacaatgtgaaggacatgctcgttcccaccgcagtttggtccgggggacatgattggttagccgatgtgtatgacgtgaacatacttttgacacagataactaaccttgtgttccatgaatccattcctgagtgggagcacctagattttatatgggggctggatgcgccttggagactctacaacaagatcatcaacctgatgcggaaataccaa

SEQ ID NO: 15610 - DNA, 1197 bp, synthetic construct
  misc_feature 1..1197: note = source = /note="Description of Artificial Sequence: Synthetic coding sequence"
  source 1..1197: mol_type = other DNA
atgaaaatgcgatttcttggattagtggtttgtttagttctttggacattacatagtgaaggatctagaggaaaacttactgctgttgatccagaaacaaatatgaatgtgagcgaaattatttcttattggggatttccatctgaagagtaccttgtcgaaacagaagatggatacattttatgtcttaatagaattccacatggtagaaagaatcattcagataagggtccaaaacctgttgtttttttacaacatggtcttttggcagattcatcaaattgggtaacaaatttagcaaattcatctcttggatttatacttgcagatgctggttttgatgtctggatgggaaattcaagaggaaatacatggtcaagaaagcataaaacacttagtgtttctcaagatgagttttgggctttttcatatgatgaaatggcaaaatatgatttacctgcatcaatcaatttcattttaaataaaactggtcaagaacaagtttattacgttggacattctcaaggtacaacaattggttttattgcattctcacaaattccagagcttgcaaaaagaattaaaatgttttttgctttaggtcctgttgcttcagttgctttttgtacatctcctatggcaaaattaggtcgtttaccagaccatttaattaaagatttattcggagataaagaatttttacctcaatctgcatttttaaaatggcttggaacacatgtatgtactcatgttatacttaaggagttatgtggtaatttatgttttttactttgtggattcaatgaaagaaatcttaatatgagtcgtgttgatgtttatactactcattcaccagctgggacatcagttcaaaatatgcttcattggagtcaagcagttaaatttcaaaagtttcaagcatttgattggggaagttcagctaagaattattttcattataatcaatcatatccaccaacttataatgtaaaggatatgcttgtaccaacagcagtttggagtggaggacatgattggcttgcagatgtttacgatgttaatatacttcttactcaaataacaaatcttgttttccatgaatcaattccagaatgggaacatcttgattttatttgggggttagatgctccttggagactttataataaaattattaatttaatgagaaaatatcaa

SEQ ID NO: 15611 - DNA, 1197 bp, synthetic construct
  misc_feature 1..1197: note = source = /note="Description of Artificial Sequence: Synthetic coding sequence"
  source 1..1197: mol_type = other DNA
atgaaaatgcggtttctgggcctggtggtgtgtctggttctgtggaccctccacagcgaaggttcccgaggcaaactgactgccgtcgacccggaaaccaacatgaacgtttcggagatcatttcgtactggggattcccgtccgaagaatacctcgtggaaaccgaggacggatacattctgtgcttgaatcgtatcccgcatggtcggaagaaccacagcgacaaaggccctaagccggtggtgtttctccagcacggcctgctggccgactcctcaaattgggtcaccaatctcgctaatagcagccttggattcatactggccgatgcaggatttgacgtctggatgggcaattcacgtggaaacacctggtcacggaaacacaagaccttgtcagtctcgcaagatgagttttgggcattctcatacgacgagatggctaaatacgacctgccggccagcattaacttcatcttgaataagactggccaagaacaggtgtattacgtgggccattcccaagggaccaccatcggtttcatcgcgttctcgcagatcccggaacttgcaaagaggatcaagatgtttttcgcactgggaccagtcgcttctgtcgccttctgtacgtcgcctatggccaagttggggagactcccagaccatttgatcaaggatctcttcggtgataaggagtttctgccgcagtcagctttcctgaagtggctgggaactcatgtgtgcacccatgtcatccttaaagagctgtgcggcaacctgtgcttcctgctctgtggattcaacgaacgcaacctgaacatgagcagggtggatgtgtatactacccattcccccgctggcactagcgtgcagaatatgttgcattggtcacaggccgtgaaatttcagaagttccaggccttcgactggggatcgtccgccaagaactacttccactacaaccaaagctacccacctacttacaacgttaaagatatgctggtgcctaccgcggtgtggtcggggggacacgactggctcgctgatgtctacgatgtgaacatcctgctcactcagatcactaatttggtctttcacgaatcgatccctgagtgggaacacctggactttatctggggactcgacgcgccttggagactttacaacaaaatcatcaacctgatgcgcaagtaccaa

SEQ ID NO: 15612 - DNA, 1197 bp, synthetic construct
  misc_feature 1..1197: note = source = /note="Description of Artificial Sequence: Synthetic coding sequence"
  source 1..1197: mol_type = other DNA
atgaaaatgaggttccttggactcgttgtctgtttagtattgtggaccttgcattctgaagggtcccgaggaaagctgaccgcggtcgaccctgagaccaatatgaacgtgtcggaaatcatctcatattggggctttccatccgaagagtatttagtggagaccgaagatggctacatactctgtctgaaccgcattcctcacgggcgtaagaatcacagtgacaagggaccaaagcccgttgtctttcttcagcatggactgttggcagattcaagtaactgggtcacgaatctcgccaactcatctctgggtttcatcctggcagatgcgggctttgatgtgtggatggggaatagtcgtgggaacacttggtcccggaaacataaaacactgagtgtttcccaggacgagttttgggctttttcatacgacgaaatggcaaagtacgacctcccagcatccatcaatttcatacttaacaaaactgggcaggaacaggtctactatgtcggacactctcagggtacaacaatcgggttcatcgcattcagtcaaataccggagctggccaagcggatcaagatgttcttcgcactcggacccgttgcctccgtagcgttttgtacaagccccatggctaagctagggcggttacccgaccacctgattaaagatttgtttggggataaagagtttttaccccagtccgcatttctcaagtggctcggtacccatgtctgtacccacgttatcctgaaggagctgtgtggtaatctttgcttccttctgtgtggtttcaacgagcgtaatctgaatatgtcaagggtagacgtgtacactactcactcccccgccggaactagcgtgcagaacatgctacattggtctcaggcagtgaagttccagaaattccaggccttcgactggggatcttccgccaagaactacttccattataatcagtcgtacccacctacgtataatgttaaggatatgctcgtccccacagctgtgtggagcggcggccacgactggctagctgacgtgtacgacgtcaacattctgcttactcagatcactaacctcgtttttcacgagtcaattccagagtgggagcatttggattttatctggggccttgatgccccctggcggctgtacaataaaataatcaatctaatgcgaaaataccag

SEQ ID NO: 15613 - DNA, 1197 bp, synthetic construct
  misc_feature 1..1197: note = source = /note="Description of Artificial Sequence: Synthetic coding sequence"
  source 1..1197: mol_type = other DNA
atgaaaatgagattcctggggcttgtggtctgtctggtcctgtggactctccattccgaggggtcgcgtggtaagctcactgcagtggatccagaaactaacatgaacgtttcggaaatcatctcgtactggggcttcccatccgaggagtacctggttgaaaccgaagatggctacatcctgtgtctcaaccgaattccccacggacggaagaaccattcagataagggccctaaacctgtggtgtttctccagcatgggttgcttgcagattcctccaactgggtgactaatctggccaattcatctctggggttcattctggccgacgcaggattcgacgtgtggatggggaatagccggggtaacacctggagtcgcaagcataagactctcagcgtgtcccaggatgaattttgggcattctcctacgatgaaatggccaagtacgatcttcccgccagcattaactttattcttaacaagactgggcaagaacaagtgtactacgtcggacattcccaggggacgaccattggctttatcgcattcagccaaattcctgagctcgcaaagagaattaagatgtttttcgcgctcgggcctgtggcctcagtcgcgttttgtacttcacctatggctaagttgggacggcttcctgatcacctgattaaggacctttttggagacaaagaattcctccctcaatcagcatttctgaagtggctcggaacccatgtgtgcacccacgtgatccttaaggaactttgtgggaatctctgtttcctcctttgtggctttaacgaaagaaatctgaatatgtcaagggtcgatgtgtacactacccattcgcccgcaggtacctccgtccagaatatgttgcattggagccaggcagtcaagtttcaaaagtttcaggctttcgattggggttcctccgcaaagaattactttcattacaatcagtcctaccctcctacctataatgtgaaggacatgctggtgccgactgcagtgtggagcggaggtcacgactggttggccgatgtctacgatgtgaatatcctgttgacccaaattaccaatctcgtgtttcacgaatccattccagaatgggagcatctcgatttcatatgggggcttgatgcaccatggaggctttacaacaagatcattaatctcatgcgcaaatatcaa

SEQ ID NO: 15614 - DNA, 1197 bp, synthetic construct
  misc_feature 1..1197: note = source = /note="Description of Artificial Sequence: Synthetic coding sequence"
  source 1..1197: mol_type = other DNA
atgaagatgcgtttccttgggctcgtggtgtgccttgttctgtggacccttcattctgagggctctaggggaaagttaacagctgtcgaccccgaaaccaacatgaatgtgtcagagataatcagttattggggctttccttctgaggagtatctcgtcgagaccgaggacggttacatcctttgtctaaataggatcccccacgggcgtaagaaccactccgacaagggacccaagccagtggtctttctgcagcacggactgctggctgactcttcaaactgggtgactaacctggctaattcatctctcgggtttattctggctgacgcagggtttgatgtctggatgggaaactctagaggcaacacatggtcccgcaagcacaaaactctctctgtgagccaagatgagttctgggccttcagctatgacgagatggccaaatatgatttgccagcctcaattaactttatattaaataagacaggccaggagcaggtctactatgtgggccacagccaggggacaaccattgggtttattgccttctctcagatccccgaattagctaaacgtatcaagatgtttttcgccctcggccctgtagcatcagtggcattttgtacatcacccatggccaagctgggaagactgcctgatcacctgattaaagacttgttcggcgataaagagttccttccacagagtgcctttctgaagtggctcggcacacatgtgtgcactcacgtaatcctaaaagaactctgcggcaacctgtgcttcctcctatgtggtttcaacgagagaaatcttaacatgagtagggttgatgtttacacgactcactctcccgccggaacctcggttcagaacatgctgcattggtcccaggccgtcaagttccagaaattccaggctttcgattggggaagcagcgctaaaaattatttccattacaaccagtcctaccccccaacttacaacgttaaagatatgctggtacctacagccgtgtggtccggagggcatgattggcttgcggacgtctatgacgttaatatcttactaacccaaattaccaatctggtattccacgagagcatccccgagtgggaacacctggactttatatggggcctagatgcgccctggcgtctgtataataagatcatcaatctcatgaggaaatatcag

SEQ ID NO: 15615 - DNA, 1197 bp, synthetic construct
  misc_feature 1..1197: note = source = /note="Description of Artificial Sequence: Synthetic coding sequence"
  source 1..1197: mol_type = other DNA
atgaaaatgaggtttctgggtctggtggtttgtctggttctgtggacgttacattcagaaggttctaggggaaaacttactgctgttgatccagagacaaacatgaacgtgtcggaaattatcagctattggggcttcccgtccgaggagtatctcgttgagacagaggatgggtatatactatgtctgaatcgcatcccccacggccgaaaaaaccattctgacaagggtcctaaacccgtcgtctttctccaacatggcctgctcgcagactctagtaactgggtgaccaatctggcaaactccagcttaggttttatcctcgccgatgctggcttcgatgtttggatggggaatagtcgggggaacacatggagtaggaaacataaaactttgagtgtgagtcaggacgaattctgggccttctcttacgacgaaatggccaagtacgatctgccggcctctattaattttatcctgaataagactgggcaagagcaggtgtattatgtcggccactcccaggggaccaccatcggcttcatcgctttcagtcagatccctgagctagccaagcgaatcaaaatgttcttcgccttgggtccagtagcgagcgtggccttctgcacatctcctatggcaaagctgggacgactgccagaccacctgattaaggacctgtttggtgacaaagaatttcttcctcagtctgcttttctcaaatggctgggcacacacgtctgtacccatgtcattctaaaagaactgtgcggtaacttgtgtttcctgctgtgtggatttaatgagagaaacttgaatatgagccgggttgacgtctacacaactcacagtcccgccggaactagcgtgcagaatatgctccactggtcacaggccgtgaagttccaaaagtttcaggcctttgactggggatcgagtgcaaagaattactttcattacaatcagagttatccaccaacttacaacgttaaagatatgttggtcccgaccgcagtctggtctggaggccacgattggctggctgacgtctacgatgtcaacatacttctgacacagattaccaacctggtgttccatgagtccatccctgaatgggaacaccttgactttatctggggcttagatgccccctggcggctgtataataagataataaacctcatgcgcaaatatcag

SEQ ID NO: 15616 - DNA, 1197 bp, synthetic construct
  misc_feature 1..1197: note = source = /note="Description of Artificial Sequence: Synthetic coding sequence"
  source 1..1197: mol_type = other DNA
atgaagatgcgatttctggggcttgtggtgtgccttgtgctgtggactcttcactcagaaggcagcaggggtaaactgaccgctgtcgaccccgaaactaacatgaatgtgtcagagattatcagctactggggctttccttcagaggagtacctcgtcgaaaccgaggacggttacattctttgtctcaaccgcatcccacacggacgaaaaaaccatagtgacaaagggccgaagcctgtggtatttctgcagcatggtctgcttgcagattcgtcgaattgggtaactaacctcgcgaactcgtccttgggattcatactcgcagatgcgggatttgatgtttggatgggaaactcgcggggcaatacttggtcgcggaagcataagaccctttctgtgagccaggatgaattttgggccttctcatatgatgagatggcaaagtacgaccttcctgcctctatcaactttattctgaacaagaccggtcaagaacaagtctactacgtgggtcattcgcaggggacgaccataggattcattgcatttagccaaatccctgaactcgccaagcgtattaagatgttcttcgcactgggacctgtggcttccgtcgcattttgtacctcgcctatggcgaagctgggtcgcctccctgaccacttgattaaagatctttttggcgataaggaatttctgccgcaatcagcattccttaagtggctcggcacgcacgtgtgtactcatgtgatcctgaaggaactgtgtggtaatctttgctttctgctctgcggcttcaacgaacgtaatctcaacatgtcgcgggtcgatgtctacaccactcattcccccgcgggaacctcagtgcagaatatgctccactggtcccaggctgtgaagtttcagaaattccaagcatttgactgggggtccagtgcaaagaattactttcattacaaccagtcctacccacctacttacaatgtgaaggacatgctggtgccgactgcagtgtggtcgggcggacatgattggttggctgatgtctatgacgtgaacattttgctgactcagataaccaacctggtctttcacgaaagcatacctgagtgggaacatctggatttcatttggggtttggatgcaccatggagactttacaataagattatcaacctgatgcgcaaataccaa

SEQ ID NO: 15617 - DNA, 1197 bp, synthetic construct
  misc_feature 1..1197: note = source = /note="Description of Artificial Sequence: Synthetic coding sequence"
  source 1..1197: mol_type = other DNA
atgaagatgcgcttcctcggcctggtcgtttgtttggtgctgtggacccttcactcggagggatcccgcggcaagctcaccgcggtggacccagaaaccaacatgaatgtctcggaaatcatctcctactggggcttcccgagcgaggagtacctcgtcgaaactgaagatggatacatcctgtgcctgaatcgcattccgcatggaaggaagaatcactcggacaaaggcccaaagccggtcgtgttcctgcagcacggtttgctggctgactccagcaactgggtcactaacctcgccaactcaagcctgggatttatcctggcggacgcaggcttcgacgtgtggatgggcaactcccgcggtaacacttggtcccgcaaacacaagactctgtccgtctcacaggacgagttctgggcattttcgtatgacgagatggccaagtacgatcttccagcgtcaatcaactttatcctgaataagacgggacaggagcaggtgtactacgttggacactctcagggcaccacgatcgggttcatcgccttctcccagattccggaactcgccaagagaatcaagatgttctttgcgctgggcccggtcgctagtgtggccttctgcacctcgccgatggcgaaacttggacggttgccggaccatctgatcaaggacctctttggcgataaagaatttctcccccagagcgccttccttaaatggctgggaactcacgtgtgcacccatgttatcctgaaggaactttgcggtaacctctgctttctcctctgcggattcaatgaacggaacttgaacatgagcagggtggacgtgtacaccacccactccccggccggaaccagcgtgcaaaacatgctgcactggtcacaagcggtcaagtttcagaaattccaggcattcgattggggtagctcggcaaagaactacttccactacaaccagtcctaccctccgacttacaacgtgaaagatatgctggtgccgaccgctgtgtggtcaggaggacacgattggttggcagacgtgtacgacgtgaacatcctcctgacccagattactaacctcgtctttcacgagagcatcccagaatgggaacatctggacttcatctgggggcttgatgccccttggcgcctttacaataagatcatcaatctcatgcgcaaataccag

SEQ ID NO: 15618 - DNA, 1197 bp, synthetic construct
  misc_feature 1..1197: note = source = /note="Description of Artificial Sequence: Synthetic coding sequence"
  source 1..1197: mol_type = other DNA
atgaagatgcgatttctggggctggtcgtctgtttggtgctttggacgctgcattcagaaggttcacgaggcaaacttactgccgtggaccctgagactaacatgaacgtgtcggagataatcagctattggggttttccgtcggaagaatatctcgtcgaaaccgaagatggctacatcctttgtctcaataggatccctcacggacgcaagaaccattcagataaaggccctaaacccgtcgtctttctgcagcacggcctgttggctgactcgtcgaattgggttactaaccttgccaattcgtccttgggatttatcctggcagacgctggttttgatgtgtggatgggaaatagccggggcaacacttggtcaagaaagcacaagaccttgtccgtgagccaggatgagttctgggcattttcgtacgacgaaatggcaaagtacgacctccctgcatcgataaacttcatcctcaataagacggggcaagaacaagtgtactacgtgggacattcccaaggaaccactataggttttatcgcgttttcacaaattcctgagctcgcaaagagaattaagatgttttttgcgctcgggcccgtggcctccgtggcattttgcacttcccctatggcaaagctgggcagactgcctgatcaccttatcaaggatctcttcggtgataaagagtttttgccacaatcggcgttccttaagtggctgggtacccatgtgtgcacccatgtgatacttaaagaactttgtggaaacctgtgctttctgctttgtgggttcaatgagcgtaacttgaatatgtcgcgcgtggatgtgtacaccactcattctccagcgggaacctcggtccagaatatgttgcattggtcacaagcagttaagttccaaaagttccaggccttcgattggggatccagcgcgaagaactacttccattacaaccaaagctacccaccaacctacaatgtgaaggacatgctggtgcccaccgccgtgtggtccggaggccatgactggctcgccgacgtttacgatgtgaacattctgttgacgcagattactaacctcgtttttcacgagtcgatccccgaatgggaacatctggatttcatatggggactggatgcaccgtggcgcctctacaacaagatcattaatcttatgcgaaaataccag

SEQ ID NO: 15619 - DNA, 1197 bp, synthetic construct
  misc_feature 1..1197: note = source = /note="Description of Artificial Sequence: Synthetic coding sequence"
  source 1..1197: mol_type = other DNA
atgaaaatgcgttttcttggcttagtcgtgtgcctggttctatggacgcttcattccgaaggctctcggggaaagttaacagcggtcgatccagaaacaaatatgaacgtgagtgaaatcatatcctattggggctttccgtccgaggaatatttagtggaaacagaagacggatatattctttgtttaaataggattccgcatggaagaaaaaaccattcagataaaggcccgaagcctgtagtctttctgcagcatggccttcttgcggatagctccaattgggttacaaacctggctaattcttccctcggcttcattcttgcagatgctggctttgatgtatggatgggaaactcccgcggaaacacatggagtcgtaaacataaaacgctttctgtttctcaagacgagttctgggcttttagctacgatgaaatggccaaatatgacctgccggcatcaataaatttcatcctgaacaaaacgggtcaggaacaagtctattacgtgggtcacagccaaggtacgactattgggtttatcgcattttcgcaaattccggaattagcgaagcgcattaaaatgttttttgcgttaggccccgtagcctctgtggcattctgtacgtccccgatggctaagttaggcagattacccgaccatttaataaaggatttatttggggataaagaatttctcccacaaagcgcctttcttaaatggctaggcacacatgtttgcactcatgtaattctgaaagaactttgcggtaatttgtgctttttgttgtgtggatttaacgaacgtaacttaaatatgtcgagagttgatgtgtacacaactcacagcccggccggtacaagtgtgcagaacatgctacattggagccaagctgtgaagttccagaaatttcaggcctttgattggggatcgtctgcaaagaattatttccactacaatcaatcctacccgcctacctacaatgtcaaagacatgttagtaccgacagcagtttggagcgggggacatgattggttagcggatgtatatgacgtaaatatattacttacacaaattacgaaccttgtttttcatgaaagcatcccagaatgggaacatttggatttcatttgggggctagatgccccctggagattatataataagatcattaaccttatgcgaaaataccag

SEQ ID NO: 15620 - DNA, 1197 bp, synthetic construct
  misc_feature 1..1197: note = source = /note="Description of Artificial Sequence: Synthetic coding sequence"
  source 1..1197: mol_type = other DNA
atgaaaatgcggttccttggtctggtggtgtgtctggttctgtggacactccacagtgaggggtccagaggaaagctgactgcagtggaccccgagacgaacatgaatgtcagcgagataatcagttattggggattccccagtgaagaatacctggttgagaccgaagacggctatatcctctgccttaaccggattccccatgggagaaagaaccactctgacaaaggccctaaacctgtagtgttcctgcagcacggtctcttggcggacagtagtaattgggtgaccaatctggccaactcttccctgggattcattctcgccgacgcaggctttgatgtctggatgggtaatagcaggggaaacacttggagtagaaaacacaaaacattgtccgttagccaggacgaattttgggccttcagttatgacgaaatggctaagtatgatctccccgcttcaatcaattttatcctgaataagacaggccaggagcaagtgtactacgtgggacactctcagggcaccacgatcggtttcattgccttctcacagattcctgagttggccaaaagaatcaaaatgtttttcgccctcgggcctgtggcaagcgtagcattttgcacttccccaatggccaaactcggccggctcccagaccatctcattaaggatttgtttggggataaagagttcctgccgcagtccgcttttctgaaatggctcggcacccatgtatgcacccatgtcatccttaaggaactgtgtggcaacttgtgtttcctgctgtgtggcttcaatgagcggaacctcaacatgtcaagggtggacgtctataccacccactcccccgcaggcacgtcagtccagaacatgctccattggagccaggctgtgaaattccagaagttccaagccttcgactggggtagctccgcaaagaactacttccattataatcagagctacccacctacttacaatgtgaaagacatgctggtgccgacggccgtgtggtcaggtggccatgactggctggcagatgtctatgatgttaatattctgctcacacaaataacaaacctggtgttccatgagtctatcccagagtgggaacacctcgattttatctggggcctcgatgctccctggagactgtacaacaaaattatcaatctgatgcggaagtaccag

SEQ ID NO: 15621 - DNA, 1197 bp, synthetic construct
  misc_feature 1..1197: note = source = /note="Description of Artificial Sequence: Synthetic coding sequence"
  source 1..1197: mol_type = other DNA
atgaaaatgcgatttctcggcttggttgtgtgcctggtcctgtggaccctgcactcagagggcagtaggggcaaactgactgccgtcgatcctgagaccaacatgaacgttagcgagattataagttactggggcttcccatccgaagaatacttagttgagaccgaagacggctacatcctgtgcctgaatcggatacctcacggacgcaaaaatcatagtgacaaaggcccaaaaccagttgtgtttctgcagcatggtctgctggccgactccagcaactgggttacaaaccttgcaaattcttccctgggctttatactggccgatgctggctttgacgtgtggatgggcaacagccgcggtaatacttggtcaaggaagcacaaaacactgtctgtatctcaggatgaattttgggcattttcctatgacgagatggcaaagtatgatttgcccgccagcattaacttcatcttaaataaaactggccaggagcaagtgtactatgtgggccacagccaaggaaccaccattggatttatcgccttcagccaaatcccagagctcgcaaaaagaattaaaatgttcttcgccctggggcccgtcgcctccgttgccttctgcacatcaccaatggcaaagctcggccgcctgccagatcatctgataaaggacctatttggcgataaagaatttctgccgcaaagcgccttcctgaaatggctgggcacccacgtttgtacacatgttattctgaaagaactgtgtggcaacctgtgttttctgctctgcggctttaatgagcggaaccttaatatgagtcgcgtagacgtgtatacaacacacagccctgctggcacaagcgttcagaacatgctacactggagtcaggctgtgaagtttcagaaattccaggccttcgattggggaagttccgcaaaaaattactttcactacaatcagtcctatcctcctacatataacgtgaaggatatgcttgtccctaccgccgtatggtctggcggacatgattggctagccgacgtctacgatgtcaacatattgctgacacagataacaaatctcgtgttccacgagtccatcccagaatgggagcacctggacttcatttggggcctggacgctccttggcgactgtacaataaaataattaatctgatgaggaaataccaa

SEQ ID NO: 15622 - DNA, 1197 bp, synthetic construct
  misc_feature 1..1197: note = source = /note="Description of Artificial Sequence: Synthetic coding sequence"
  source 1..1197: mol_type = other DNA
atgaagatgaggttcttgggactggtcgtctgcctggtgttgtggaccctgcatagtgaggggagtaggggaaaactcaccgcagttgaccccgaaacaaatatgaacgtatctgagatcatcagctactggggcttcccttcagaagagtacttagtcgaaacagaggatggctacatcttatgtctaaatcgcatcccccacgggcgcaaaaaccatagcgataaaggaccaaaacccgtcgtatttctccaacacggcttgctcgctgatagctccaactgggtgactaatctggcaaattcctctctagggttcatacttgcggacgccggtttcgacgtgtggatgggcaactccaggggtaacacttggagccggaagcacaagacactgagtgtgagtcaggatgagttctgggccttctcatacgatgaaatggccaagtacgaccttcccgcatctatcaactttatcttgaataagacaggtcaggagcaggtctattacgtgggacactcacagggcaccaccatcggattcattgcatttagccagatccctgagctggccaagaggatcaaaatgttttttgcgctcgggcctgttgctagcgtggctttttgtacttcacctatggcaaaactgggccgcttgcccgatcatctgatcaaagatctcttcggcgacaaagagtttctgccacagtcggcgtttctgaagtggctgggcacccacgtatgcacccacgtgatcttaaaagagctctgcggcaacttatgcttcttgctgtgcggattcaacgagcgtaacctcaacatgtccagagtggacgtgtatacaacacacagcccggcaggtactagtgtccagaatatgctgcactggagccaggcagtaaaattccaaaaatttcaggcctttgattgggggtcctctgctaagaactatttccactataaccagtcttacccgcctacttataacgttaaggatatgcttgtacccacggccgtatggagtggggggcatgattggcttgcagacgtttacgatgtcaatattctgctaacccagatcacaaacctggtgtttcatgagtcgattcccgaatgggagcatctcgactttatttggggtttggatgccccttggcgtttgtataataaaatcattaaccttatgaggaagtatcag

SEQ ID NO: 15623 - DNA, 1197 bp, synthetic construct
  misc_feature 1..1197: note = source = /note="Description of Artificial Sequence: Synthetic coding sequence"
  source 1..1197: mol_type = other DNA
atgaagatgcggtttctcgggttggtcgtctgcctcgtcctgtggaccctccactccgaagggagccggggaaagttaacagcagtcgaccctgagacaaatatgaacgtgtccgaaatcatctcctactggggtttccctagcgaggaatacctggtcgaaaccgaggacggctacatactgtgtctgaatcgcatacctcatggaaggaaaaaccacagtgacaaggggccaaagcctgtggtttttctccagcacgggcttctggccgacagttcgaattgggtgacaaatctggcgaactcctcgctgggattcatcctagccgacgctggcttcgatgtgtggatgggcaactctaggggtaacacgtggagcaggaaacacaagacactctcagtcagccaagacgagttctgggcctttagctacgatgaaatggctaaatacgacctccccgcgtccatcaatttcatcttaaacaagacggggcaggaacaggtgtactatgtcggacattcacaaggtactacgatcggattcatcgcgttctcccagattcccgaactagccaaacggattaaaatgtttttcgcactgggtcctgtggcctcggttgcgttctgcaccagccctatggccaaactggggcggctgcccgaccacctgattaaggatctgttcggagacaaggaattcctcccacaaagcgcattcctgaagtggttgggtacacacgtttgtacccacgtcatcctgaaggaactatgtgggaatctctgttttctcctctgtggcttcaacgagaggaatctcaacatgtcccgagtcgatgtgtatactacgcacagcccagctggaacgtcagtgcagaatatgctgcactggtcacaggccgtgaagtttcagaagttccaagcattcgactggggctccagcgctaagaattacttccattacaatcagagctatccgccaacatataatgtgaaagatatgctggtgcctactgccgtgtggtccggtgggcacgactggttggcagacgtgtacgacgtgaacattttgctcacccagattacaaacttggtgtttcacgaatcgattccggagtgggagcatctggactttatatggggtctggacgcgccctggcgcttgtacaacaagatcattaatctgatgcgtaaatatcaa

SEQ ID NO: 15624 - DNA, 1197 bp, synthetic construct
  misc_feature 1..1197: note = source = /note="Description of Artificial Sequence: Synthetic coding sequence"
  source 1..1197: mol_type = other DNA
atgaagatgcgcttccttggtttggtcgtgtgcctggtcctgtggactctgcactccgaagggtcgagaggaaaactgactgcggtggacccggaaaccaatatgaacgtgtccgaaatcatctcgtactggggctttcctagcgaggagtacctcgtcgaaaccgaagatggctacattctctgcctcaacaggattcctcatggacgcaagaatcactcggacaagggaccgaaaccggtcgtctttcttcagcacggtctgctcgcagatagcagcaactgggtcacgaacctcgctaactcatcactgggcttcatcctggctgacgcagggttcgacgtgtggatgggtaactcacggggaaatacttggtcacggaagcataagaccctgagcgtcagccaagacgagttctgggcgttctcgtacgatgaaatggccaaatacgatctgcctgccagcatcaatttcatcttgaacaaaacgggacaggaacaggtgtactacgtggggcacagccaaggaaccaccatcgggtttatcgcgttctcgcagatccctgaattggccaagagaatcaagatgttctttgctctgggaccagtagcaagtgtggccttctgcacgtcgccaatggcgaaactgggccggctcccggaccacctgatcaaggacctgttcggtgataaggagttcctcccgcagtcagcgttcctcaagtggttgggaacccacgtctgcactcatgtcatcctgaaagaactgtgtggtaatctgtgtttcctcctctgcggattcaacgagcgcaatttgaatatgtcccgagtcgacgtgtacactacccactccccagcaggcacctcggttcagaacatgctgcattggagtcaggcagtgaagttccaaaagttccaagccttcgactggggatcgtccgcaaagaactacttccactataaccaatcctacccgccgacctacaatgtcaaggacatgctcgtgccaaccgcagtgtggagtggaggacatgactggctcgcggacgtgtacgacgttaacatccttttgacgcagatcaccaacctggtgttccacgaaagcattccggagtgggagcacctggactttatctggggactcgacgcgccgtggcggctgtacaacaagatcatcaaccttatgcggaagtaccag

SEQ ID NO: 15625 - DNA, 1197 bp, synthetic construct
  misc_feature 1..1197: note = source = /note="Description of Artificial Sequence: Synthetic coding sequence"
  source 1..1197: mol_type = other DNA
atgaagatgagatttctgggtttggtggtgtgtcttgtactttggactctccattcggaaggttcgcgtgggaaacttacggcggttgacccagagactaatatgaatgtgtcggagattatctcctactggggtttcccatccgaagagtacctcgtggaaactgaagatggctacatcctgtgcctcaacaggatcccacacggaaggaagaaccattccgacaagggacccaagccggtcgttttcttgcagcatggactgttggcagattcgtcaaattgggtgaccaatcttgccaattcgtccctgggtttcatactcgcagatgcaggttttgatgtgtggatgggaaatagcagagggaacacttggtcacggaagcacaaaaccctgtcggtgtcacaagacgaattttgggcattttcgtacgatgaaatggccaagtacgatctccctgcaagcataaacttcatcttgaacaagaccggtcaggagcaggtgtactacgtggggcattcccaaggtactactatcggctttatcgcatttagccaaatcccggaactggccaagcgaatcaagatgtttttcgcactggggcctgtggcgtctgtggcattctgcacttcccctatggccaagctgggcagacttcctgatcatctgattaaggatctgtttggagacaaggaattcctgccccagagcgcctttcttaagtggctggggacgcatgtgtgcacccatgtgatactgaaggagctctgtggcaacctgtgttttctgctttgtggatttaacgagcgaaatctgaacatgtccagggtggatgtgtacaccacccattccccagcaggtactagcgtgcaaaacatgctgcattggtcgcaggcagtgaagttccaaaagtttcaggccttcgattggggctcctcagcaaagaactattttcactacaatcagtcataccctcccacttacaacgtcaaggacatgctcgtgcctaccgctgtgtggagcggggggcatgactggctggcggatgtctacgatgtcaacatccttcttactcaaatcactaacctcgtctttcatgaatcaattccggaatgggagcatcttgactttatctggggtcttgacgcaccatggagactgtacaacaaaatcattaatctgatgcggaagtatcaa

SEQ ID NO: 15626 - DNA, 1197 bp, synthetic construct
  misc_feature 1..1197: note = source = /note="Description of Artificial Sequence: Synthetic coding sequence"
  source 1..1197: mol_type = other DNA
atgaagatgcgttttctggggttagtagtctgtttggtgctgtggactctgcacagcgaagggtccagggggaagctgaccgccgttgaccccgagacgaatatgaatgtgagcgagattatctcatattgggggttcccctctgaggagtatctcgttgagacagaggacggctacatcctgtgcttgaaccggataccccacggacgcaagaatcattctgacaaggggccaaagcccgtcgtgttcttacagcatggactgctcgcggactcctccaactgggtcacgaacctggcgaactccagtttggggtttatcctagccgatgctggatttgacgtctggatgggaaacagtaggggaaacacatggagtaggaaacataagacactatccgtgagccaggatgagttctgggcttttagttacgatgaaatggccaagtacgatttacccgctagcatcaactttattctaaataagacaggccaggagcaggtttattacgtaggccactcacagggaaccacaatcggatttatcgccttttcacagatccccgagctagccaaacgtattaaaatgttctttgcacttggcccggtggcaagcgtggcgttttgcacaagcccaatggctaagcttgggagactccctgaccacttgatcaaggacctgttcggcgacaaagagtttctccctcagtctgccttcctgaagtggctcggcactcacgtctgtacccacgtgatcctgaaagagctctgtgggaatctttgctttctgctttgtggcttcaatgaacgcaacctgaacatgtctcgcgtggacgtctacactactcactcgccggccggcaccagcgtgcaaaacatgctgcactggagtcaggcagtgaagttccagaaattccaagcgttcgattggggctcaagtgccaagaactacttccattacaatcagtcgtatcctcctacttacaacgtcaaggatatgcttgtgcctacagccgtgtggagtggtgggcacgactggctggccgacgtgtatgacgtcaacatcctcctcacgcagatcacgaatctggtgttccacgagtccatacccgagtgggagcatctggatttcatttggggcctggatgcaccttggaggctgtacaacaagattattaatctcatgcgtaagtatcaa

SEQ ID NO: 15627 - DNA, 1197 bp, synthetic construct
  misc_feature 1..1197: note = source = /note="Description of Artificial Sequence: Synthetic coding sequence"
  source 1..1197: mol_type = other DNA
atgaagatgcggttccttgggctcgtcgtgtgtttggttctgtggactctccatagcgagggttcacgcggcaagctgactgcggtcgacccagaaactaacatgaatgtgtccgagatcatctcgtattggggtttcccttccgaggaatacctggtcgagactgaagatggctacattctgtgcctcaacaggatcccgcatggaagaaagaatcactcggacaaggggcctaagccggtggtgtttctccagcatgggcttctcgcggattcatccaactgggtgactaacctggccaattcatccctgggattcatcttggctgatgccggattcgatgtgtggatgggaaactcgagaggcaacacttggtcgcgcaagcataagacgctctcagtctcacaagatgaattctgggcattctcgtacgatgaaatggcgaaatacgacctgccggcatcaatcaatttcatattgaacaaaactggacaggagcaggtgtactacgttggacactctcaaggaaccactatcggtttcatcgcattttcacagatcccggaacttgccaaacgcattaagatgttttttgccctgggaccagtcgcttcggtcgccttttgcaccagcccaatggcgaaactcgggcgcctgccggatcacttgattaaggacctgttcggcgacaaggaattcctgcctcaatccgccttcctgaagtggctcggaactcatgtctgcactcatgtgatcttgaaagaactgtgcggcaatctttgtttcctgctctgtggttttaacgagcgcaatctgaacatgtcaagagtcgacgtgtacaccactcattccccggcgggaacctccgtgcagaacatgcttcactggtcccaagcggtgaaattccagaagtttcaggcattcgactggggatcctccgctaaaaactacttccactacaatcagtcgtacccaccgacctataacgtcaaggatatgctggtgccgactgcggtgtggtccggaggacatgactggttggccgacgtgtatgacgtcaacatcctgctgacgcaaatcaccaatctcgtgttccacgagagcatccctgaatgggagcacctggactttatctggggactggacgccccttggcgcctgtataacaagattatcaatctcatgcggaagtaccag

SEQ ID NO: 15628 - DNA, 1197 bp, synthetic construct
  misc_feature 1..1197: note = source = /note="Description of Artificial Sequence: Synthetic coding sequence"
  source 1..1197: mol_type = other DNA
atgaagatgcgttttcttgggttggttgtctgtctggtcctatggactttacattccgaggggtcgcgagggaaacttacagcagttgatccagaaactaatatgaatgtatccgagattatctcgtattggggtttcccgtctgaggaatacctcgttgagacagaagatggttacatcctctgtctgaaccgaatcccacacggccgtaagaatcattccgataaaggacctaaacctgttgtttttcttcagcatggtcttctagcagatagctcgaattgggttacgaatttggctaattccagtctggggtttatcctcgccgatgccggatttgatgtttggatgggtaacagccgtggtaatacatggagcagaaagcacaagactctatcagtttcacaagacgagttctgggcttttagctatgacgaaatggccaaatacgaccttcccgctagcattaacttcatcctcaacaagaccggtcaggagcaagtatactacgtagggcactctcaagggacgaccatcggcttcatcgctttctcacaaatcccggagttggctaagcgtatcaagatgttcttcgctttgggaccggttgcttccgtagctttctgcacgtcgcccatggcgaagctcggacggttacctgatcacctcattaaagatctgttcggtgataaggagtttctgccgcaatccgcgttcttgaagtggctcgggacccatgtttgtacgcacgtcatcctgaaggagttgtgcggaaatctttgctttctattatgcggattcaatgaaaggaatctcaacatgtcccgtgtcgatgtatatacaacccatagccctgctggtacttctgtccagaacatgctacattggagccaagccgtcaaattccagaaatttcaggctttcgattggggcagctcggctaagaattattttcattataatcagagctacccacctacctacaatgttaaggatatgcttgttcccaccgcagtctggtccggggggcatgattggttagcggacgtatacgacgttaacattcttcttactcaaatcacaaacctagtgttccacgagtctatccctgaatgggagcacctagattttatctggggtcttgacgcgccttggaggctctacaataagattattaaccttatgcgcaagtatcag

SEQ ID NO: 15629 - DNA, 1197 bp, synthetic construct
  misc_feature 1..1197: note = source = /note="Description of Artificial Sequence: Synthetic coding sequence"
  source 1..1197: mol_type = other DNA
atgaaaatgcgtttcctggggctggtggtttgtctggtgctctggactctgcatagcgagggctcccgtgggaagctgaccgccgtggacccagagacgaatatgaatgtaagcgagattatctcctattggggattcccttcggaagagtatcttgttgagacagaggacggatacatcttgtgcctgaaccggattccccatggtcgcaagaatcattctgataaagggccaaaaccagtcgtgttcctacaacacggcttactggccgatagctctaactgggtgacgaacctcgctaatagcagccttggtttcatcctggccgatgccggattcgatgtgtggatggggaattctagggggaacacctggtctaggaaacacaagacattgagcgtctctcaggatgaattttgggctttctcctacgacgagatggccaagtatgacttaccagctagcatcaactttattttgaacaaaactggccaagagcaagtgtactacgtcggacatagccagggcactactatagggtttatcgccttttctcagatcccagagttggccaaacggatcaagatgttcttcgctctggggccggtcgccagcgtggctttttgcacctcaccaatggccaagctgggccgtctccccgaccacctgattaaagatttgtttggggacaaggaatttctaccacagtccgccttcctgaaatggttgggaacccacgtgtgtacccatgtgattctgaaagaactgtgtggcaatctttgcttccttctgtgtgggtttaacgagcggaatctcaatatgtcgcgtgtcgacgtctacacaactcacagcccagcaggaacaagtgtccagaatatgcttcactggagccaagctgtaaaatttcagaaattccaagctttcgattggggtagcagtgcgaaaaactatttccactacaaccagagttacccacccacatataacgtaaaggacatgctcgtccctaccgcggtctggtccggcggacacgactggttagctgacgtgtacgacgtgaatattctgcttactcaaattacgaatctggtgtttcatgagagcattcccgaatgggagcacctagactttatctgggggctcgatgccccatggagactttacaacaagataataaacctgatgcgtaagtaccag

SEQ ID NO: 15630 - DNA, 1197 bp, synthetic construct
  misc_feature 1..1197: note = source = /note="Description of Artificial Sequence: Synthetic coding sequence"
  source 1..1197: mol_type = other DNA
atgaagatgcggtttttaggcctagtggtctgtctggtactctggacactacacagcgaagggagcagagggaagttaacagccgtggaccctgagaccaacatgaatgtctcagaaataatctcttactgggggtttccaagcgaagaatatctcgtggagacggaggacggctatatcttatgtcttaacaggattccgcacgggcgcaaaaaccacagcgataaggggcccaaacctgtggtgttcttacagcacggcttgctcgctgattcatctaattgggtcaccaatctcgccaactccagtctcggattcatcctagcagacgcaggtttcgacgtgtggatgggcaactcccggggaaacacgtggtcaaggaaacataaaaccctctctgtttcgcaggacgagttctgggccttttcatatgatgaaatggccaagtacgaccttcctgcctccatcaatttcatcctgaataaaaccgggcaggagcaggtctattatgtggggcactcacagggcaccaccattggattcatcgcattcagccaaattccagaactcgcaaaacgcatcaaaatgttttttgcacttggtccagtggcctcagtggccttctgcacatcaccgatggctaaactgggccgactgcccgaccacctgatcaaagacctgttcggagacaaggagttcttgccgcagtctgccttcttaaagtggttgggtacgcatgtgtgtactcacgtgattctcaaagaactgtgcggaaatctgtgttttcttctctgcgggttcaatgaacgaaacctgaacatgagtagagtcgatgtatacacgacgcactctcccgctggaacaagtgtccagaatatgctccactggagccaggcggtgaaatttcagaagttccaggcctttgattggggctcttccgcaaagaattattttcattacaatcaatcatatccaccaacctacaatgtgaaggatatgttggttccaacggcagtgtggtctggcgggcacgactggttagccgatgtatatgacgtaaacattctgctcactcagataacaaatcttgtctttcacgagagcatccccgagtgggaacacctcgattttatctggggtctggacgcgccatggagattatataacaagattatcaacctgatgcggaaataccag

SEQ ID NO: 15631 - DNA, 1197 bp, synthetic construct
  misc_feature 1..1197: note = source = /note="Description of Artificial Sequence: Synthetic coding sequence"
  source 1..1197: mol_type = other DNA
atgaagatgcgctttcttggcttggtagtgtgtctggtgctgtggaccctacacagcgagggctccagggggaagctgacggccgtggaccccgaaaccaacatgaatgtgtcagaaatcatcagttattggggtttcccttccgaggaatacctcgtggagaccgaagacgggtacattctgtgcctgaatcgcatcccacacggcaggaagaatcattccgataaaggcccaaagccagttgtcttcttacagcacggactcctggccgattcgtctaattgggttacaaatctcgcgaatagttcattaggctttatccttgccgatgccggatttgatgtttggatgggtaactctcggggcaacacatggagccgcaaacacaaaacactgagtgtaagccaggacgagttctgggctttctcatacgacgagatggctaaatatgatctccccgcctccatcaattttatcctgaataagactggccaagagcaagtttattatgtggggcactcccagggtaccactataggatttatagctttcagccagatcccagagctggcgaaaagaatcaaaatgtttttcgccctgggtcccgtcgctagtgttgctttttgcacatccccaatggccaagcttggaaggctgccagaccacctgatcaaggacctgtttggcgataaagaatttctgccccaatctgcctttctcaagtggctcggaactcacgtgtgcacacacgtgatcttaaaggagttgtgtggcaatctgtgctttctactctgtgggttcaatgaaaggaacctgaacatgtcgcgggtcgatgtgtacactacacattcaccagcagggacctccgtacaaaatatgttgcactggagtcaggcggtgaagttccagaagtttcaagctttcgactggggatcgagcgcaaagaattatttccactacaaccagtcctatccacccacatataacgtgaaggatatgctggttccaacggcagtctggagtggcggccacgactggctggccgacgtctatgacgtgaacatcctgttgacccagatcacgaatctcgtttttcacgagtcgataccggagtgggagcatttggattttatttggggacttgatgccccatggaggctatacaacaagattatcaacctgatgaggaaataccag

SEQ ID NO: 15632 - DNA, 1197 bp, synthetic construct
  misc_feature 1..1197: note = source = /note="Description of Artificial Sequence: Synthetic coding sequence"
  source 1..1197: mol_type = other DNA
atgaaaatgaggttcctgggacttgttgtgtgtctggtgctgtggactttgcattcagaaggaagccgaggaaagctcaccgcagtggaccccgaaactaacatgaatgtcagcgagataatcagctactgggggtttccatccgaagagtaccttgtcgaaactgaggatggttacattctttgtctgaatcgtattccgcacggacggaaaaaccatagcgataagggacccaagccagtggtgttcttgcaacatggcctccttgcggactcaagcaattgggttactaacctggcaaactcctcactgggctttatacttgccgatgcggggtttgacgtgtggatggggaactcgcgaggcaatacctggtcccggaaacacaaaaccctgtcggtgtcgcaagatgaattctgggcattctcgtacgacgagatggccaaatacgatttgccggcatccataaacttcatcctcaataagactggccaggaacaggtctactacgtcggtcatagccaaggaaccacgattggatttatcgcattttcccaaattcctgaattggctaaacggattaagatgtttttcgcattgggaccagttgcctccgtggcattttgtacctcgccaatggcaaagctgggacgccttcctgatcatctgattaaggatctgtttggggataaggagttcctccctcaatcagcattcctgaagtggttggggactcatgtgtgtacccacgtgatccttaaggaactttgcgggaacctttgctttctcctttgcggttttaacgaacgcaatctgaatatgtcgcgcgtggacgtgtacaccacccactcgccggcgggtacttcggtgcagaacatgctgcattggtcgcaggcagttaagtttcaaaagttccaggcattcgattggggatcgtcggccaagaactactttcactacaaccagtcgtaccctcccacctataatgtcaaggacatgcttgtcccaactgctgtctggtctggcggtcacgactggctggcagatgtgtacgatgtgaacattcttttgacgcagattaccaaccttgtctttcatgaatcgataccagagtgggaacaccttgactttatctggggcctggatgcgccttggcgactgtataacaaaatcatcaacctcatgcggaagtaccaa

SEQ ID NO: 15633 - DNA, 1197 bp, synthetic construct
  misc_feature 1..1197: note = source = /note="Description of Artificial Sequence: Synthetic coding sequence"
  source 1..1197: mol_type = other DNA
atgaaaatgcggttccttggtcttgtggtgtgccttgtgctgtggactctccattcagaaggatctcgaggtaagctgacggcggtggacccggaaactaatatgaacgtgtcagaaatcatttcctactggggatttccctctgaagagtacctcgtggaaactgaagatggctatattctgtgtctcaaccgcatcccccatggacgcaagaatcactcggacaaaggcccgaagccagtggtgttccttcagcatgggttgctggcagattcgtcgaactgggtgaccaaccttgcaaactcctcattgggctttattctcgccgatgcggggtttgacgtctggatggggaactcgcgtggaaacacctggtcgcgaaagcataagacccttagcgtgtcgcaagatgaattctgggcattttcctacgacgaaatggccaagtacgatcttcctgcttcaataaactttatcctgaataagaccggacaagaacaagtctattatgtgggtcattcgcaaggaaccaccatagggtttatcgccttctcccagattcctgaactcgcaaagcgcattaagatgttttttgctctggggccagtggcatccgtggccttttgtacctccccgatggccaagctgggcagacttcccgaccatttgattaaggatctgttcggcgacaaggagtttcttccacaaagcgcgttccttaaatggcttggaacgcatgtctgtactcatgtgatactcaaagaactctgcggtaatctttgttttctgttgtgtggattcaacgaacgtaatctgaatatgtcaagagtggatgtctacacgacccattcccccgcaggtaccagcgtacagaatatgttgcactggtcgcaggcggtcaaattccaaaagtttcaagcatttgactggggttcgtccgcaaagaactactttcattacaatcaaagctaccctcctacttataacgtgaaggatatgctggtgcccaccgcagtgtggagtgggggccatgattggctcgctgatgtctacgatgtgaatattctgctgactcaaatcaccaacctggttttccatgaatcgatacctgaatgggaacaccttgacttcatttggggtctggatgcaccttggcgtttgtacaacaagatcattaacctgatgcgaaagtaccag

SEQ ID NO: 15634 - DNA, 1197 bp, synthetic construct
  misc_feature 1..1197: note = source = /note="Description of Artificial Sequence: Synthetic coding sequence"
  source 1..1197: mol_type = other DNA
atgaagatgaggttcttgggactggtagtttgtctggtgctctggacactgcacagcgaaggctcacgcggcaagcttacagctgtcgatcccgagaccaacatgaacgttagcgagataatatcttactggggcttcccatcagaagaatacctggtggaaacagaggatggttacatactgtgcctcaataggatacctcacggaagaaaaaatcactctgacaagggacccaagcctgtcgtgttcctccaacacggccttctggccgattcatctaactgggtgaccaatcttgccaacagcagcttgggttttattctcgctgacgctggttttgacgtttggatgggaaattctaggggaaacacttggtcccgcaagcataagaccctgagtgtgagccaagacgaattttgggccttctcctacgatgagatggctaaatatgacctgcccgctagtattaacttcattctgaacaagaccggccaggagcaggtttactacgtgggacactcccaaggcactacaatcggtttcatcgccttttcacagattccagagctggccaaaaggatcaagatgttcttcgcgctcggtcctgtggcatccgtggccttttgcacgtccccaatggctaagctgggccgcctgcccgaccatctgattaaagacttgtttggagacaaggagttcctccctcagagtgccttcttgaagtggctcggtacccacgtgtgcacgcacgtcatcttgaaggaattgtgcggaaatctctgcttcctgctctgtggatttaacgagcgcaacctgaacatgtccagagtagacgtatataccacccactctccggccggtacctccgtgcagaacatgctccattggtcccaggccgtcaagttccagaagttccaagcattcgactggggctctagtgcgaagaattattttcattacaatcaatcttaccccccaacatacaacgttaaggacatgttggtcccgactgcggtgtggtccggtggccacgattggctcgcggatgtttacgacgtgaatatattgttgactcaaattactaacctggttttccatgagagtatacctgagtgggaacatctggatttcatttggggcttggacgctccttggaggctctacaacaagattatcaacttgatgagaaagtaccaa

SEQ ID NO: 15635 - DNA, 1197 bp, synthetic construct
  misc_feature 1..1197: note = source = /note="Description of Artificial Sequence: Synthetic coding sequence"
  source 1..1197: mol_type = other DNA
atgaaaatgagattccttggactcgtggtgtgtctggtgctttggacgcttcattcggaggggtctcgcgggaagctgactgcagtcgaccctgagactaacatgaatgtcagcgagatcattagctactggggctttccctccgaggaatacctggtggagacagaagacggctatatcctttgtctcaaccggattcctcacgggcggaagaatcattcagataagggcccaaaacctgtagtgtttctgcagcatggcctgcttgccgacagttcgaactgggtgacaaatctggccaactcttctctggggttcatccttgcagacgcgggatttgatgtgtggatgggaaattctagaggcaatacatggagccgtaaacacaaaacactctccgtttcccaagacgaattttgggccttctcttacgacgagatggcaaaatatgacctccccgcaagcatcaacttcatattgaataaaaccggtcaagaacaggtgtattacgttggtcactcacagggcacaacaatcggctttatcgccttctctcagattccagaattggcaaaacggataaagatgtttttcgccctggggcccgtggcttctgtcgcattttgtacctcccctatggccaaacttggacgtctgcccgaccacctgatcaaagacttgttcggcgataaggagttcctgccccagtcagcgttcctgaagtggctgggaacacacgtctgtacccatgttattctcaaagaactctgcgggaacctatgttttctgctttgcgggtttaacgagcgcaatctgaatatgagtagagtggatgtctataccacacactccccggccggtacctccgtacagaacatgctccattggagccaggcggtaaagttccagaagttccaagcgtttgactgggggtcctcagctaagaactatttccactataatcagagttatccccctacatacaacgttaaagacatgctggtgcccacagccgtgtggagtggcgggcacgattggttagctgatgtctacgatgtaaatatccttttgacacagatcacgaacctggtgttccacgagagcatccccgagtgggagcacttggacttcatatggggtttggatgctccgtggcgattatataacaagatcataaaccttatgagaaaatatcag

SEQ ID NO: 15636 - DNA, 1197 bp, synthetic construct
  misc_feature 1..1197: note = source = /note="Description of Artificial Sequence: Synthetic coding sequence"
  source 1..1197: mol_type = other DNA
atgaaaatgaggttcctgggccttgtggtgtgtctggtcctgtggaccctgcactccgaaggcagcagaggcaaactcactgctgtcgacccagaaacaaacatgaacgttagtgagattattagctattgggggttcccttccgaggagtatctggtcgaaacagaagacgggtacattctgtgcctgaaccgaatcccccacggcaggaagaaccattctgataaaggaccaaagcccgtcgtgtttttgcagcatggactccttgccgacagttccaattgggttactaatctggccaatagcagtctgggctttatcttagcagatgcgggattcgacgtttggatggggaattcacgcgggaatacctggtcccgtaaacataaaactctgtccgtttctcaggatgagttctgggcattttcttatgacgagatggccaaatatgacttacctgccagtattaacttcatactcaacaaaaccgggcaggagcaagtttactacgtgggccacagccagggtaccacaatcggttttatagcttttagccagatccccgaattggccaaaaggattaagatgttcttcgccctgggcccagtggccagcgtggcgttttgcacatccccaatggctaaactgggcagactgcctgaccacctcatcaaagacctgttcggggataaagaattcctgccccaatcggccttccttaaatggctgggcacccacgtgtgcacccacgtgattctgaaagaactgtgtggaaatctgtgctttctgctttgcgggtttaacgagcgaaacctgaacatgagcagggttgacgtttacacgacacattcccctgccggcaccagcgtgcagaatatgctacactggtcccaagccgtgaagtttcagaaatttcaagcattcgactggggttcgagcgcgaagaattacttccactataaccagtcatatccacctacatacaacgtgaaggatatgctggttccaacagcggtctggtcaggaggtcatgactggcttgcggatgtgtacgatgttaatattctgctcacacagataactaacctcgtttttcacgagagcatcccggagtgggaacatttggatttcatctggggtttggatgctccttggagactgtataataagattattaatcttatgagaaagtatcag

SEQ ID NO: 15637 - DNA, 1197 bp, synthetic construct
  misc_feature 1..1197: note = source = /note="Description of Artificial Sequence: Synthetic coding sequence"
  source 1..1197: mol_type = other DNA
atgaagatgcgcttcttggggcttgtggtctgccttgttctctggactctgcactcggagggttcgagaggtaagctcaccgccgtcgaccccgagactaacatgaacgtttccgagatcatctcctactggggtttcccctcggaggagtacctggtagagaccgaagacggctacatcctgtgcctcaacaggataccgcacggacgcaagaaccactctgacaagggccccaaacctgtggtcttcctgcagcacggactgctcgctgactcttccaattgggtcactaacctcgcaaattccagcctcggtttcatcctagctgatgccggtttcgatgtgtggatgggtaactccagaggcaacacatggagccgcaagcacaagacgctctcggtcagccaggacgaattctgggcattctcctatgacgagatggctaagtatgacctgcctgcaagcatcaacttcattttgaacaagaccggccaggagcaagtgtactatgtcggccactcccagggtactacaattggctttatcgccttcagccaaatccccgagttggcaaaaaggatcaaaatgtttttcgctctgggtcctgtcgcctcggtggccttttgcaccagcccgatggcgaagctcggacgtctgcccgatcacctcattaaggatctctttggcgacaaagaattccttccccagtccgcgttcctgaagtggctcgggacgcacgtctgtacacacgttatcttaaaggagctgtgcggtaacctgtgtttccttctgtgcgggtttaacgagcgcaatcttaacatgagcagagtcgacgtctacaccacacactcacccgccggcacttctgtgcaaaatatgctgcattggtcccaggcggtgaaattccagaagttccaggccttcgattggggtagtagtgccaagaactacttccactacaaccagtcctaccccccgacatacaatgtcaaggatatgctcgtccctaccgcagtctggtccggtggccacgactggctggccgatgtctacgacgtaaacattctcttgacccaaataacgaacctcgttttccacgaatctattcctgagtgggagcatctcgatttcatctggggcttggacgcgccctggcgattgtataacaagatcattaatcttatgcgcaagtaccag

SEQ ID NO: 15638 - DNA, 1197 bp, synthetic construct
  misc_feature 1..1197: note = source = /note="Description of Artificial Sequence: Synthetic coding sequence"
  source 1..1197: mol_type = other DNA
atgaaaatgcgctttctgggactcgtcgtctgccttgtgctgtggacccttcactccgagggcagccgcggaaaactgactgccgtcgatcctgaaactaacatgaacgtcagcgaaatcatctcctactgggggttcccatctgaagagtaccttgttgaaactgaggatgggtacattctttgcttgaatcgcatcccacatggaagaaagaatcactccgacaaaggacccaagccggtggtctttcttcagcatggactcctcgcagactcctcgaattgggtgacgaatctggccaactcgagcctcggcttcatcctcgctgatgccggctttgatgtgtggatgggaaactcacggggaaacacttggtcgcgtaaacacaaaacgctgtcagtttcacaagacgaattctgggcgttcagctacgatgaaatggcgaaatacgacctgcccgcttcaatcaatttcatcctcaacaagaccgggcaggaacaagtgtactatgtgggtcacagccagggcactaccattggattcattgccttctctcagattccggaacttgccaagagaatcaaaatgttcttcgcactgggtccggtcgcgtcggtcgcattctgtacctcaccgatggcaaaactcggccgcttgccggaccacctgatcaaggatttgttcggagataaggagttcctcccgcaatcagcattcctcaagtggttggggacgcatgtctgcacccatgtcatcctgaaggagctgtgtggaaatctgtgtttcttgctctgcggcttcaacgagaggaacttgaacatgtcgcgcgttgacgtgtacaccacccatagcccggccgggacctctgtgcagaatatgctgcactggtcgcaggctgtgaagtttcaaaagttccaggcctttgactggggaagctccgccaaaaactacttccactacaatcagtcatacccgccaacctacaatgtcaaggacatgctggtgccgactgcggtctggagcggcggtcacgactggctggccgacgtgtacgacgtgaatattctgctgactcagatcacgaatctggtgttccacgagtccatccctgaatgggaacatctcgactttatctggggactggacgcgccgtggcgcctgtacaacaaaatcattaacctgatgagaaaataccaa

SEQ ID NO: 15639 - DNA, 1197 bp, synthetic construct
  misc_feature 1..1197: note = source = /note="Description of Artificial Sequence: Synthetic coding sequence"
  source 1..1197: mol_type = other DNA
atgaagatgcggttccttgggctggtggtgtgtctggtgctgtggaccctgcattccgaaggtagccgaggtaagttgacggcagtcgaccctgaaaccaacatgaatgtcagcgagatcattagctactggggcttccctagcgaagaatacctcgtggaaactgaggatggctacattttgtgtctcaaccgcattccacatgggagaaagaatcattcagataaaggaccgaagcccgtggtttttcttcaacatggactccttgccgattcatccaattgggtcactaacctggcaaactcgtcattgggattcattttggcagacgctgggtttgatgtctggatgggaaacagccgtgggaatacctggtcgcgaaagcacaagaccttgtcggtgtcccaagatgagttctgggcattttcgtacgatgagatggcgaaatatgatctgcctgcatcaattaactttatccttaacaagactggacaggaacaagtctattacgtgggccatagtcaaggaactactatcgggtttattgcatttagccagattcccgaacttgccaagcgaattaagatgtttttcgcactcggaccagtggcatccgtggcattctgtacgtcgccaatggcaaagttgggtagacttccggatcatctgattaaggacctgttcggagataaggaatttctgccccagtcggcgtttttgaaatggcttggtactcatgtgtgcacccacgtgattcttaaggaactgtgcggcaacctgtgttttcttctttgtggtttcaatgagcggaacctcaatatgagcagggtggatgtgtacacgacccactccccggctgggacttcggtccaaaacatgctccattggtcccaggccgtgaaatttcaaaagtttcaggcatttgactgggggtcaagcgccaagaactacttccactacaaccaatcgtaccctccaacctacaatgtcaaggacatgctggtgcctacggccgtgtggagcggcgggcacgattggcttgccgatgtgtacgatgtcaacattctcctgacccagatcactaaccttgtgtttcatgaatcgattccagaatgggaacacttggactttatctggggactggacgccccttggagactgtacaataagatcatcaacctcatgcgcaagtaccaa

SEQ ID NO: 15640 - DNA, 1197 bp, synthetic construct
  misc_feature 1..1197: note = source = /note="Description of Artificial Sequence: Synthetic coding sequence"
  source 1..1197: mol_type = other DNA
atgaagatgaggtttctcggcctcgtcgtatgtctcgtcctgtggaccctccattccgaggggtcgaggggcaagttaaccgcagtggaccctgagaccaacatgaatgtgtccgagattatctcctattggggcttccctagcgaagagtatctggtggaaacagaagacggttacattttgtgcctgaatagaattccccatggccggaaaaatcactcggacaaggggccaaagcctgtggtgtttctgcagcatggacttctcgccgattcctctaactgggttacaaatttggccaatagttctttgggttttattttggccgatgctggatttgatgtgtggatgggaaactcccgcggtaatacctggagccgtaagcataagaccctctccgtgtcccaggatgaattttgggcgttttcttacgatgagatggccaagtatgacctgcccgcgagcatcaattttatccttaacaagacgggccaggagcaggtctactacgtgggccactcccaaggcaccactattgggtttatcgccttctctcaaatcccagaactggcaaaacggataaagatgtttttcgctctaggacccgtcgcaagcgtcgccttctgtacaagccccatggccaaactggggcgcctcccagatcatctcatcaaagacttatttggtgataaggagttcctgccgcagagcgctttcttaaagtggctcggtacgcatgtgtgtacacacgtcatactcaaggagttatgtggaaacttgtgctttttactgtgcggctttaatgaacgaaacctaaatatgtccagggtcgatgtttacacaacacatagtcccgcgggcacatccgtgcagaacatgctgcactggagccaagctgtgaagtttcagaagtttcaggcgttcgactggggatccagcgcgaagaactacttccactacaaccagtcttacccccccacctataatgtgaaagacatgcttgtaccaacagccgtgtggagtggaggacatgattggcttgcagatgtgtacgacgttaatatcctgctcactcagataactaacctcgtattccatgaaagtatacctgagtgggaacaccttgacttcatatgggggctcgacgccccttggaggctgtacaacaagatcataaaccttatgaggaaataccag

SEQ ID NO: 15641 - DNA, 1197 bp, synthetic construct
  misc_feature 1..1197: note = source = /note="Description of Artificial Sequence: Synthetic coding sequence"
  source 1..1197: mol_type = other DNA
atgaagatgagattcctgggcctggttgtgtgcctcgtcctgtggactcttcatagcgaaggtagcagaggaaaacttactgcggtcgacccagagactaatatgaacgtgtcggagattatctcgtactggggttttccgtcagaagaatatctggtcgaaactgaggacggatacattctctgtctcaatcgcatccctcatggtcgcaagaaccactcagacaagggcccaaagccggtcgtgttcctgcagcatgggctgctcgccgatagctcaaactgggtgactaacctggccaactcgtcactcggattcatcctggctgatgcaggattcgatgtctggatgggcaacagccggggaaatacttggtcacgcaagcacaaaaccctgtcagtgtcgcaggacgagttctgggctttcagctacgatgaaatggccaagtacgatttgccagcctcaatcaatttcattctcaacaagactggccaggaacaagtgtattacgtcggacactcacagggaactaccatcggatttatcgcgttttcacagatcccggaacttgccaagcggatcaaaatgttcttcgctcttgggcccgttgcatcggtggcgttttgtacgtcacccatggcgaagctgggccggctgcccgatcatctgatcaaggacttgtttggcgacaaggagttcctgcctcaatccgctttcctcaagtggctcggtactcacgtgtgcacccacgtaatcctgaaggagctgtgcggaaatctctgttttctgctgtgtggattcaatgaaagaaacctcaatatgtccagggtggacgtgtacactacccactcgccagccggcacttcagtccagaacatgcttcactggtcccaggccgtgaagttccagaagttccaggcgttcgattggggttcttcggccaagaattacttccattacaaccagtcgtacccgccgacgtacaatgtgaaggacatgctggtccctaccgccgtgtggtcgggaggacacgattggctggctgacgtgtacgacgtgaatatcctgctcactcaaatcaccaacctggtgttccacgagtcaatcccagaatgggagcacctggatttcatctgggggctcgacgcgccttggaggctctacaacaagattatcaacctcatgagaaagtaccag

SEQ ID NO: 15642 - DNA, 1197 bp, synthetic construct
  misc_feature 1..1197: note = source = /note="Description of Artificial Sequence: Synthetic coding sequence"
  source 1..1197: mol_type = other DNA
atgaagatgcggttcctgggactcgtggtgtgcctggtgctttggaccctgcactcggaaggttcgagaggaaagctgaccgcggtggacccagagactaatatgaacgtgtcagagatcatcagctactgggggtttccgtccgaggagtacctggtggaaaccgaagatggatacatcctgtgcttgaatcggattccgcacgggcgcaagaatcacagcgataaggggccgaagccagtggttttcctgcagcatggactgctggcagactccagcaattgggtgacgaacctggcgaattcctccctgggattcattctcgcagacgcgggattcgacgtgtggatgggcaactcaagggggaatacctggtcgcgtaagcacaagacgctgtcagtgtctcaggatgaattctgggccttctcctacgacgagatggccaaatacgatctgccggcctcaatcaacttcattctcaacaagactggacaggagcaagtgtactacgtgggacatagccaagggaccaccatcgggttcatcgccttctcacagatccctgagctggccaagaggatcaagatgttctttgcactcggaccagtcgcatccgtggccttttgcacctcaccgatggccaagctgggacgcctgcctgaccatctcattaaggacctgttcggagacaaagagttcctcccacaaagcgcgtttcttaagtggctgggcacccatgtctgcacgcatgtgatcctgaaagagctgtgcggaaacctctgcttcctcctgtgcggcttcaacgagcggaacctcaatatgtccagagtggacgtttacactactcacagcccagcaggcaccagcgtgcagaatatgctccactggagccaagcggtgaaattccaaaagttccaagccttcgattggggctcgtccgccaagaattactttcattacaaccaaagctaccctccgacttacaacgtcaaggacatgctggtgccaaccgcggtctggtccggaggacacgactggctcgctgacgtctacgacgtcaacattctgctcacccagatcactaatctggtctttcacgaatcgatcccggaatgggaacacctggacttcatttggggcttggacgcgccatggaggctttacaacaagataatcaacctcatgcgcaagtaccag

SEQ ID NO: 15643 - DNA, 1197 bp, synthetic construct
  misc_feature 1..1197: note = source = /note="Description of Artificial Sequence: Synthetic coding sequence"
  source 1..1197: mol_type = other DNA
atgaagatgcggttcttgggcttagtggtgtgtctggttctgtggaccctgcactctgagggatcccggggcaagctcacggctgtcgatccagagaccaatatgaatgtttctgagatcatcagttattggggtttccctagcgaagaatatctggtggagacagaggacggttatatactctgcttgaacagaataccccacggacgcaagaaccactcagataagggtcctaaacctgtggtcttcctgcagcatggcttacttgccgactcctcaaattgggtaactaacttggccaattcttcccttggattcattctggccgatgccggattcgacgtctggatggggaattcacggggaaatacctggagcaggaagcacaagacgctgagtgtctcgcaggacgagttttgggcattttcatatgatgaaatggctaagtatgatctgcctgcttcaattaacttcattcttaacaaaaccggccaagaacaggtttactatgttggccactcacaggggacaaccattgggtttattgccttctctcaaatccccgaactggccaagcgcataaaaatgttttttgccttgggcccggtggccagcgttgctttctgcacttccccgatggccaaattaggacgtctgcctgaccatcttatcaaagaccttttcggcgacaaggagttcttgcctcaaagtgcttttctgaaatggctaggtacacacgtgtgtacccatgtgattctgaaagagctgtgtgggaacctatgtttcctactgtgtgggtttaacgaacgcaatctcaatatgtccagggtggacgtttataccactcatagccctgctggaacgtcggtgcagaatatgctgcactggtcacaggctgtcaagtttcaaaagttccaggccttcgattggggctcctcagctaaaaactatttccattataaccagagctaccctccaacatataacgtgaaagatatgctcgttcctaccgctgtatggtcaggcggccatgattggctagctgatgtttatgatgtcaacatactgctgacgcagattacgaacctggttttccatgaaagtattcccgagtgggaacacctcgatttcatatggggcttggacgccccatggcggctctataacaaaattatcaatttaatgcgaaaatatcag

SEQ ID NO: 15644 - DNA, 1197 bp, synthetic construct
  misc_feature 1..1197: note = source = /note="Description of Artificial Sequence: Synthetic coding sequence"
  source 1..1197: mol_type = other DNA
atgaagatgagattcctgggtctggtggtctgtctggtgctctggactctgcactcagaaggttcccgaggaaagctgactgcagtcgatcccgagactaacatgaacgtgtccgagatcatttcgtactggggtttcccttccgaagagtaccttgtggaaaccgaagatggatacatactttgtcttaacaggatccctcacggaaggaagaatcattcggataaaggccctaagccagtcgtctttctgcagcatggactgctggcagactcatcgaattgggtcaccaaccttgcaaattcctcccttggattcatactcgcagatgcagggtttgatgtgtggatgggcaactctaggggtaacacctggtcacggaagcataagaccctctcagtcagccaggatgagttctgggcattttcatacgatgagatggccaaatacgatcttcctgcctccataaactttatcctgaacaagactggacaggaacaggtttactatgtgggacattcacagggaacgactatcggcttcatcgcattctcacaaattccagaattggcaaagcgcattaagatgttctttgcactgggacccgtggcttccgtggccttttgtaccagcccgatggcaaagctcggtaggctgcctgatcacttgattaaggatctttttggtgataaagaatttcttccacaaagcgcattccttaagtggctcggtacccatgtctgcacccatgtgattcttaaggaactttgcggaaacctgtgttttctgctgtgcggtttcaatgaaagaaacctgaatatgagcagagtggatgtgtacaccacccacagcccagccggaactagcgtccagaatatgctgcattggtcccaagccgtcaagtttcagaagtttcaggccttcgactgggggtcgtcagcaaagaactatttccactacaatcagtcataccctccaacttacaacgtcaaggatatgctcgtgccaaccgcagtgtggtcgggaggacatgattggctggccgacgtctacgatgtcaacattcttctgacgcaaattactaaccttgtgtttcatgagtccatcccggagtgggaacatttggacttcatttggggactggatgcaccatggagactctacaacaagatcatcaacctcatgcgtaagtaccag

SEQ ID NO: 15645 - DNA, 1197 bp, synthetic construct
  misc_feature 1..1197: note = source = /note="Description of Artificial Sequence: Synthetic coding sequence"
  source 1..1197: mol_type = other DNA
atgaagatgcggtttctgggactggtggtgtgcctggtcctctggaccctccatagcgaaggctcccggggcaagctgactgccgtcgacccagagactaacatgaacgtgtcagaaatcatctcgtactggggattcccatccgaagagtacctcgtcgaaactgaggatggctacatcctgtgcctgaaccgaattccccatggccggaagaaccactccgacaaaggccccaagccggtcgtctttctccagcacggactcctggccgactctagcaactgggtcaccaaccttgcgaactcgtctcttggatttatcctcgcggatgcaggtttcgacgtgtggatgggaaacagccgggggaatacctggagcaggaagcataagactctgtcggtgtcacaagatgagttctgggccttcagctacgacgaaatggcaaaatacgatctgccagcttcaatcaatttcatcttgaataagaccgggcaggaacaggtctactacgtgggtcactcccagggcactaccattggattcattgccttcagccagatcccggagttggcgaagcggatcaagatgttcttcgccctgggtcctgtcgcttcggtcgcattttgtacctcgccgatggctaaactcggacggttgcctgaccacctgatcaaagacctctttggagacaaagagtttctgcctcaatccgctttcctgaagtggctggggacccatgtttgtacccacgtcattctgaaagaactgtgcggcaacctgtgcttcctcctgtgcggattcaacgagcgcaatctgaacatgtcacgcgtggacgtttacactacccattcaccagccggtacctctgtgcaaaacatgctgcattggtcccaggccgtgaaatttcagaagtttcaggccttcgactggggcagctcggcgaaaaactacttccactacaatcagtcgtacccgcctacctacaacgtgaaagatatgctggtgccaactgcagtctggtcgggcgggcatgactggctggctgacgtgtacgacgtgaatattctgcttacccagatcaccaacctcgtgttccacgagtcaatccccgagtgggaacatctcgatttcatctggggacttgacgccccgtggcgcctttacaataagattatcaacctgatgcgcaagtaccaa

SEQ ID NO: 15646 - DNA, 1197 bp, synthetic construct
  misc_feature 1..1197: note = source = /note="Description of Artificial Sequence: Synthetic coding sequence"
  source 1..1197: mol_type = other DNA
atgaagatgcgatttttggggctagtggtgtgtctggtattgtggacactccactctgaaggctccagaggaaaactgacagccgtggaccccgaaaccaatatgaacgtgagtgaaataattagttactggggtttcccatctgaggagtacctcgtggagacggaagatgggtatatcctgtgtctcaatcggattccccatggccgaaagaaccactccgataaaggacctaagccagtggtgtttctgcagcacggtctgctggctgattcttctaattgggtgaccaacttagccaactcatccctcggatttatccttgctgacgccggattcgacgtgtggatgggtaactccagagggaatacttggagtcgcaagcacaaaacactttctgtgtcccaggatgagttctgggcgttctcctatgatgagatggccaagtatgacctgcctgcctccatcaactttatactgaataagactggccaggagcaggtatattatgtcggacacagtcagggtactacaatagggttcatcgcctttagccaaataccagagctggctaagaggatcaaaatgtttttcgcccttggccctgtggcttccgtggcgttttgtacatctcctatggccaagttgggtcgactgccagaccacctgatcaaggacctgttcggggacaaagagtttcttccacaatcggctttcctaaaatggttggggacccacgtgtgtactcacgtgatcctgaaggaattgtgcggaaacctgtgcttcctgctgtgcggcttcaacgaaaggaacctcaatatgagcagagtcgacgtgtataccactcattctcccgccggtacctccgtacagaatatgctccactggagccaagccgtgaagttccagaagttccaggctttcgactggggctcctcagctaaaaattacttccactacaatcagagctatccccccacatataacgtgaaagacatgttggttcccacagctgtgtggtctggtggacacgattggctggctgacgtttacgacgtgaatatcctcctaacccagataaccaatctcgtattccacgaaagcatccctgagtgggaacacctcgacttcatctggggattagatgcaccttggcggctctataacaaaatcattaacctgatgagaaagtatcag

SEQ ID NO: 15647 - DNA, 1197 bp, synthetic construct
  misc_feature 1..1197: note = source = /note="Description of Artificial Sequence: Synthetic coding sequence"
  source 1..1197: mol_type = other DNA
atgaaaatgcggttccttggtctggtggtgtgtctcgtcctgtggactctccatagcgaaggatcgagaggtaagctgaccgccgtggatccagagactaatatgaacgtctcggagatcatatcatactggggctttccatcagaagaatacctggtggaaactgaagatggatacatcctgtgtcttaacaggatcccacatggtaggaaaaaccattcggacaagggtcccaagcctgtggtgtttcttcaacacggccttcttgcagactcctcaaattgggtgaccaacctggctaactcatcccttggattcatactcgcggatgcgggctttgacgtgtggatgggaaactcgcgcggaaatacctggtcgcgcaagcataaaactctgtcggtgtcgcaggacgagttctgggcttttagctacgatgagatggctaagtacgaccttcccgcctcaatcaactttatcctcaataagactggacaagagcaagtgtactacgtgggtcattcccagggtactaccatcgggtttatcgccttctcacagatccctgaactggcaaaaagaattaagatgttcttcgcgctcgggcctgtggcatccgtggcattttgtacctcccctatggcaaagctcggccggctcccggatcatctgattaaggatttgtttggagataaagaattcctccctcaatcagcctttctcaagtggcttggaacccatgtctgcacgcacgtgattctgaaagaactttgtgggaacctgtgttttttgctttgtggattcaacgagcggaaccttaacatgtcccgggtggatgtgtacaccactcactcccctgcagggacgtccgtgcagaacatgttgcactggtcacaagcagtgaagtttcaaaagtttcaagccttcgactggggttcaagcgcaaaaaactactttcactacaatcaatcctacccaccaacgtacaacgttaaggatatgcttgtgccaacggcggtgtggtcgggaggccatgattggcttgccgatgtgtacgatgtgaacattttgctgacccaaattactaacctggtttttcatgaatcgattcctgagtgggaacatcttgacttcatatggggtttggatgcaccctggcggttgtacaataagatcatcaacctgatgcgcaagtatcag

SEQ ID NO: 15648 - DNA, 1197 bp, synthetic construct
  misc_feature 1..1197: note = source = /note="Description of Artificial Sequence: Synthetic coding sequence"
  source 1..1197: mol_type = other DNA
atgaaaatgcggttcttgggtctagttgtatgtctcgtcttgtggacactgcactcggaagggtcaagaggaaaactgaccgctgtggaccctgaaacaaatatgaatgtttcggagattatctcctattggggctttccttccgaggagtacctagtggaaactgaggatggctacatcttatgtctgaatcgcattcctcacggaagaaaaaaccactcagacaagggccccaagccagtggtcttccttcagcacggactactggccgacagcagtaactgggtgactaacttggctaactcttcgctcggattcatcctcgcagatgcaggttttgatgtctggatgggcaactctagaggcaacacgtggtcacgcaaacacaaaacgctctctgttagccaggatgaattctgggcattttcttatgatgagatggcaaaatatgacctgcccgcgtcaataaactttattctgaacaaaacgggccaggagcaggtgtactatgtaggacactcccagggtacgacaataggcttcattgccttctctcagatccccgagcttgcaaaaagaattaagatgttttttgcactgggtccagtggcttctgtcgcattttgtacctcgcctatggccaaactcgggcgcttgcccgaccacttgattaaagatctcttcggtgacaaggaatttcttccgcagtccgctttcctaaaatggctcgggactcacgtgtgcactcatgtcatcctgaaagagctatgcgggaacctgtgtttcctgctctgtggttttaatgagcgaaatctcaatatgagcagagtcgatgtgtacaccactcattcccctgcggggacaagtgtacagaacatgttgcattggtcccaggccgtgaagtttcaaaagttccaggcgtttgattggggaagtagcgcaaagaactactttcactataatcagagctaccctcctacgtacaacgtcaaagacatgctagtgcccacagcagtttggtctggtggtcatgactggctagcagacgtgtatgatgtgaacatacttttgactcaaatcacgaacctggtctttcatgagagcatccccgaatgggaacatcttgatttcatttggggtctggatgcaccctggaggctctataacaagataataaatctgatgcgcaagtaccag

SEQ ID NO: 15649 - DNA, 1197 bp, synthetic construct
  misc_feature 1..1197: note = source = /note="Description of Artificial Sequence: Synthetic coding sequence"
  source 1..1197: mol_type = other DNA
atgaaaatgcgcttcctcggactcgtggtgtgcctggtgctttggactcttcactcggagggatcccgagggaagctcactgcggtggacccggagactaatatgaatgtctcggagatcatcagctattggggcttcccaagcgaagagtacctggtggaaaccgaggatgggtacatactctgcctgaaccgcatcccacatggaagaaagaaccactccgacaagggcccaaagcccgtagtgttcttgcagcacggactgctggctgacagctccaactgggttacgaatttggcgaactcgtccctgggattcattttggccgacgcgggcttcgacgtgtggatgggcaactcacgcgggaatacgtggtcacgcaaacacaagactctgtccgtctcccaggatgaattttgggcattctcctacgatgagatggcaaaatacgatctcccagcatcgataaacttcatcctgaataagactggtcaggagcaggtctactatgttggccactcccaaggtaccactataggctttattgcgttttcacagatcccggaactggccaagcggatcaagatgtttttcgctcttggaccggtggcctcggtggccttctgcacctcgccgatggccaagctggggagactgccggaccatctgatcaaagacctgttcggagacaaggaatttctgccgcagtccgctttcttgaaatggctgggcacgcatgtgtgcactcacgtgattctcaaggaactctgtggtaacctctgcttcttgctgtgcggcttcaatgaaaggaacctgaacatgtctcgcgtagatgtgtacaccacgcattcgcctgccggaacttcggtgcagaatatgcttcactggtcacaagcggtcaagttccaaaagttccaggcgttcgactggggatcgtcggcgaagaactatttccactacaaccaaagctacccgcccacctacaacgtcaaggatatgctcgtccctaccgctgtgtggagcggcggacacgattggctcgccgatgtgtacgacgtcaacatcctgctgacccaaatcactaaccttgtttttcatgaatcaatcccggaatgggagcatctcgactttatctggggactggacgccccttggcgcctgtacaacaaaatcatcaacctgatgcggaaataccaa

SEQ ID NO: 15650 - DNA, 1197 bp, synthetic construct
  misc_feature 1..1197: note = source = /note="Description of Artificial Sequence: Synthetic coding sequence"
  source 1..1197: mol_type = other DNA
atgaagatgaggtttttgggcctcgtcgtctgtctcgtgctgtggacccttcattctgaaggtagccgcggaaaactgaccgcagtcgatccggaaaccaacatgaacgtttcagaaatcatatcgtactggggattcccttccgaagaatacctggttgagactgaagatggctatattctttgccttaacagaatccctcacggtaggaaaaaccactccgataaaggccccaagcccgtggtgtttcttcaacacggacttcttgcagattcctcaaactgggtgactaatttggctaattcgtccctcgggtttattcttgcagatgcaggttttgacgtttggatgggaaactcgcgggggaacacctggtcgcgcaaacacaagactcttagcgtgtcgcaggatgaattctgggcattctcgtacgatgaaatggcaaaatacgatctgcctgcatccattaactttattctcaacaagaccggccaggagcaggtctactacgtgggccactcccaaggtaccactatcggatttatcgcattctcacaaattcccgaattggccaagcgcatcaagatgttttttgcacttggcccagtggcctcagtcgctttttgcacttcaccaatggcaaaactgggtcgcctgcctgatcatctgataaaggatctgtttggagataaagaattcctgcctcaatccgcctttcttaaatggctgggaacgcacgtctgcactcacgtgatacttaaggagctctgtggaaatctgtgctttctcctgtgcggattcaatgagcgcaatctcaatatgagccgagtcgacgtgtacaccacccactctccggcagggacctcggtccagaatatgctgcattggtcgcaggcagtgaaatttcagaagtttcaagccttcgattggggcagctcagcaaagaattacttccattacaaccagtcgtacccgcccacctacaatgtgaaggacatgcttgtgcctactgcagtgtggtccggaggacacgactggttggctgatgtgtacgatgtgaacattctcctgacccagattactaatctcgtctttcatgaatcgatcccagaatgggaacatctggacttcatatgggggctggacgcaccatggagactgtacaacaagatcatcaatctgatgcgtaagtaccaa

SEQ ID NO: 15651 - DNA, 1197 bp, synthetic construct
  misc_feature 1..1197: note = source = /note="Description of Artificial Sequence: Synthetic coding sequence"
  source 1..1197: mol_type = other DNA
atgaagatgcggtttctgggacttgtggtttgtctggtcctgtggacgttgcattcggaaggttcgagagggaaacttaccgccgtggatccagagacgaatatgaacgtctcagaaatcatttcgtactggggtttcccttccgaggaatacctggtggagactgaagatgggtacatcctgtgtctcaaccgcattccacatggacgtaagaaccattcggacaagggtcctaaaccagtggtgtttctgcaacacggcctccttgcagattcgtccaactgggtgactaacctggcaaactcctccctggggtttattcttgcagatgccggttttgacgtgtggatggggaactcacgtggaaatacctggtcccggaagcacaagaccctttcagtttcccaagatgagttttgggccttcagctacgatgaaatggcaaagtacgacctgcctgcctccattaacttcattcttaacaagaccggtcaagagcaggtgtactacgtcggccattcccaggggactaccatcggattcattgctttttctcaaatcccagagttggcaaaaaggattaagatgttttttgcacttggtcccgtggcaagcgtggctttttgtactagcccgatggcaaaacttggtcgcttgccagatcatctgattaaggacctctttggtgataaggaatttctgccacaatccgcatttctcaagtggttgggaactcatgtctgtacgcacgtcatcctgaaggaactttgtgggaacctgtgttttcttctctgtggctttaatgaaagaaaccttaacatgtccagggtggatgtgtatacgacgcatagccctgctggcacctcggtgcagaacatgcttcactggagccaggcagtgaagttccaaaagttccaggcatttgattggggatcaagcgcaaagaattacttccattacaatcaatcctacccgccaacctacaacgtgaaagatatgctggtccctaccgcggtgtggtcgggaggacacgattggttggcagatgtgtacgatgtgaacatcctgctgacccaaattaccaatctcgtctttcatgagagcatccccgaatgggagcatcttgacttcatttggggactggatgccccttggaggctttacaataagatcatcaacctgatgcgcaaataccaa

SEQ ID NO: 15652 - DNA, 1197 bp, synthetic construct
  misc_feature 1..1197: note = source = /note="Description of Artificial Sequence: Synthetic coding sequence"
  source 1..1197: mol_type = other DNA
atgaagatgcgcttccttgggttggtggtatgtctagtgctgtggaccttgcattccgagggctcgcgaggcaagctcacggccgtggaccccgagaccaatatgaacgtgagcgagatcatttcgtattggggatttcctagcgaagagtatcttgtggaaaccgaagacggctacatcctctgtctgaacaggatcccccatggaagaaagaaccacagtgacaagggacccaagcccgttgtgttcctgcaacatggtctgcttgccgacagcagcaactgggtcaccaatctggccaactcttctctcggttttattctggccgatgcaggctttgatgtttggatgggaaactcgaggggcaatacctggtcacgaaagcataagactctgtccgtctcgcaggacgagttctgggctttctcatatgacgagatggccaaatatgacttgcccgcgtctattaatttcatcctcaataaaaccggccaagagcaagtctattacgtgggccatagccagggcacgaccatagggttcatcgccttctcccagatccccgaactggcaaagcggattaagatgtttttcgcccttggccctgtcgccagcgtcgctttctgtacgagtccaatggcgaaactgggacggctacccgaccacctgatcaaagatttgttcggcgataaagagtttctaccccagtcagccttccttaaatggctcggtacgcacgtgtgcacgcacgtgatccttaaggaactgtgcggcaatttatgtttcctgctttgtgggttcaacgagagaaatctcaatatgagccgggtcgatgtgtacactacccacagccctgcaggaacaagcgtccagaacatgctgcattggagccaagcggtgaaattccagaaattccaggccttcgactggggcagcagtgctaagaactacttccactataatcagtcatacccacccacgtacaatgttaaggatatgctcgttcccaccgccgtgtggtctggcgggcatgactggctcgcagacgtgtacgacgtgaatattctgctgacccagattacaaacctggtttttcatgagagtattcccgagtgggagcatctggactttatttggggactcgatgccccttggagactatacaacaagattattaatctcatgaggaagtatcag

SEQ ID NO: 15653 - DNA, 1197 bp, synthetic construct
  misc_feature 1..1197: note = source = /note="Description of Artificial Sequence: Synthetic coding sequence"
  source 1..1197: mol_type = other DNA
atgaagatgcgttttctggggctggtggtctgtctcgtactttggacgttgcattcagaaggaagccgcggaaaactgactgcagtggatccagagactaacatgaatgtgagcgagatcatcagttattggggttttccatcggaagagtacttggtggagactgaagacggttacattctgtgcctgaatagaatccctcacggcaggaagaatcattcagacaaaggccctaaacctgtggtatttcttcaacacggattacttgcggactcctcaaattgggtgacaaatctggccaattcgtccttagggtttattctggcagatgcgggattcgacgtatggatgggaaactcacggggcaatacatggagtcggaaacacaaaaccctatccgtctcacaagacgagttttgggcattctcgtacgacgaaatggccaagtacgatctgcctgcatctattaactttatcctgaataagaccggacaggagcaggtgtattatgttgggcattcccaaggcaccactatagggtttatagcgttttcgcagatcccagaactggctaaacgcatcaagatgttttttgccctcggtcccgttgccagtgtggccttctgcacatctccaatggccaaactggggcgcctgcccgaccacctgattaaggacctctttggggataaagagttcctgccgcagagcgcctttttgaaatggctggggacacatgtatgtactcatgtgatacttaaagaactctgtggaaatctttgttttcttctctgtggcttcaacgagagaaacttgaacatgtcaagggttgatgtctatacaacccactcgccggctggcacttctgtgcagaatatgctgcattggtcccaggccgtgaaattccaaaagttccaggcatttgactggggttctagcgccaagaattactttcactataatcagtcatacccgcctacatataacgtgaaggacatgttagtcccgacagctgtgtggtccggcgggcacgattggttggccgatgtgtatgacgtcaacatcctcctcacccaaatcacgaatcttgtgttccacgagtccatccccgagtgggagcacctcgatttcatctgggggttggatgctccttggcggttgtacaacaaaatcattaatctgatgagaaagtaccag

SEQ ID NO: 15654 - DNA, 1197 bp, synthetic construct
  misc_feature 1..1197: note = source = /note="Description of Artificial Sequence: Synthetic coding sequence"
  source 1..1197: mol_type = other DNA
atgaaaatgcgctttctgggactggtcgtctgtctggtcctgtggacgctgcactctgagggcagccgcggaaaacttaccgccgtggacccagagacgaatatgaacgtcagcgaaattatcagttactggggttttccctccgaggaatacctcgttgagactgaagacggatatattttgtgcctcaatcgtatccctcacggacgaaaaaaccatagcgataaggggcctaaacctgtcgttttcctgcagcatggtctgcttgccgattcgagtaactgggttactaacctggcaaattccagcttaggatttatcctggcagacgccggttttgacgtctggatgggaaatagcagggggaatacctggagccgtaaacataaaacactgagcgtgtcgcaagatgagttttgggccttttcctatgatgaaatggcaaaatacgacctcccggcttccattaattttatcctgaataaaacgggacaggagcaagtttattatgtcggtcattcccaaggcactaccatcggctttatcgcttttagccagattccggaattggcaaaacgtatcaagatgttctttgcgctgggcccagtagcaagcgtcgcattctgtacctccccgatggccaagctgggccgcctgccggaccacctgatcaaggacctgtttggtgataaagagttcctgccacaatcagcttttctgaaatggctcggtacacacgtgtgtacccatgtgattctcaaagagctgtgcggtaacttgtgctttctgctgtgcggattcaatgagaggaacctgaacatgagccgggtggacgtttacacgacccatagcccagccggcacctctgttcaaaatatgctgcattggagccaggctgtgaagttccagaagttccaggcatttgactggggtagctctgccaagaattattttcactataatcagtcatatcctccaacctataatgtcaaagacatgctagttccgaccgcagtgtggagcggtggacacgattggctggcagacgtgtacgatgtcaacattctgttgacccagatcaccaacctggtgttccacgaaagtatcccggagtgggagcacttggatttcatctggggtctggacgccccgtggcggctgtacaataagattatcaacctaatgcggaagtatcag

SEQ ID NO: 15655 - DNA, 1197 bp, synthetic construct
  misc_feature 1..1197: note = source = /note="Description of Artificial Sequence: Synthetic coding sequence"
  source 1..1197: mol_type = other DNA
atgaaaatgcggttcttgggtctggtggtctgtctcgtactttggaccctccactccgagggttctagagggaagctgaccgcagttgatcctgaaacaaacatgaatgtgagcgagataataagttactggggctttcccagcgaagagtatctcgtggagactgaggacggctacatcctctgccttaaccgcatacctcacggccgaaagaatcacagcgataagggccctaaacctgtcgtctttttacaacatggattactggctgactcgagtaactgggtgactaatctcgctaatagctcactgggattcattctcgcagatgctggctttgatgtttggatgggcaacagtagaggcaatacatggtctcgcaaacacaagaccctctctgttagtcaagacgagttttgggcattctcatatgacgaaatggctaagtacgatttgccagcgagcattaactttattctgaataagacagggcaggagcaagtatactatgtcggtcacagccaaggcaccaccatcgggtttattgcgttttcacagatccctgagcttgccaagagaatcaagatgttctttgccctcggtccagtggcatccgtagctttctgcacgagtccaatggcaaagcttggcagactgccggaccacctcatcaaagatctgtttggcgataaagagttcctgccgcaatccgcttttctgaagtggttaggaactcatgtatgcacacatgtcattctcaaggaactatgcggtaatttatgctttctgttatgcgggtttaatgagagaaatttaaacatgtctcgcgtggatgtgtacacaacacacagtccagccggtactagcgtccaaaatatgctgcactggtctcaagccgtcaagtttcagaaatttcaggccttcgactgggggtcatctgctaagaattactttcactataaccagtcctatccacctacctacaacgttaaagatatgttggttccaaccgcggtgtggtcgggtgggcacgattggctggccgatgtgtacgacgtgaatatcctgctcacccaaatcaccaatctcgttttccacgagagcatcccagagtgggaacacttggatttcatttggggtctggatgcaccttggcggctgtataataagatcatcaatctcatgaggaaataccag

SEQ ID NO: 15656 - DNA, 1197 bp, synthetic construct
  misc_feature 1..1197: note = source = /note="Description of Artificial Sequence: Synthetic coding sequence"
  source 1..1197: mol_type = other DNA
atgaagatgcgcttcctgggattggtcgtctgcctcgtgctgtggaccctgcactccgaggggtcccgcggcaaactcactgcagtcgaccctgagacgaacatgaatgtgtccgagatcatctcgtactggggcttcccttcagaagaatacctggtggaaaccgaagatggctacatcctgtgcctcaaccggattccgcatggacgaaagaaccactcagataaaggaccgaagccagtggtgttcctgcagcacggacttctggctgacagctccaactgggtcaccaacctcgctaattcttcactgggattcatcttggcggacgcgggtttcgacgtctggatgggcaactcccgcggtaatacttggagcagaaagcataagacgctgtcagtgtcgcaagatgagttttgggctttctcgtacgatgaaatggcaaagtacgacctgccagcctcgatcaacttcatccttaacaagaccggacaagagcaggtttactacgtgggccactcgcaaggaaccaccattggattcattgcattctcgcagatcccagaacttgccaagagaattaaaatgtttttcgccctgggccccgtcgcctccgtggccttttgtactagccctatggcgaaactggggagactcccagaccacctgatcaaggacctgttcggagacaaggagttcctcccgcagtccgcgttcctgaaatggctcggaactcacgtgtgcactcatgtgatcctgaaggaactgtgcggaaacctctgttttctgctctgcgggttcaacgagaggaatctcaatatgagccgcgtcgatgtttacactacccacagcccagcaggtacttcagtgcagaacatgttgcattggtcgcaggccgtaaagttccaaaagtttcaagccttcgactggggcagctcagctaaaaattattttcattacaatcagagctacccgccgacctacaacgtgaaggacatgctggtgccgactgcggtgtggtccggaggacatgactggcttgccgatgtgtacgacgtcaacatcctgctgacccagatcaccaatctcgtgttccacgagtcgatcccggaatgggaacacttggattttatctgggggttggatgccccctggcggctctataacaaaatcatcaatctgatgcggaagtaccag

SEQ ID NO: 15657 - DNA, 1197 bp, synthetic construct
  misc_feature 1..1197: note = source = /note="Description of Artificial Sequence: Synthetic coding sequence"
  source 1..1197: mol_type = other DNA
atgaaaatgagatttctcggcctagtggtgtgcctcgtgttatggactcttcactcagaaggatcacgtgggaaattgaccgccgtggatccagagaccaatatgaatgtgtcagaaatcatcagctattggggatttcccagtgaagagtatttggtggaaaccgaggatggctacatcctctgcctcaaccgtatcccacatggacgcaaaaatcactccgataagggccctaaacctgtggtgttcctgcagcacggactgttagcagatagcagcaactgggtgaccaatctcgctaacagctctttgggttttatactcgcggacgctggcttcgacgtgtggatgggtaatagtaggggcaatacctggagtaggaagcacaagacactgtcggtgtcccaggacgagttctgggctttcagttacgatgaaatggctaagtacgatctgccagccagtattaactttatcttgaacaaaacaggccaagaacaggtgtactacgtgggccacagccaaggcacaaccatcggattcatcgctttctcccagatccctgagttggccaaaagaatcaagatgttcttcgctcttgggcccgtagcgagcgtggctttttgtacttctcctatggccaagctgggaaggttgcctgatcacctcatcaaggacttgtttggcgacaaggagttcctcccccaaagcgcctttctaaagtggctggggactcatgtatgcacacacgtcattctgaaagaactgtgcggcaacctctgcttcctgctatgcggcttcaacgagcggaacctgaatatgagtagagtcgatgtgtacaccactcactcgcccgcaggcacctcggtgcagaatatgttgcactggagccaggcagtcaaatttcaaaaattccaagccttcgactggggttccagcgctaaaaattactttcattacaaccagagctacccgcctacatacaatgtgaaggacatgttggttccaacggcggtctggtcagggggacatgattggttagctgatgtttacgatgtcaacatccttcttactcaaatcacgaacctggtgtttcatgagagtattcccgagtgggaacatttagactttatttggggacttgatgccccatggagactgtacaataagatcataaaccttatgcgtaaatatcag

SEQ ID NO: 15658 - DNA, 1197 bp, synthetic construct
  misc_feature 1..1197: note = source = /note="Description of Artificial Sequence: Synthetic coding sequence"
  source 1..1197: mol_type = other DNA
atgaagatgcgctttttggggctggtcgtttgtctggtcctgtggacgttgcatagcgaggggtctaggggaaagctgactgctgtcgaccccgaaacgaacatgaacgtgagcgagattatcagctactggggctttccatcagaggagtatctggttgagacagaggatggatacatcctgtgcctgaaccgaattccccacggccgcaagaatcactccgataaaggcccaaagcccgtagtgtttctgcagcacggtctgttggctgactcatctaactgggtcaccaacttggccaattcatccctgggcttcattctggccgacgctgggttcgacgtgtggatgggtaacagcaggggcaacacatggagccgcaagcataagaccctttctgtgagtcaggatgaattctgggcttttagctatgatgagatggcgaagtatgacctgcccgccagcatcaattttatcctgaataagactggacaggagcaggtttactatgtggggcattcccagggtaccacgatcggcttcattgcattttcccagatccccgaattggccaaacggattaagatgttctttgctcttgggccagttgcaagcgtggctttctgtacctcaccgatggccaaactcggccgcttgccagatcaccttattaaagacctgtttggcgataaggagttcttgcctcaatccgcctttctgaagtggctgggcacccatgtatgcacacacgtgattcttaaggagctttgtggcaatctctgtttcctgctgtgtggcttcaacgaaaggaatctgaatatgtcaagagtcgatgtgtacacaacgcatagccctgcgggtacctcagttcagaatatgctccactggtcccaggctgtaaaattccaaaaattccaggcgtttgactgggggagcagcgctaagaattacttccactacaatcagtcctacccacctacatataacgtcaaggatatgctcgtccctaccgccgtatggagtgggggacacgactggctggcagacgtatatgatgtgaatattcttctgactcaaataacaaacctggttttccacgaaagtattcccgaatgggagcacctggacttcatttggggcttggacgcaccctggagattgtataacaaaattataaacctcatgcgaaaataccag

SEQ ID NO: 15659 - DNA, 1197 bp, synthetic construct
  misc_feature 1..1197: note = source = /note="Description of Artificial Sequence: Synthetic coding sequence"
  source 1..1197: mol_type = other DNA
atgaagatgcggtttctgggtcttgtggtgtgtctggtactctggaccctgcattcagaggggagccgcgggaaattgaccgcagtagatccagaaacaaacatgaacgtgtccgaaattatatcatactggggcttcccttccgaggagtacctcgtcgaaacagaggacggctatatcctttgccttaataggattccgcatggacgcaagaatcacagtgataaagggccaaagccagttgtgtttttgcagcatggactactcgcagacagctctaactgggtgactaacctcgccaacagctctctgggctttatactcgctgacgccggtttcgacgtatggatgggcaattctagagggaatacatggtctcggaaacataaaactctatccgtaagtcaggatgagttctgggccttttcatacgacgagatggccaaatacgatctgcccgcaagtataaattttatactaaacaagacaggccaggagcaggtatactatgtgggtcacagtcagggtactacgatcgggttcatcgccttttcacaaattcctgaactcgccaagagaatcaagatgttttttgcacttggtccggtggccagcgtggccttctgcacaagtcccatggccaagttgggaagactgcccgatcatctcattaaagacctgttcggcgataaagagttcttgccccagtctgcctttctgaaatggctgggaacacatgtatgcacacatgtaatcctgaaggagttatgcggcaatctctgttttcttctttgtggctttaacgagagaaacctgaatatgtctagggtcgacgtgtatacaacccactcccctgcaggtacttctgtgcagaacatgctccattggtcacaagcggttaagttccagaagttccaggcttttgactgggggtcaagcgcaaaaaactactttcactataaccaaagttaccctccgacctacaacgtgaaagacatgttggtgcctaccgctgtatggtccggcggccatgactggctggccgacgtttatgatgttaatatcctactcactcagatcacaaatcttgtgttccacgagtccatcccggagtgggagcatctcgacttcatctggggattggatgccccctggagactgtataacaaaatcattaatctaatgcgtaagtaccaa

SEQ ID NO: 15660 - DNA, 1197 bp, synthetic construct
  misc_feature 1..1197: note = source = /note="Description of Artificial Sequence: Synthetic coding sequence"
  source 1..1197: mol_type = other DNA
atgaaaatgagatttcttgggcttgttgtgtgtctagtgctgtggactctgcactctgagggcagccgcggcaaattgaccgcagtggaccctgagacgaacatgaacgtgagcgagatcattagctactggggcttcccaagcgaggagtacctggttgaaactgaggatggatacatcttgtgccttaacagaattccccatggccggaagaaccatagtgataagggacccaaacctgtggttttcctgcagcacggcctattagccgattctagcaactgggtgactaatttagccaatagttctctgggcttcatcctcgccgatgccggcttcgatgtttggatggggaacagcaggggaaacacatggtctcgtaagcacaaaactttgtccgtgagtcaggacgaattttgggccttttcctatgatgagatggctaaatatgacctgccagccagcataaactttatcctaaacaagaccggccaggagcaggtctactatgttggacacagtcaaggcacgacgattggatttatcgctttcagccagatcccggagctagcaaagcggatcaagatgttttttgccctggggcccgtagcctcagtagcattctgtacctcaccaatggccaaactgggacggctcccagaccatttaatcaaggacctgttcggggacaaggaatttcttcctcagtcggcatttttgaaatggcttggaactcacgtgtgcacacacgtgattcttaaggagctctgtggcaatttgtgcttcctgctgtgcggatttaacgagagaaacctgaatatgtcgagagtggatgtgtatacaactcattcccccgccggaacaagtgtgcaaaatatgctgcactggtcacaggcagtcaagtttcagaaattccaggcttttgattggggatcttccgcaaagaattacttccattacaatcagagttacccaccgacttataacgtaaaagacatgctggtcccgacagccgtctggtccggcggtcacgattggctggccgatgtgtacgacgtgaacatacttctcacacaaattacaaatttggtgtttcacgagtcaatcccggaatgggagcacttagatttcatctggggattagacgcaccgtggcgactctacaataaaattatcaacctgatgagaaagtatcaa

SEQ ID NO: 15661 - DNA, 1197 bp, synthetic construct
  misc_feature 1..1197: note = source = /note="Description of Artificial Sequence: Synthetic coding sequence"
  source 1..1197: mol_type = other DNA
atgaaaatgaggttcctcggtctcgtcgtatgcctagttttgtggacccttcactccgaaggaagtagaggtaaactgactgcggtggatccagagaccaacatgaatgtctcagagattatctcctactgggggtttccctctgaggagtacctcgttgagaccgaagatggttatatcctatgtctcaaccgtatccctcatggaagaaagaatcatagtgataaagggcctaagccagtggtgttcttacaacatggattgcttgccgactcttccaactgggttaccaatttagcaaactcatcccttggatttatactggcagatgccggctttgatgtgtggatgggtaactctagaggcaacacgtggtctagaaagcataagacactgtctgtgtcacaagatgaattttgggcattttcatacgacgaaatggcaaagtatgatttgccagctagcatcaatttcatattaaacaaaaccgggcaagagcaagtctattacgtcggacattcccaagggacaacaatcggattcattgctttttcacaaattcccgaattggcaaagcggatcaagatgtttttcgcattaggtccagttgcttcggtcgctttctgcacaagcccgatggcgaaattggggaggctgcctgaccacttgatcaaagatctcttcggtgataaagagttcttgcctcagtctgccttcttaaaatggttgggaacacacgtttgcactcacgtcattcttaaagagttgtgtgggaatttgtgctttctgttatgtggctttaacgagcgtaacttaaatatgtctagagtggacgtttatacaacacattctccagctggtacgtctgttcagaatatgttgcactggtcacaagctgttaaattccaaaaatttcaagcattcgattggggaagttctgcaaagaactattttcattataatcagtcatatcccccaacctataacgtaaaagatatgcttgtccctaccgcggtttggagtggggggcatgattggttggctgatgtgtatgatgttaacatacttttgactcaaataacaaatctggtgtttcacgagtcgattcctgagtgggaacatttggattttatttggggactggatgcaccatggcgattatacaacaaaatcatcaaccttatgaggaagtatcaa

SEQ ID NO: 15662 - DNA, 1197 bp, synthetic construct
  misc_feature 1..1197: note = source = /note="Description of Artificial Sequence: Synthetic coding sequence"
  source 1..1197: mol_type = other DNA
atgaaaatgcggttcctcgggctggtcgtgtgcctggtcctgtggaccctgcactcggagggatcgcggggaaagctgaccgctgtggatccggagactaatatgaacgtgtcggaaatcatttcatactggggattcccctcggaggaatatctggtggagactgaagatggctacatcctgtgtctcaatcggattccacatggacggaaaaaccactcggataagggacctaaaccggtggtgtttctgcagcatgggctcctggcagacagctccaactgggtcactaacctcgcaaattcaagcctcggattcatcctcgccgacgccggcttcgacgtctggatgggtaattcaagaggcaatacttggtcccggaaacacaaaacgctgtcggtttcgcaggacgaattctgggccttcagttacgatgaaatggcaaaatacgatctgccagcgtctatcaacttcattctgaacaagaccggacaggagcaagtgtactatgtggggcattcgcagggaactaccatcggatttatcgcattcagccagatccccgaacttgcgaaacgcatcaagatgttctttgccctgggtccggtggccagcgtggcgttctgtacctccccgatggccaagctgggacgacttccggatcatctgattaaagacctgttcggcgacaaggagttcctgccgcagagcgccttcttgaagtggctgggaactcatgtgtgcactcatgtgatcctcaaagaactctgcggaaatctttgcttccttctgtgcggctttaatgagcggaacctgaatatgtcgcgcgtggatgtgtacaccactcattcccctgccggcacttcggtccagaacatgttgcactggtcgcaggcagtgaagtttcaaaagtttcaagccttcgattggggatcgtctgctaagaattactttcactacaaccaatcttacccgcctacctacaatgtgaaggacatgctcgtccctacggcggtgtggagcggaggtcatgactggctggccgacgtgtatgacgtcaatattctgctgacccaaatcaccaatctcgtctttcacgaatcaatcccggagtgggaacatctggacttcatctggggccttgacgcaccttggcgcctctacaacaagatcatcaatttgatgcggaaataccag

SEQ ID NO: 15663 - DNA, 1197 bp, synthetic construct
  misc_feature 1..1197: note = source = /note="Description of Artificial Sequence: Synthetic coding sequence"
  source 1..1197: mol_type = other DNA
atgaaaatgcgcttcttgggactggtcgtgtgcctggtgctgtggactctgcacagcgagggttcgcgggggaaattgaccgcagtcgaccctgagacgaatatgaatgtgtccgagatcattagctactgggggttcccgtcggaagaataccttgtcgaaaccgaggacggatatatcctgtgcctgaatcggatccctcacggaagaaagaaccattcagataagggtccgaaacccgtggtgttcctccagcacggcttgcttgcagacagctcgaactgggtaactaatttggccaactcctccctcggcttcatcttggcggacgcaggcttcgacgtttggatggggaattcgaggggaaacacctggtcacgcaagcataagaccctgtctgtcagccaagacgagttttgggccttctcttacgatgaaatggcaaaatacgatctgccggcctcgatcaatttcatacttaacaagaccggccaggaacaggtctattacgttggacactcgcaaggaacgaccatcggattcattgcgttctcacagatccctgaactcgcaaagaggatcaaaatgttctttgccttgggaccggtggcatcggtggccttctgcacgtcaccgatggctaagctgggaaggcttccagaccacctcattaaggatctttttggagataaggagttcctgccacagtcagcatttttgaagtggttggggactcacgtttgcacccacgtcattctgaaagagctgtgtggaaatctgtgttttctcctctgcggcttcaacgagcgcaacctcaatatgtcaagagtggacgtgtacacgacccattctcccgccggaactagtgtccaaaacatgctgcattggtcgcaagcagtgaagttccaaaagttccaggccttcgattggggatcgtctgccaagaattactttcactacaaccagtcctatcccccaacttacaacgtgaaggacatgctcgtccctaccgctgtgtggagcggcggtcatgattggttggcggacgtatacgacgtgaacatcctgctcactcaaatcaccaatctggtgtttcacgaatccatcccagaatgggaacatctcgacttcatctgggggctcgacgcgccgtggcggctgtacaacaagatcattaacctgatgcgaaaataccag

SEQ ID NO: 15664 - DNA, 1197 bp, synthetic construct
  misc_feature 1..1197: note = source = /note="Description of Artificial Sequence: Synthetic coding sequence"
  source 1..1197: mol_type = other DNA
atgaagatgagatttttgggactggtggtttgcctggtcctctggaccttacactccgagggaagcagaggaaaattgacggctgtcgaccccgagacaaacatgaatgtcagcgagataatttcctattgggggtttccttcggaggagtacttggtcgagacagaagatggatacatcttgtgcctgaaccggatcccacacggacgtaaaaaccactctgataaaggccctaagccagtggtcttcctgcagcatggcctgttggctgactcttctaactgggtgactaatctggccaatagctcattggggtttattctggccgacgccggcttcgacgtgtggatgggcaactctagggggaacacatggagcaggaaacacaagacactcagtgtaagccaggacgaattctgggccttttcctatgacgaaatggcaaagtatgacctgccggcttccatcaatttcatcttgaacaagacaggacaggagcaggtctactacgtgggccacagccaggggactaccatcggcttcatagcattcagccagattcctgaactggcaaagcgaataaagatgttttttgcactgggcccggttgcctctgttgcgttctgtacatctccgatggcaaaactgggaaggctcccggaccacctcatcaaggatctgttcggagacaaggagtttctgccccaaagcgccttccttaagtggttgggcacccatgtctgcacacatgtgatcttaaaggaactgtgtggtaatctctgctttctcctgtgtggctttaatgagaggaatctgaacatgtccagagtggatgtatacacaacccattctcccgccggaaccagcgttcagaacatgctacactggagccaggccgttaagtttcagaaattccaggcttttgactggggttcgtctgccaaaaattattttcactacaatcagtcctatccccccacctacaacgtgaaggatatgctcgttccaaccgctgtgtggtccggaggacatgattggcttgcggacgtatacgatgttaatatactgttgacgcaaataacaaatcttgtgttccatgagagcatccccgagtgggaacacctcgactttatctgggggctggatgcaccctggcgattgtacaacaaaattatcaatctcatgagaaaataccag

SEQ ID NO: 15665 - DNA, 1197 bp, synthetic construct
  misc_feature 1..1197: note = source = /note="Description of Artificial Sequence: Synthetic coding sequence"
  source 1..1197: mol_type = other DNA
atgaaaatgagattcctgggcctggtcgtatgtctcgtcctgtggacgctgcactcagaaggcagtcgcggaaagcttacagcagtagatcccgaaacgaatatgaacgtttccgagataattagttactggggcttcccatcagaagagtatcttgtagagacagaggacggttatattttgtgcctcaaccgcattccccatgggcggaaaaatcactctgataagggccccaagccagtggtgtttctgcagcatggtctgctggcagacagttcaaattgggtgaccaatcttgccaacagcagcctggggtttattctggctgacgcggggtttgacgtgtggatggggaacagtcgggggaacacctggtcaagaaagcataagactctctcagtcagtcaggacgaattctgggcttttagttatgacgaaatggctaaatacgatctgcccgcctctattaacttcattctgaataagacaggccaggagcaggtttactatgtcgggcattcccaggggacaacaatcggatttatcgcctttagtcagatcccagaactcgcaaagcgcattaagatgttttttgccttaggacctgtcgcttccgttgccttttgcacgagccctatggcgaaactgggtcgcctccccgatcacctgatcaaggatctgttcggagataaagaatttcttccacagagcgctttcctaaaatggctgggcacacacgtgtgtacccatgtgatactcaaagagctctgtgggaatttgtgttttcttctgtgcggcttcaacgagcgaaacctcaatatgtctcgagtggacgtctatacaactcattcacccgccggcacctccgtgcagaatatgctgcactggtctcaggccgtgaagttccagaagtttcaggctttcgactgggggagtagtgctaaaaattattttcactataaccaaagctatcctcctacatataatgtgaaagacatgctggttccaactgctgtctggtctggtggccatgactggctggctgacgtgtatgatgtgaatattcttctcactcagataacgaatctcgtgttccacgagagtatccctgaatgggaacatctagattttatttggggactcgacgccccatggcggctctacaacaagattattaatctgatgcggaagtatcag

SEQ ID NO: 15666 - DNA, 1197 bp, synthetic construct
  misc_feature 1..1197: note = source = /note="Description of Artificial Sequence: Synthetic coding sequence"
  source 1..1197: mol_type = other DNA
atgaaaatgcgctttcttggattggttgtgtgcctggtcctctggactctgcactcggaagggtccaggggtaagctgactgcggttgatcctgagacgaacatgaacgtgagcgaaatcatctcctactggggcttcccctcggaagagtatctggtcgaaaccgaagatggatacattctctgtctgaaccggatacctcatggacgcaaaaaccattctgacaaaggcccgaagccggttgttttcttgcagcatggcctcctggctgattcatccaactgggtgaccaacctcgctaattcgagtctgggatttatcctggccgacgcggggttcgatgtctggatggggaattcgcgcggcaacacgtggtcacggaagcacaaaaccttgtcagtgagccaggacgagttctgggccttctcttatgacgaaatggctaaatacgatcttcctgcttcaatcaatttcatccttaacaagaccggacaggagcaggtgtactacgtcggacatagccaaggtaccaccatcggttttatcgccttcagccagatccctgaactggcgaagagaatcaagatgttcttcgcactgggaccggtggccagcgtggccttctgcacttccccgatggcgaaactcggccgcctgccggaccacctcatcaaggacctgttcggagacaaggagtttcttccacagtccgcttttctgaagtggcttggcactcacgtgtgcacccatgtgattctcaaggagctctgcggaaacctctgcttcttgctctgtgggtttaacgaaagaaatctgaatatgtcccgagtcgacgtgtacactacccactcgccagcaggaacctctgtgcaaaacatgttgcattggtcgcaagcagtgaagttccaaaagtttcaagcattcgactggggctcatccgcaaagaactacttccactacaaccagtcgtacccaccgacttacaacgttaaagacatgctggtgccaaccgcggtatggtcgggtgggcacgattggctcgccgatgtctacgatgtgaacattctgcttactcagataaccaatctcgtgtttcacgaatctatcccagagtgggagcacttggacttcatttggggcctcgacgccccatggagactttacaacaagatcatcaatcttatgcggaagtaccag

SEQ ID NO: 15667 - DNA, 1197 bp, synthetic construct
  misc_feature 1..1197: note = source = /note="Description of Artificial Sequence: Synthetic coding sequence"
  source 1..1197: mol_type = other DNA
atgaagatgcgtttcctgggcctggttgtgtgtctggtcctctggaccctccattcagaaggctcccgtggcaaattgactgccgtggaccctgaaaccaatatgaacgtgtctgagatcatctcctactggggattccccagcgaggaatacctcgtggaaacagaggatggttacatcctgtgtctcaaccgcattccccacggacgtaagaaccacagtgataagggaccaaaaccagtagtgtttctgcagcacggactgctggcagactccagcaactgggttaccaacctcgcaaattcatctctgggattcatcctggctgacgcaggcttcgatgtctggatgggcaactccaggggcaacacttggagtcgtaagcataaaactctgtctgtgtcacaggacgagttctgggctttttcttacgacgagatggctaagtatgacctccctgcatccattaacttcatcctgaataagactggccaggaacaagtctattatgtaggacatagtcagggcactaccatcggtttcatcgccttctctcagatcccagagcttgctaagagaatcaagatgttcttcgctctcggtcctgtcgccagcgtggctttctgcacaagccccatggcaaagctgggacgcctgcctgaccacttgatcaaggatctctttggagataaggagtttcttccacagtccgcctttcttaagtggctgggtactcacgtatgcacacatgtcattctcaaggagctctgcggaaatctctgtttcctgctgtgtggattcaacgagaggaacctgaatatgagcagggttgatgtgtacaccactcatagtccagccggcacctctgtgcaaaatatgttgcattggtcacaggctgtcaagttccagaaattccaggcctttgattggggctccagtgccaagaattacttccactacaaccaatcttatccaccaacttacaatgtcaaggatatgttggtacctacagcagtgtggtcaggtggtcatgattggctcgccgatgtctacgatgtgaacatcctcctgactcagataaccaacctggtcttccacgaatccataccagagtgggagcacctggattttatttggggcctggatgccccttggagactttataataagatcattaatcttatgcgcaagtaccaa

SEQ ID NO: 15668 - DNA, 1197 bp, synthetic construct
  misc_feature 1..1197: note = source = /note="Description of Artificial Sequence: Synthetic coding sequence"
  source 1..1197: mol_type = other DNA
atgaaaatgagatttctgggactcgtggtttgcctagttctctggacactgcatagtgaggggtcaagaggaaagctgacggccgtggaccccgaaactaacatgaacgtgtccgaaatcatctcttactggggcttcccaagcgaggagtatctagtggagacagaagacgggtacatcttgtgtctaaatcgtatcccgcatggacgaaaaaaccactccgataagggccccaaacctgtggtgtttctacagcacggtctgttagccgattcctccaactgggtgaccaacctcgcaaactcttccctcggcttcattctggccgatgccggctttgacgtgtggatggggaattcccggggaaacacttggagtagaaagcacaagactctgtccgtatcccaagatgaattttgggccttttcttacgatgaaatggcaaagtatgatcttcccgcctcaatcaatttcatactgaacaagaccggccaggagcaggtgtattatgtaggccacagtcaaggcacaacgatagggttcattgccttttctcagatccccgaactggccaaaagaatcaagatgttctttgccttgggacccgtggccagcgtagctttctgcacttctccgatggcaaagttagggcgcctccccgaccacctgatcaaagatctgttcggcgacaaagagttccttccacagtccgcttttctgaagtggttgggcacacacgtgtgtacacacgtcatcctgaaagagctgtgcgggaacctgtgtttcctcctgtgtggtttcaatgagaggaatctgaatatgtctcgagtggacgtgtacaccacccactcacctgctgggacatccgtgcaaaacatgcttcactggagtcaggcggtgaagtttcagaaattccaagcgttcgattgggggtctagtgccaaaaattactttcactacaatcagtcatatcctcctacatataatgttaaagatatgctagtaccaaccgccgtgtggtcagggggccacgattggcttgccgatgtgtatgacgtgaacattttgttgactcaaattacaaacttggtgttccatgagtctatacccgaatgggagcacctggatttcatctggggtttagatgccccgtggagactgtataacaagatcattaatctgatgagaaaataccag

SEQ ID NO: 15669 - DNA, 1197 bp, synthetic construct
  misc_feature 1..1197: note = source = /note="Description of Artificial Sequence: Synthetic coding sequence"
  source 1..1197: mol_type = other DNA
atgaagatgagatttctgggactggtggtttgcctcgtgttgtggaccctgcattccgagggatcgagggggaagctcaccgcggtggatccggaaaccaacatgaatgtgtcagagatcatctcatactgggggttcccttcggaagagtatctggtggaaactgaggacggctacatcctctgcctgaaccggatccctcatggacggaagaatcattccgataagggaccaaaaccggtggtgttcctgcagcacggcctcctggcggattcctccaattgggtgaccaacctcgccaacagcagcctcggattcatcctggcagacgcgggattcgacgtctggatgggtaacagccggggaaacacctggtcccgcaaacacaaaactttgtcggtgtcgcaggacgaattctgggctttctcatatgatgagatggccaaatacgacctgccggcctccatcaatttcattctgaacaaaaccggacaggaacaggtgtactacgtggggcactcacagggaactactatcggattcattgccttctcccagatccccgagctggcgaagcggatcaaaatgttcttcgcccttggaccagtggcctcagtcgccttctgtaccagccccatggcaaagttggggagactgccagatcatctgatcaaagaccttttcggcgacaaggagtttctgccccaatcggccttcctcaagtggctggggacccatgtgtgcacccacgtgatcctgaaggagctgtgcgggaacctgtgtttcctgctgtgcggctttaatgaaaggaacctgaatatgagccgcgtcgatgtctacactactcactccccggcggggacctctgtgcagaatatgctgcactggtcacaagccgtcaagtttcaaaagttccaggcttttgactggggatcctcggcgaagaactacttccattacaatcagtcctacccacctacttataacgtgaaagacatgctcgtcccgactgccgtgtggtccggagggcatgactggctggcagacgtctacgatgtgaacatcttgctgacccaaatcactaacctggtgttccatgaatcaatcccggaatgggaacacctggacttcatctggggactcgacgccccttggcgcctctacaacaagatcattaatctgatgaggaaataccag

SEQ ID NO: 15670 - DNA, 1197 bp, synthetic construct
  misc_feature 1..1197: note = source = /note="Description of Artificial Sequence: Synthetic coding sequence"
  source 1..1197: mol_type = other DNA
atgaaaatgcgtttccttggattggtggtctgcctggtgctgtggacgctgcactcggagggtagcaggggaaagctcaccgccgtggatccagaaactaatatgaacgtcagcgagattatctcatactgggggtttccgtcagaggaatatctcgtggagactgaagatggatacattctttgcctgaatcgtatcccgcatggtcgcaaaaatcactcggacaagggacccaagccagtggtgtttcttcagcatggactccttgcagattcgtcgaattgggtcacgaacctcgcaaattcctcgctgggtttcattctggcagatgcaggattcgatgtgtggatgggcaacagccgagggaacacttggtccagaaaacataagactctctccgtgagccaggatgaattttgggcatttagctacgatgaaatggcgaagtacgatctcccagcctcgatcaactttattctgaataagactggacaagaacaggtgtactacgtgggtcattcacaagggaccacgatcggtttcatcgccttttcgcagatcccagagctggcaaagagaataaagatgtttttcgcgcttggacctgtcgcgtccgtggctttctgcacgtcgcctatggctaagctgggtcggctgccagatcatcttatcaaagatttgtttggagataaggaatttcttccgcaatccgccttcctgaagtggcttggcacgcatgtttgtactcatgtgattctgaaagagctgtgtgggaatctctgttttctgctgtgtggatttaacgagagaaatctcaacatgtcaagggttgatgtctacaccactcactcaccagcaggaacctccgtccaaaacatgctgcactggagccaggccgtcaagtttcaaaagtttcaggcatttgattggggttcgagcgcaaagaactactttcactacaaccagtcgtaccctccaacttataacgtgaaggacatgctcgttcctactgcagtctggtcgggtggtcatgactggctcgcggacgtgtacgatgtgaacatcctccttacgcaaatcaccaacctggtgtttcacgaaagcattccagagtgggaacacctggatttcatatgggggctggatgcgccctggaggctgtacaacaagattatcaaccttatgcgaaagtaccaa

SEQ ID NO: 15671 - DNA, 1197 bp, synthetic construct
  misc_feature 1..1197: note = source = /note="Description of Artificial Sequence: Synthetic coding sequence"
  source 1..1197: mol_type = other DNA
atgaagatgcgcttcttgggcctggtggtgtgtctggtgctgtggactctccactccgagggatcgcggggcaagctgactgcggtggatcccgagactaacatgaacgtcagtgagatcatcagctactggggtttcccgtcagaagagtacctggtggaaactgaagacggatacatcctctgcttgaacaggatcccgcacggcagaaagaaccacagcgataagggcccgaagcctgtggtgttcctgcaacacggactcctggcggattcttccaactgggtgaccaatctggccaattcctcgctgggttttattctggccgacgccggctttgatgtgtggatgggcaattcacgcggaaacacttggtcacgcaaacacaagaccctgtccgtgagccaggatgaattctgggctttctcgtatgacgaaatggcaaaatacgacctgccggctagcatcaatttcatcctgaacaaaaccggacaggaacaagtgtactatgtcggacattctcaggggaccactatcggatttatcgcgtttagccagatacccgagcttgctaagcgcatcaagatgttcttcgccctgggccctgtggcctccgttgcattctgcacctcgccaatggccaagctcggaaggttgcccgatcatctcatcaaggatctgtttggcgataaggaattcctcccacaatcggcattcctgaaatggctggggacccacgtgtgtacccacgtgattctgaaggaactttgcggaaacctctgtttcttgctttgcggctttaacgaaagaaatctgaacatgtcccgggtggacgtgtacactacgcactcccctgcaggaacctctgtgcagaatatgctgcattggtcgcaggccgtgaagtttcaaaagttccaagcgttcgattggggctcatcggccaagaattacttccattacaatcaatcctaccccccgacctacaatgtgaaggatatgcttgtgcctacggcggtgtggtccggaggacatgattggctggcagatgtctacgatgtcaacattctcctcacccagatcaccaacctcgtgttccacgaatcgatccctgaatgggagcatctggatttcatctggggactcgatgccccgtggcgcctgtacaataagatcatcaatctcatgcgcaagtaccaa

SEQ ID NO: 15672 - DNA, 1197 bp, synthetic construct
  misc_feature 1..1197: note = source = /note="Description of Artificial Sequence: Synthetic coding sequence"
  source 1..1197: mol_type = other DNA
atgaaaatgcgctttctcggcctggtggtctgtctcgtgctgtggactttgcactcagagggctcgagggggaagctcactgcagtcgatccagaaaccaacatgaacgtgtcagaaatcatcagctactggggcttcccgtcggaggagtatctggtggaaacggaggacggatacatcctctgcctcaaccgtatcccacacggacggaagaatcactcggacaaaggaccgaaaccggtggtgttcctgcaacatggcctcctggccgactcttcaaactgggtgaccaatctggcaaatagcagcctgggtttcatcctggcggatgcggggttcgatgtttggatgggtaacagccggggtaatacctggtcacggaagcataagactttgtccgtgtcgcaggatgagttctgggctttcagctacgacgaaatggccaagtacgatctgccggccagcatcaactttattcttaacaagactggacaggagcaggtctactacgtgggacactcccagggaaccactatcggatttatcgccttttcgcaaatcccggaattggcaaagcgcatcaagatgttttttgcccttggccctgtggcgtccgtggcgttttgcacttctccgatggccaagctcgggagactgccggatcatttgatcaaagacctgttcggggataaagaattcctcccacagtcggccttcctgaagtggctcggtactcacgtgtgcactcacgtgatcttgaaggaactctgcggaaacctgtgcttcctcctctgcgggttcaacgaaaggaacctcaatatgagcagagtggatgtctacactacccattccccggcgggaacttccgttcagaacatgctgcactggtcacaggcggtgaagttccagaagttccaggcctttgattggggctcctccgccaagaactacttccactacaatcaatcgtacccaccaacttacaacgtaaaggacatgctggtcccgacggctgtgtggtcaggaggacatgattggctggcagatgtctacgatgtcaacattctccttacgcaaatcactaacctcgtctttcacgaatccatccctgaatgggagcacctggatttcatctggggtcttgacgccccatggcggctctataacaaaatcatcaacctcatgaggaagtatcag

SEQ ID NO: 15673 - DNA, 1197 bp, synthetic construct
  misc_feature 1..1197: note = source = /note="Description of Artificial Sequence: Synthetic coding sequence"
  source 1..1197: mol_type = other DNA
atgaagatgcgcttcctgggactggtcgtctgccttgtgctctggactctgcacagcgagggaagcaggggtaagctgaccgccgtggacccagagactaatatgaatgtgtcggagatcatctcctattggggcttcccaagcgaggaatacctggtggaaaccgaggacggctatatcctctgcctgaaccgtatcccacacgggcgcaaaaaccactcggacaagggcccgaagccggttgtgtttctccagcacggactcctcgccgacagctcgaactgggtgaccaacctggccaactcctcccttgggttcatcctggccgacgcgggattcgatgtgtggatgggaaactcccggggaaacacctggtcgcgcaagcataaaaccctgtcggtgtcgcaggatgaattctgggcgttcagttacgacgagatggcaaagtacgatttgccggcgtcgatcaacttcatcctgaacaaaacgggtcaagagcaggtgtactatgtgggacattcacaggggaccactattggattcatcgcattctcacagatcccggagctggcgaaacggatcaagatgtttttcgcactcggaccagtggcctcagtcgcattctgcacttcccctatggcgaagctgggcagattgccagaccacctgatcaaagacctgttcggggacaaggagttcctgccccaatcggcgtttttgaaatggttgggaacccacgtgtgtacccacgtgatcctgaaagaactgtgtggaaatttgtgcttccttctgtgcgggttcaatgaaagaaatttgaacatgtcgcgagtggatgtctacaccacccatagcccagcaggcacctccgtgcaaaacatgcttcattggtcccaagcagtcaagttccagaagtttcaagcgttcgattggggatcctctgccaagaactactttcattacaaccagtcgtaccccccgacttacaatgtgaaggacatgctggtccctaccgccgtctggtccgggggccatgattggttggcggatgtgtacgatgtcaacatcctgctcactcaaattactaacctggtgttccacgaatccatccccgaatgggaacatctggatttcatctggggcctcgacgccccgtggagactttacaacaagatcatcaacctgatgagaaagtatcaa

SEQ ID NO: 15674 - DNA, 1197 bp, synthetic construct
  misc_feature 1..1197: note = source = /note="Description of Artificial Sequence: Synthetic coding sequence"
  source 1..1197: mol_type = other DNA
atgaaaatgaggtttcttgggctggtagtttgtttagtactatggacactgcactctgagggaagtcgcggaaagctaacagctgtagacccagaaactaacatgaatgtgtcagaaatcatatcttattggggatttccctctgaagaatatctcgtcgaaacagaagatggatatatcctctgtttgaatcggattccccatgggcggaaaaatcattctgataaaggacctaaacccgtggtgttccttcagcacggactcctcgctgattcttctaattgggttacaaaccttgccaattcctctcttgggtttatcttggctgatgcagggttcgatgtatggatgggaaattctagggggaatacttggtctagaaagcataaaacattgtcagtgtcccaagatgaattttgggccttctcatacgacgaaatggctaagtacgatttgcctgcatcaatcaacttcattttaaacaaaacagggcaggaacaggtgtattatgtcgggcactctcaggggacaactattggattcatcgctttctctcagataccagaacttgcgaaaagaatcaagatgttcttcgcacttggacctgtagcttcagtggcgttctgcacgagtccaatggccaaactgggaagacttcccgatcacctcattaaagatttgttcggggacaaagaatttctaccccagagtgcattccttaaatggctagggacacacgtgtgtactcacgtgattctcaaagaattatgtggaaatctctgttttcttctctgtgggtttaacgaacgaaaccttaacatgtcgagggtggacgtatatacaactcattctcccgcagggacatcagtacagaatatgcttcactggagtcaggctgtaaagtttcagaaattccaggctttcgattggggatcttccgcaaaaaattacttccattataaccagtcctatcctcccacttacaacgtgaaagatatgctggtgccaactgcagtatggtcagggggacacgattggttggctgatgtctatgatgtcaatatattgctcactcagatcacaaaccttgtgtttcacgaatccatccccgaatgggagcacctcgacttcatctggggactcgatgcaccctggcggctgtataacaaaattattaacctcatgcggaaatatcag

SEQ ID NO: 15675 - DNA, 1197 bp, synthetic construct
  misc_feature 1..1197: note = source = /note="Description of Artificial Sequence: Synthetic coding sequence"
  source 1..1197: mol_type = other DNA
atgaagatgcgcttcctaggtctagtggtgtgtctggtactgtggacactgcattccgaaggctcacgtggcaaactgaccgccgtggatcccgagacgaacatgaatgtttcagagatcatttcctattggggattcccttccgaggagtatctcgtggagaccgaagatggctacattctgtgcttaaatcgcattccccacggaaggaagaatcactcagataaaggtcctaaaccagtggtgtttctgcaacacggactactggccgactcgagtaactgggttaccaacctggccaattcaagcttgggcttcatactcgccgatgctggctttgacgtttggatgggtaattcgcgtggaaacacttggtcgcgtaagcataagacgctgtcggtgtctcaagacgagttttgggcgttttcgtacgatgaaatggccaagtacgatttgcccgcgagtatcaactttatcctgaataagacgggccaggaacaagtttactatgtgggccacagccagggtaccacaatcggtttcatcgccttctcgcagatcccagagctagctaagcggataaaaatgttcttcgccctaggccctgtggcatccgttgccttttgcacatcgcccatggcaaagctgggcagactgcccgaccatctgataaaggacttgttcggggacaaagaatttctgccacaaagtgcctttctgaagtggctcggaacgcacgtctgcacccacgtgatcttgaaagaactgtgtggcaacctgtgcttcctgctctgtggcttcaatgagcggaatctgaatatgagtcgggtcgacgtatatacgacacactcaccggccggaacttccgttcagaacatgcttcattggagccaggctgtcaaatttcagaaatttcaggctttcgactggggcagtagtgccaagaattatttccactacaaccagagctacccgccgacctacaacgtgaaggacatgcttgtgccgaccgccgtgtggtccggcggccatgattggctggccgacgtctacgatgttaacattctgctgacccaaatcaccaatctcgtgttccacgagtccattcctgagtgggagcatctcgatttcatctggggacttgatgccccgtggcggctgtacaataagatcatcaatctgatgcgaaagtatcag

SEQ ID NO: 15676 - DNA, 1197 bp, synthetic construct
  misc_feature 1..1197: note = source = /note="Description of Artificial Sequence: Synthetic coding sequence"
  source 1..1197: mol_type = other DNA
atgaaaatgcgatttctcggtctggttgtgtgtcttgttctctggaccctgcactcggaagggagccgggggaagttgacggcagtcgatcctgagactaatatgaacgtgtcggaaatcatctcgtattggggatttccttcagaggaatacttggtggaaactgaagatggatacattctttgccttaaccgaatcccacatggtagaaagaaccattcagacaagggacccaagccggtggtgtttcttcagcatggactcctggccgattcgtcgaactgggtcactaatcttgcgaattcatctctgggctttattctcgcagacgcgggctttgatgtctggatgggcaattcgcgcggcaacacctggtcgaggaagcacaagactctttcagtgagtcaagatgagttttgggcgttcagttacgatgagatggcgaaatacgacctgcccgcatcgatcaatttcatattgaacaagactggccaggaacaagtgtactacgtgggtcactcccaggggaccacgattggcttcatcgcattctctcaaattcctgaattggccaagagaattaagatgttttttgcgctggggcccgtggcatcagtggcattctgcacctccccaatggcaaaactgggaaggctgccagatcatctcataaaggacctttttggggataaggagtttctcccacaatcagcatttctcaaatggctgggtactcatgtctgcacccatgtaatcctcaaggaactctgtggaaatctttgttttcttctttgtggtttcaatgaacggaacctgaatatgtcgagagtggatgtttacacgactcattccccagcagggacctcggtgcagaacatgcttcactggtcgcaagccgtgaagttccagaaatttcaagcctttgattggggaagctccgcaaagaattacttccattacaaccagtcataccctcctacctacaatgtcaaagatatgctggtgcctaccgccgtctggtcaggaggacatgattggctggctgacgtgtacgacgtgaacatactgctgacgcaaattactaaccttgtctttcatgaatctattccagagtgggagcacctcgactttatctggggattggatgcgccatggcggctgtacaacaagatcattaacctgatgcggaagtaccag

SEQ ID NO: 15677 - DNA, 1197 bp, synthetic construct
  misc_feature 1..1197: note = source = /note="Description of Artificial Sequence: Synthetic coding sequence"
  source 1..1197: mol_type = other DNA
atgaagatgagatttctgggattagtggtgtgtttagtgctttggacactacattctgagggatctagaggaaagctgacagctgtcgatcccgagacaaacatgaacgtctctgaaatcatcagctattggggttttcctagcgaagagtacctcgtcgagacggaagatgggtatattctgtgtctcaataggatcccacacggccgcaaaaatcactctgacaaaggccctaagcctgtggtgttcctccaacatggactgctggcggattcctctaattgggtgactaaccttgccaactccagtctggggtttatcctggcggacgcaggctttgatgtgtggatgggaaactcaagaggcaatacatggagtaggaaacataaaaccctctctgttagtcaggatgagttctgggcatttagctacgacgaaatggctaaatacgatctgccagcttctatcaactttattctcaataagactggacaagaacaggtgtactacgttgggcacagccaaggcaccaccatcggatttatcgcgttcagtcagattccagaactggccaagagaatcaaaatgttttttgctctcgggcctgtggcctccgtggccttttgtaccagccccatggccaagcttggaagactccctgatcatctgatcaaggatctgtttggagataaagaatttttgcctcagtcagcgttccttaagtggctcgggacccatgtctgcactcatgtgattttgaaagagctctgtggaaacctatgtttcctgctgtgtggttttaatgaacgaaatcttaacatgtcacgcgtagatgtgtatacaacccactcacctgccggcacgagcgtgcagaatatgcttcactggtcccaggccgtcaaattccaaaaattccaggcctttgattggggcagcagcgccaaaaactatttccactataatcagtcatacccccccacatacaacgttaaagacatgctggtgcctacggctgtctggtctgggggtcacgactggttggctgacgtttatgatgtgaacatattgctaacacagataacaaacctcgtgtttcacgagagcatccctgaatgggaacacctggatttcatttggggcctggacgctccatggagactgtacaacaagatcattaacctgatgaggaaatatcaa

SEQ ID NO: 15678 - DNA, 1197 bp, synthetic construct
  misc_feature 1..1197: note = source = /note="Description of Artificial Sequence: Synthetic coding sequence"
  source 1..1197: mol_type = other DNA
atgaagatgagatttcttgggctggtcgtgtgcctcgtgctttggacccttcactccgaagggtcgagaggtaagctcactgctgtcgatcctgaaactaacatgaacgtctccgagatcatttcgtactggggttttcccagcgaggagtaccttgtggaaaccgaggatggttacatcttgtgcctcaaccgcattcctcatgggagaaagaatcactccgacaagggacccaagccagtggtctttcttcaacatggccttcttgcagattcatccaactgggtcactaacctggcaaactcctcattgggctttatcctggccgacgcaggttttgacgtgtggatgggaaattcacgggggaacacctggtccaggaagcacaaaactctgtcagtgtcgcaagatgaattttgggcgttctcctacgacgaaatggcaaagtacgatcttcctgcatcaatcaactttattctgaataagaccggacaagaacaagtgtattacgtgggtcactcgcaaggtaccaccattggtttcattgcttttagtcagataccagaactggccaagcgaattaagatgtttttcgctctgggtcctgtggcatccgttgcattctgtacttcaccaatggcgaaattgggcaggctccctgaccatttgattaaggacctctttggagacaaggaatttctcccacagagcgcctttttgaagtggcttggcacccacgtgtgcacgcacgtcatcctgaaggaactctgtgggaacctgtgttttcttttgtgtggcttcaacgaaaggaatctcaacatgtcgagagtggacgtttataccactcattcaccagctggaaccagcgttcaaaacatgcttcattggtcgcaagccgtcaaattccagaaatttcaagcattcgattggggttcatcagcgaagaattacttccactacaaccaatcgtaccctcctacctacaatgtgaaggatatgcttgtgccaacggcagtttggtcgggtggtcacgattggctggccgatgtgtatgacgtgaatattctgctcactcagatcaccaatcttgtgtttcacgaaagcattcccgaatgggaacatctggatttcatttggggtctggatgcaccctggagactgtacaataagatcatcaacctcatgcgcaagtaccag

SEQ ID NO: 15679 - DNA, 1197 bp, synthetic construct
  misc_feature 1..1197: note = source = /note="Description of Artificial Sequence: Synthetic coding sequence"
  source 1..1197: mol_type = other DNA
atgaaaatgcgatttttaggtctagtagtttgtttagttttatggacgttacattcggaaggttcgcgtggtaaactaacggcggttgatccggaaacgaatatgaatgtttcggaaataatatcgtattggggttttccgtcggaagaatatctagtagaaacggaagatggttatatattatgtctaaatcgtataccgcatggtcgtaaaaatcattcggataaaggtccgaaaccggtagtttttttacaacatggtttattagcggattcgtcgaattgggtaacgaatctagcgaattcgtcgctaggttttatactagcggatgcgggttttgatgtatggatgggtaattcgcgtggtaatacgtggtcgcgtaaacataaaacgctatcggtttcgcaagatgaattttgggcgttttcgtatgatgaaatggcgaaatatgatttaccggcgtcgataaattttatattaaataaaacgggtcaagaacaagtatattatgttggtcattcgcaaggtacgacgataggttttatagcgttttcgcaaataccggaactagcgaaacgtataaaaatgttttttgcgttaggtccggttgcgtcggtagcgttttgtacgtcgccgatggcgaaattaggtcgtctaccggatcatttaataaaagatctatttggtgataaagaatttttaccgcaatcggcgtttctaaaatggttaggtacgcatgtttgtacgcatgtaatactaaaagaactatgtggtaatttatgttttttactatgtggttttaatgaacgaaatttaaatatgtcgcgagtagatgtatatacgacgcattcgccggcgggtacgtcggttcaaaatatgctacattggtcgcaagcggtaaaatttcaaaaatttcaagcgtttgattggggttcgtcggcgaaaaattattttcattataatcaatcgtatccgccgacgtataatgtaaaagatatgctagttccgacggcggtatggtcgggtggtcatgattggttagcggatgtatatgatgtaaatatactactaacgcaaataacgaatttagtatttcatgaatcgataccggaatgggaacatctagattttatatggggtctagatgcgccgtggcgtttatataataaaataataaatctaatgcgaaaatatcaa

SEQ ID NO: 15680 - DNA, 1197 bp, synthetic construct
  misc_feature 1..1197: note = source = /note="Description of Artificial Sequence: Synthetic coding sequence"
  source 1..1197: mol_type = other DNA
atgaagatgcgcttcctggggctggtggtgtgtcttgtactctggactctgcactctgagggctcacgtggtaagctgaccgccgtggatcccgaaacgaacatgaatgtatctgagataatttcttactgggggttccctagtgaggaatatctggttgagaccgaagacggctacatcctatgcttaaacagaattccacacggccggaaaaaccacagtgataagggaccaaaacctgttgtatttctgcagcatggactcctggcagatagtagtaattgggtgacaaacttggccaactcctccttgggcttcattctcgctgatgctggtttcgatgtgtggatgggcaactcgcgagggaacacctggtctcggaaacacaagaccctgtcggttagccaggacgaattctgggccttcagttatgacgagatggccaaatacgacctgcccgctagtatcaacttcattcttaacaaaactgggcaggagcaggtgtattatgtgggacacagtcagggaacaacaatcggatttatcgccttcagccagatccctgaactggccaagcggattaaaatgttttttgccctgggccccgttgcttctgtggcattctgcacatccccaatggccaagctcgggaggttaccagatcacctgatcaaggacctgtttggcgataaggagtttctaccgcagtcagcatttctaaagtggcttgggacacacgtgtgtacccacgtgattctaaaggagttgtgcggtaacttgtgcttcctcctgtgcgggttcaatgagcgcaatctcaacatgtcccgtgtcgacgtgtacacaacacattcgcctgctgggacatcagttcagaatatgctacactggagccaagccgttaaatttcaaaaattccaggccttcgactggggttccagtgctaagaactatttccactataaccagagctatccaccaacttacaatgttaaggacatgctagtgcctactgccgtgtggagtgggggtcatgactggctggccgatgtgtatgacgtaaacatactactgacccagatcaccaatcttgtgttccatgagtcaataccagagtgggagcacctagactttatatgggggctggacgccccatggcgactttacaacaaaatcataaatttgatgaggaaatatcag

SEQ ID NO: 15681 - DNA, 1197 bp, synthetic construct
  misc_feature 1..1197: note = source = /note="Description of Artificial Sequence: Synthetic coding sequence"
  source 1..1197: mol_type = other DNA
atgaaaatgaggtttttaggattggtggtatgtctcgtgttgtggaccctgcactccgagggctctcgcggaaagctaactgctgttgacccggaaacgaatatgaatgtgagcgagatcatctcttactggggcttcccctccgaggagtatctagtggagacggaagatgggtatattctgtgtttgaatcggatcccacacgggcggaaaaaccattccgataaggggccgaagccggtagtattcttgcagcacggcttgttagccgactcatctaactgggtcacaaacctcgcgaacagctcgctcggattcattctggctgatgccggcttcgacgtctggatgggtaattctcgggggaacacatggagccggaaacacaaaacactatctgtgtcccaggatgagttttgggctttcagctatgatgagatggccaagtacgatttgcctgctagtatcaacttcatcctcaacaagacaggccaggaacaagtttattatgtgggccactcacagggcactaccatcgggttcatcgctttctcccagattcccgagctcgcaaagcgaatcaaaatgttttttgccctcggccctgtggcttccgttgccttctgtacctcccccatggctaaactcgggcggcttcccgaccacctgattaaggacctgtttggggacaaggagtttcttccccagtcagcattcctcaagtggctgggcacacacgtatgcacacacgtgatactcaaggagctttgtggaaatctgtgtttcctgctgtgcggcttcaacgaacgcaacctcaatatgtcccgggtcgatgtttacaccacccacagtccggccggcaccagcgtgcagaatatgttacattggtcccaagctgtcaaatttcagaagttccaggcttttgactggggctctagtgcaaagaattatttccattataatcaaagttatccccccacttacaacgtgaaggacatgctagtgccgaccgcagtgtggtctggaggtcacgactggctggccgacgtgtatgacgtgaatattctcctcactcagatcactaacctggtgtttcatgaaagcatccctgagtgggagcacctggacttcatatggggattggacgcaccctggaggctgtacaataagattataaacctcatgcgaaagtaccag

SEQ ID NO: 15682 - DNA, 1197 bp, synthetic construct
  misc_feature 1..1197: note = source = /note="Description of Artificial Sequence: Synthetic coding sequence"
  source 1..1197: mol_type = other DNA
atgaaaatgaggtttcttggactggtcgtctgcctagtactttggacattgcactcggagggttctcggggaaagctaactgccgtggatccagagaccaacatgaatgtgagtgagattatctcctactggggatttccgtcggaggaatatttggtggaaactgaagacggttacattctctgtcttaatcgaatcccacacggacgtaagaatcactcagacaagggcccaaagcctgtggtattcttacaacacggactactagccgattccagcaactgggttacaaaccttgccaattcatcattgggatttattctggcagatgcaggcttcgatgtgtggatgggtaatagtcgaggtaatacttggtctcgtaagcacaaaactttgtcagtttctcaagatgaattctgggcattttcctatgacgaaatggcaaaatatgatctcccagcatcgatcaattttatacttaataagactggacaggaacaagtttactacgtcggacactctcaaggtactacgatcggattcattgcattttcacagatcccagagttggctaagaggattaagatgttcttcgctctcggaccggtggcttcagtggctttttgcacctctccaatggccaaacttggacgacttccagaccatttgattaaggatttgttcggagataaagaatttctcccacagtcagcctttttgaagtggttgggaactcacgtttgtactcatgttattcttaaagagctatgtggaaacctttgctttttgctttgtggattcaatgaacgaaacttaaatatgtctcgagttgatgtctataccactcattctccagcaggtacgtcagtgcagaacatgctgcactggagtcaagcagtcaagttccagaaatttcaagcgttcgattggggatcttctgctaagaactactttcactataatcaaagctaccctccaacatataatgttaaagatatgttggttccaactgctgtctggtctggaggacacgattggcttgcagatgtgtacgatgtgaatattctcttgactcaaattacaaatcttgtgttccacgaatccatcccagagtgggaacacctggattttatttggggtttggatgccccatggcggttgtataataaaattatcaacttgatgcggaagtatcaa

SEQ ID NO: 15683 - DNA, 1197 bp, synthetic construct
  misc_feature 1..1197: note = source = /note="Description of Artificial Sequence: Synthetic coding sequence"
  source 1..1197: mol_type = other DNA
atgaagatgcgtttcctgggattagttgtgtgccttgtgttgtggactttgcacagtgaaggatcacggggaaaactgacggcggttgatccagaaactaacatgaatgtgtctgagattatctcctattggggattccccagcgaagagtacctggttgaaacggaggacggatatatcctttgcctgaatcggattccccatgggcgtaaaaaccattcagacaagggacccaagcctgtcgtgtttttgcagcatggcctcctcgcagactcatctaattgggtcaccaatctcgccaacagttcactggggttcattctggcagatgccgggttcgacgtgtggatgggcaactctagaggtaacacctggtccaggaagcacaaaaccctatctgtatctcaggatgagttctgggccttctcatacgatgagatggcaaaatacgacctccctgcgagcataaacttcatcctgaacaagacagggcaggagcaggtttattatgtggggcactctcaaggcaccaccatcggatttatcgccttctctcaaattccagagcttgccaagaggattaagatgtttttcgcacttggacccgtggcatccgtggccttttgcacctctccaatggccaagctgggccgtctgcccgatcacctgatcaaagacctcttcggggataaggaatttttaccccagtccgcattcttgaaatggctgggaactcacgtgtgcacccacgtcatcctgaaagaactttgtggcaacttatgctttctgctatgtgggtttaacgagcggaacctgaatatgagccgggttgatgtgtacactacacattcccccgctggaacatccgtccagaatatgttgcattggtcccaggccgtgaaattccagaagttccaggcctttgactggggctccagtgctaaaaactactttcactataaccagtcctatccacctacatacaatgtgaaagacatgcttgtgccaacggccgtctggagcggcgggcatgattggctcgcagatgtatacgatgtcaacattctcctgacgcagatcaccaacttagtgttccacgagtccatacctgagtgggagcatttggactttatttggggactcgacgcaccttggaggctgtacaacaagatcataaatctgatgcgcaaataccag

SEQ ID NO: 15684 - DNA, 1197 bp, synthetic construct
  misc_feature 1..1197: note = source = /note="Description of Artificial Sequence: Synthetic coding sequence"
  source 1..1197: mol_type = other DNA
atgaagatgagattcctgggattggtggtctgtctcgtcctgtggacccttcactcagagggatcgcgaggaaaactgaccgccgtggatcccgaaacgaacatgaacgtgtcagagattatctcctattggggcttcccgtcggaagagtacctggtcgagacggaggacggatacatcctgtgcctcaacaggatcccacatgggcgcaagaaccactcagataagggtccaaaaccagtcgtctttctccagcacggtttgctcgcggactccagcaactgggtcaccaatctggccaactcgtccttggggttcatcctggctgatgcgggatttgacgtgtggatgggcaactcgcgaggcaacacctggtcgcggaagcataagactttgagtgtctcacaggacgagttctgggccttcagctatgatgaaatggcaaagtacgatctcccagcatctattaacttcatcctgaataagacgggccaggagcaggtgtactacgtgggccattcgcaaggaaccaccatcgggttcattgccttcagccaaatccctgaactggccaagcgtatcaaaatgttttttgccctgggaccggtggcaagcgttgctttctgtacttccccgatggccaagctgggacggcttccggaccacctgattaaggacctgttcggcgataaggaatttcttcctcagagcgcattcctcaagtggctcggaactcatgtctgcacccatgtgatcctgaaggaactgtgcggaaacctgtgtttccttctgtgcggattcaatgagcggaacttgaatatgtcgcgggtggacgtgtacactactcatagcccagctgggacctcagtgcagaatatgcttcattggtcccaagccgtcaaatttcagaaattccaagccttcgactgggggagctccgcgaaaaactactttcactacaatcaatcgtacccaccgacttacaacgttaaggatatgctcgtgccgaccgccgtctggtcgggcggacacgattggctcgcggacgtctacgatgtgaacatcctgcttacccagataaccaatctcgtatttcacgaatctatccctgaatgggaacacctggacttcatttggggactcgacgccccctggagactgtataacaagatcatcaaccttatgcgcaaataccag

SEQ ID NO: 15685 - DNA, 1197 bp, synthetic construct
  misc_feature 1..1197: note = source = /note="Description of Artificial Sequence: Synthetic coding sequence"
  source 1..1197: mol_type = other DNA
atgaaaatgcgatttctggggttagttgtatgtttagttttgtggactctccactctgaagggtcaagagggaagcttacggcagttgatcccgaaacaaatatgaatgtttcagaaataatctcatattggggattcccatctgaggaatatcttgtggaaacagaagatggatatatcttatgtctgaatcgcataccccatggacgaaagaaccattcagataaaggacccaaacccgtagtgtttctccagcatgggctcctggccgatagttcaaactgggtgacaaacctagctaatagttccctggggttcatcctggctgatgccggatttgatgtgtggatggggaactccagggggaacacttggtccaggaaacacaaaacactcagtgtgtctcaggatgagttttgggcattcagttatgatgaaatggccaagtatgacctgccagcttcaatcaattttatactcaacaaaactggacaggaacaggtatactacgtcgggcacagtcagggaactactataggatttatcgcttttagtcagatacccgaactagcaaaaaggataaaaatgttttttgcgctggggcccgtggcatcagtcgcattctgtactagtcctatggctaaactgggacgcttacccgatcatctgatcaaagatctctttggagataaagaattcctgcctcagtcagcattcctgaaatggcttgggacacacgtatgtacacacgttatcttgaaagaactgtgtggaaacctgtgtttcctgttgtgtgggttcaatgagaggaatttaaacatgtctagggttgatgtctatactactcactctccagctggaacttctgtgcagaatatgctgcactggtcacaggctgtaaaattccagaaatttcaagcctttgactgggggtcatcagccaaaaactactttcactataaccagtcttatcctcccacatataacgtaaaagatatgcttgtgccgacagccgtgtggtccggggggcacgattggttggcagatgtttatgacgtgaacatcttactcactcaaataactaatctagtgttccatgagagtatacccgaatgggaacacctcgattttatttggggacttgatgccccatggcggctttataataagatcataaacctcatgagaaaatatcag

SEQ ID NO: 15686 - DNA, 1197 bp, synthetic construct
  misc_feature 1..1197: note = source = /note="Description of Artificial Sequence: Synthetic coding sequence"
  source 1..1197: mol_type = other DNA
atgaagatgagatttctggggcttgtggtgtgtttggtgctttggacccttcatagcgaaggttcaagagggaaactgaccgccgtggacccagaaactaacatgaacgtgagcgaaatcatctcgtactggggatttccatcggaggagtatctcgtggagactgaagatggttacattctttgcctgaatcgcattccacatggtcgcaagaaccattcggataagggaccgaagccagtggtgtttttgcaacatgggctgctggcagattcctccaactgggtgaccaatcttgcaaacagctccctcggattcattctcgcggatgcaggttttgacgtgtggatgggaaattcccgcggtaatacttggtcccgaaaacacaagactctgtcagtctcccaagatgaattttgggcctttagctacgacgaaatggcaaaatacgatttgcctgcatcgatcaactttatcctgaacaaaaccggccaagaacaggtgtactatgtcggccacagccaaggaacgaccataggattcatcgctttctcacaaattccagaactggccaagagaattaagatgttctttgcccttggtcccgtggcttccgtggccttttgcacctcgccaatggcaaagttgggacgactccctgaccatctgattaaagatctttttggagataaagaatttctgcctcagtccgccttccttaagtggctgggtacgcacgtgtgtactcatgtgatcttgaaagaactctgtggcaatctttgttttctgttgtgtggcttcaatgaaaggaatctcaatatgtcaagagtcgatgtgtacaccacccattccccagcgggtacctcggtccagaacatgcttcactggtcgcaagccgtgaagtttcagaagtttcaggctttcgactggggatcctcagccaaaaactacttccattacaatcaatcttatccccccacctacaatgtgaaagatatgctggtgcctactgcggtctggagcgggggacacgattggctcgccgacgtctacgatgtcaatattctccttacccaaatcactaatctcgtgtttcacgagtcgattccagaatgggaacatctcgatttcatttggggactggatgcaccttggcgattgtacaataagattatcaacctcatgagaaagtaccag

SEQ ID NO: 15687 - DNA, 1197 bp, synthetic construct
  misc_feature 1..1197: note = source = /note="Description of Artificial Sequence: Synthetic coding sequence"
  source 1..1197: mol_type = other DNA
atgaagatgcggtttctgggactggtggtctgcctggttctgtggaccctgcattcggagggctcacgggggaaactgactgctgtcgatccggagactaatatgaatgtgtccgaaatcatctcctactgggggttcccatcggaagaatacctggtggaaaccgaggacggatatatcctgtgtttgaaccggatcccgcatggacgaaaaaaccattccgacaaagggccaaagcccgtggtgtttctccagcacggactgctggcggattcgtcgaactgggtgacgaatctggccaacagctcactgggattcatcctcgctgacgcaggattcgatgtttggatgggaaattcccggggcaacacctggagcagaaagcataagaccttgtccgtgtcacaagatgaattctgggcattctcatacgatgaaatggccaagtacgacctgccagcaagcatcaactttatcctgaacaagactggccaggagcaagtgtactacgtgggtcacagtcaaggcactaccatcggtttcatcgctttttcgcagattccggagttggcgaagcgcatcaaaatgttcttcgctctgggacctgtggcgtccgtagcgttctgcacctcccccatggctaagctcggacggctgcctgatcatctgatcaaagacttgtttggagacaaggaatttctgccgcagtcagcattcttgaaatggctcggaacccatgtgtgcacgcatgtcattttgaaggagctctgcggtaacctgtgtttcctgctctgcgggttcaacgaacggaatctgaacatgagccgcgtggacgtgtacactacccactccccagccggaacttcagtgcaaaacatgcttcactggtcacaggcggtgaaattccaaaagttccaggcgtttgactgggggtccagcgctaagaattacttccactacaatcaatcgtaccctccgacgtacaacgttaaggacatgctggtgccgaccgcagtctggtccggaggccacgattggctcgcggatgtgtacgacgtgaatattctcttgacccaaattactaacctcgtctttcatgaatccatcccggagtgggaacatttggacttcatttgggggctcgacgctccgtggcggctgtataacaagatcatcaatctgatgcgcaagtaccag

SEQ ID NO: 15688 - DNA, 1197 bp, synthetic construct
  misc_feature 1..1197: note = source = /note="Description of Artificial Sequence: Synthetic coding sequence"
  source 1..1197: mol_type = other DNA
atgaagatgcgatttctggggctggtagtctgtctcgtgttgtggactcttcatagcgaggggtctaggggcaaactcaccgctgtcgatccagagaccaacatgaatgtatcagagattatctcctactggggatttccatcggaggagtatttggttgagacggaagatggttacatcttgtgcttaaatcgtatcccccacggaagaaagaatcacagcgacaagggaccgaaacctgtggtgtttcttcagcacgggttgctcgcagactcttccaactgggtgacaaacctggcaaattcttctctgggtttcatactggccgatgccgggttcgacgtttggatggggaatagccgagggaacacatggagccgaaagcacaagaccctgtcagttagccaagacgagttctgggccttttcttacgacgagatggcgaagtatgaccttccagcctccatcaacttcatcctgaacaaaactggacaggagcaggtgtattatgtggggcattcccagggcactacaattggcttcattgctttttcacaaatccccgaactagctaaacggattaagatgttcttcgcacttggacctgttgcaagcgtggccttttgtactagccctatggccaaactggggagactccctgaccacctgattaaggatctcttcggtgacaaagagtttctgccccagtctgccttccttaaatggctcgggacacatgtatgcacacacgttattctgaaggagttgtgcggtaatctgtgctttctgctctgtggcttcaacgaacgtaacttgaatatgtccagggtcgacgtttacactactcacagccccgccgggacttccgttcaaaacatgctgcactggagccaagcggttaaattccagaaattccaggcctttgattggggcagttctgccaagaattatttccactataaccagtcatatcccccaacctataatgtcaaagatatgctggtgcctaccgccgtgtggtcaggtggccacgattggctggccgatgtctacgatgtcaacatcctcctcactcagattacgaatctggttttccatgagtcgatacctgagtgggaacacttagacttcatttggggactggacgcgccatggcgcctctacaacaagatcattaatctaatgagaaagtaccag

SEQ ID NO: 15689 - DNA, 1197 bp, synthetic construct
  misc_feature 1..1197: note = source = /note="Description of Artificial Sequence: Synthetic coding sequence"
  source 1..1197: mol_type = other DNA
atgaagatgcgcttcctcggcctcgtcgtgtgccttgtgctttggactctgcactccgagggttcccgcggaaagctgactgccgtcgaccccgaaaccaacatgaacgtgtccgaaatcatctcctactggggttttccgtccgaggaatacctcgtggaaaccgaagatgggtacattctttgccttaatcgcataccgcacgggaggaaaaaccactcggacaagggacccaaaccagtggtgtttcttcagcatgggcttcttgctgatagctccaactgggtgactaacctcgcgaatagctcgctgggattcatactggcagatgcagggtttgacgtgtggatgggaaattcgagaggtaatacttggtcgcggaagcacaaaaccctgtcagtctcgcaggatgagttttgggcgttttcctacgatgaaatggccaaatacgacttgcctgctagcataaactttattctgaacaaaactggacaggagcaggtctactacgtgggccattcgcagggcaccacgattggtttcattgccttttcgcagatcccagagctggcaaagcgcattaagatgttctttgccttgggacctgtcgcgtcagtggcattttgcacctcacccatggccaaactggggagacttcccgatcacctgatcaaggatctctttggtgataaggaattcctccctcaatcagcctttttgaagtggcttgggacgcatgtttgcactcacgtgatattgaaggaactctgcggaaacctttgttttctcctttgcggattcaatgaacgaaatctcaatatgtcgcgggtggatgtctacaccactcacagccctgctggtacttccgtgcagaatatgcttcattggtcgcaagcagtcaaattccaaaagtttcaggcatttgattggggttcctcagcaaagaattactttcattacaatcagtcatacccacctacttacaacgtcaaggatatgctcgtgcctaccgccgtgtggagcggtggacatgattggcttgcagatgtctatgatgtgaacattcttcttacccaaatcacgaacctcgttttccatgaaagcatccctgaatgggaacaccttgacttcatttggggtctggacgcaccgtggcgattgtacaacaaaatcatcaatctcatgcgaaagtaccaa

SEQ ID NO: 15690 - DNA, 1197 bp, synthetic construct
  misc_feature 1..1197: note = source = /note="Description of Artificial Sequence: Synthetic coding sequence"
  source 1..1197: mol_type = other DNA
atgaagatgagatttctgggtctggtagtgtgtctggtgctttggacgctgcattctgaaggtagcagaggcaagttaacggcagtggatcctgaaacaaatatgaacgtatccgagattatttcatactggggatttccaagcgaagaatacctcgtggaaacggaggacggatacatcctctgcctcaacaggatccctcatggacgcaaaaaccattcggacaagggtcctaagcccgtcgttttcctgcagcacggtctgctggcagattcatctaattgggttacgaatcttgcaaactcatcactgggcttcatacttgccgacgccgggtttgatgtgtggatgggcaactctcgtggaaacacatggtcccgcaagcacaaaactctctccgtgtcgcaggacgaattctgggcattttcctatgatgaaatggctaaatacgatctgcctgcatcgattaacttcatccttaacaagactggacaggagcaagtgtactatgtaggtcatagccaagggacaaccatcggtttcattgcttttagccaaatccccgaactggccaagcggatcaaaatgttttttgcattgggacccgtggcctccgtggccttctgcacgtcaccgatggcaaagctcgggagacttcccgatcaccttataaaggacctcttcggtgataaagagttcctgccccagtccgctttcctgaaatggttgggaacccatgtgtgtacacacgtcatacttaaggaactgtgtgggaacctgtgctttctcctgtgtggctttaacgaaagaaatctgaatatgagtcgagttgacgtttacaccacccatagccccgcggggaccagtgtgcagaatatgttgcactggtcacaggcagtgaaattccaaaaatttcaggcatttgattggggtagttccgccaagaactacttccattataaccaatcctaccctcctacatacaatgttaaagacatgctggtgccgaccgcagtctggtctggcggccacgactggttggccgacgtgtacgacgttaacattctgctgacccagatcaccaacctggtgttccatgaatctatcccggaatgggaacatctggactttatttgggggctggacgccccctggcggctttacaataagattattaacttgatgaggaagtatcag

SEQ ID NO: 15691 - DNA, 1197 bp, synthetic construct
  misc_feature 1..1197: note = source = /note="Description of Artificial Sequence: Synthetic coding sequence"
  source 1..1197: mol_type = other DNA
atgaaaatgcggtttctgggcttggttgtttgcctggtgttgtggacattgcatagtgagggtagcaggggaaaactgactgcggtcgatcccgagaccaatatgaatgtcagtgagatcatttcttactggggcttcccgtccgaagagtacctcgtggaaacagaagacggatacattctctgtctgaatcggatcccacacggacgcaagaatcattcagataagggtcccaagcctgtcgtgttcctgcagcacggacttctggctgactcatcaaattgggtgactaaccttgccaactcttccctgggttttatacttgccgacgccggattcgacgtctggatgggcaattccaggggcaacacttggagccgaaagcataagacgctctctgtgtcccaggatgaattctgggccttcagttatgatgagatggccaaatatgaccttccagcaagcataaactttatcttgaataagaccggccaggagcaggtatactatgtggggcattcacaaggcaccactattggattcatcgctttttcccaaatccccgagctggccaaaaggattaagatgttttttgctctgggacccgtcgcaagcgtggcgttctgtactagccccatggccaagctgggaaggctccctgaccacttgataaaggacctgttcggcgataaggaatttttgccccagtccgcgtttctgaagtggctgggcacccacgtctgtactcatgttatcctgaaagaattgtgcggcaacctttgttttctgctgtgcggcttcaacgagagaaacctcaatatgagcagggtcgacgtgtacacaacgcactctcctgctggcacgagtgtgcaaaacatgcttcactggtcccaagctgtgaagtttcagaagttccaggcttttgattggggttctagcgccaaaaattacttccactacaaccagtcctaccctccaacttataacgtgaaggacatgttggtgccaacagcagtgtggagtggcggtcacgactggctggctgatgtttacgatgtgaatatcctgttgacccagataacaaacctcgtttttcatgagagcattccggaatgggaacacctggacttcatatggggcctcgatgctccctggaggctctacaataagatcatcaatctgatgcgaaaataccaa

SEQ ID NO: 15692 - DNA, 1197 bp, synthetic construct; identical to SEQ ID NO: 15683
  misc_feature 1..1197: note = source = /note="Description of Artificial Sequence: Synthetic coding sequence"
  source 1..1197: mol_type = other DNA

SEQ ID NO: 15693 - DNA, 1197 bp, synthetic construct
  misc_feature 1..1197: note = source = /note="Description of Artificial Sequence: Synthetic coding sequence"
  source 1..1197: mol_type = other DNA
atgaagatgaggttcctgggactcgtggtctgtctcgtactatggactcttcattctgagggtagcagaggaaagctgactgctgttgacccagagaccaatatgaacgtgtccgaaatcatatcttactgggggttcccttcggaagaatacttggtggagaccgaggacggctatatcctctgcctgaatcggattccacacggacgcaagaatcactccgataaggggcccaagccggtagtctttctccaacatgggctattagccgactcttctaattgggttacaaatctggccaattctagcctgggatttatcttggctgacgccggtttcgatgtgtggatgggaaacagtcgtggaaatacttggtcccgaaaacataagacactgagcgtgtcccaggacgagttttgggcattcagttacgacgaaatggcaaagtatgatttacctgcctcaatcaacttcatcctgaacaagacgggccaggaacaggtttactacgtagggcactcccaagggaccaccattggcttcatcgcattttcacaaatccccgagctggccaagagaatcaaaatgtttttcgctctgggccccgtcgccagcgtagctttctgtaccagtcctatggcaaagctcggtaggcttcccgaccacctgatcaaagatctgttcggtgacaaagaatttctgccacagagtgcattccttaaatggctgggcacccatgtgtgtacgcacgttatcttgaaggagctgtgcggaaatctatgttttctcctgtgcggttttaatgagaggaatctgaacatgtctagggttgacgtttacactacccactcacctgccggcaccagcgtccagaatatgctgcattggtcgcaagctgttaagtttcagaaatttcaggcattcgattggggttccagcgctaaaaattactttcactacaatcagtcatacccacccacttacaatgtcaaggacatgcttgtccctaccgctgtatggtctggtggccatgactggctggctgacgtttatgacgtaaatattctgcttacccagatcacaaacctggtattccatgagtcgattccagagtgggagcatttagacttcatttggggcctcgacgctccgtggcgattatacaataaaatcatcaatttgatgcgaaagtaccag

SEQ ID NO: 15694 - DNA, 1197 bp, synthetic construct
  misc_feature 1..1197: note = source = /note="Description of Artificial Sequence: Synthetic coding sequence"
  source 1..1197: mol_type = other DNA
atgaaaatgaggttcttgggccttgtcgtttgtctggtgctgtggactttgcacagtgaagggagccgcgggaagcttaccgccgttgatcccgaaaccaacatgaacgtgtccgagataatctcttactggggctttccatcagaagaatatcttgtggagaccgaagatggctatatcctatgtctcaatcggattccgcatggccgaaagaatcattctgataagggtccaaagccagtcgtgtttctacagcacggcctgctggctgatagttcgaattgggtcaccaatcttgctaacagctccctgggttttatactggcagatgccggatttgacgtgtggatgggcaacagtcgggggaatacttggagccgaaaacacaagaccctctctgtctcccaggatgagttttgggccttttcctacgacgaaatggctaaatatgacttgccagctagcatcaactttattctcaacaaaaccggacaggaacaggtgtactacgttggacattcgcaaggcacaaccatcggctttatcgcattttcccagattcccgaactggccaaacgcataaagatgttctttgcccttggccccgtagcctcagtcgcgttttgtacctcccctatggcaaaactgggtagactccctgaccatctgatcaaggacttgttcggagacaaggagttcctcccacagtctgccttcctgaaatggctggggactcacgtgtgtacccacgtgattctaaaggaactgtgcgggaatctctgttttttactctgcgggtttaatgagcgcaacctgaacatgtcacgcgtcgatgtctacactactcactcacccgcaggaacaagcgtgcaaaatatgctgcactggtcccaggctgtgaaatttcagaagtttcaggcctttgattggggatccagcgccaaaaattatttccactataaccagagctacccccccacatataatgtgaaagacatgctggtcccaactgcggtatggtcgggggggcacgattggctggccgatgtttacgacgtgaatattcttttgacgcagatcaccaatctggtattccacgagtccatccctgaatgggagcacctcgattttatttgggggcttgacgccccatggaggttatacaacaaaattattaacctgatgaggaaatatcag

SEQ ID NO: 15695 - DNA, 1197 bp, synthetic construct
  misc_feature 1..1197: note = source = /note="Description of Artificial Sequence: Synthetic coding sequence"
  source 1..1197: mol_type = other DNA
atgaaaatgagatttcttggactcgtcgtgtgtttggtcctgtggactctgcactcagaagggtccagagggaaacttaccgcagtagatcctgaaactaatatgaacgtgtcggaaatcatctcctactggggtttcccttctgaagaataccttgtggaaaccgaagatggatacattctctgcttgaaccgcattccccatggacgtaagaaccattccgacaagggtccaaagccagtcgtgtttcttcagcatgggttgcttgctgatagctcaaattgggtgaccaacttggcaaatagctccctcggattcattctggcagatgcagggtttgatgtctggatgggtaattcgcgaggaaatacctggagcaggaagcataaaacgctttcggtttcacaggacgagttctgggcattttcatatgatgaaatggccaagtacgatctgccagcaagtatcaactttatcctgaacaagacgggtcaagagcaggtctattacgtcggccactcacagggtaccactattgggttcatagcgttcagccagattccagagctggcaaaacggatcaaaatgttctttgcgttgggaccggtggcctccgttgcattctgtaccagccctatggcaaaactcggccgcctgcctgatcatctcattaaggacctctttggtgataaggaatttctgcctcaaagcgcattccttaagtggttgggaactcatgtgtgtactcatgtgatactgaaggaattgtgtggtaacctgtgttttttgctgtgtggattcaatgagcggaacttgaatatgtcgcgcgtggacgtctacactactcactccccagccggaaccagcgtgcaaaacatgctgcactggtcccaagccgtgaaatttcaaaagtttcaggccttcgactggggtagctcagccaagaattactttcactacaaccaatcgtatccccctacctacaacgtgaaggacatgctggtgcccaccgcagtgtggtcgggtggacatgattggcttgcagatgtatacgatgtgaatattcttcttacccaaattactaaccttgtgtttcatgaatcaatccctgaatgggagcacctggacttcatttgggggctggatgccccatggcggctttacaataagatcataaaccttatgcgaaagtaccag

SEQ ID NO: 15696 - DNA, 1197 bp, synthetic construct
  misc_feature 1..1197: note = source = /note="Description of Artificial Sequence: Synthetic coding sequence"
  source 1..1197: mol_type = other DNA
atgaagatgcgatttctcggactggtggtttgtctggtgctgtggactctgcacagtgaaggttccagaggaaagttgaccgcggttgacccggagactaatatgaatgtgagcgagattattagctactgggggttccctagcgaagaatacttggtggagactgaagatgggtacatcctgtgtctgaaccggataccccacgggcgcaaaaaccatagtgacaagggaccaaagcctgttgtcttcctgcagcacgggctgcttgcagattccagcaactgggtaaccaatctcgcgaacagttccctgggctttatcctcgccgacgccgggttcgatgtgtggatgggtaattctagaggtaatacctggtcccggaaacataaaacgctcagcgtgtcccaggatgagttttgggcattttcttatgacgagatggcgaagtatgatttgcccgccagcatcaatttcatactgaataaaacaggacaagagcaagtgtattatgtcggccattctcaaggaacgactataggatttatcgcattctcccagattcccgagcttgcgaaaagaattaagatgtttttcgcactggggccagtcgcgtcagtggctttctgtaccagccctatggctaagttgggtcggctccctgaccatcttatcaaagacttgttcggagacaaggagtttcttccccagagtgctttcttgaagtggctcggcactcatgtgtgtactcatgtaatcctgaaggagttgtgtggtaacctctgtttcctcctgtgtggatttaacgaacggaacctgaatatgtcacgggtggatgtctacacaacacacagtccagcaggcacctctgtgcagaacatgctgcactggtcacaggccgttaaatttcagaagttccaggctttcgattggggttcttccgcgaaaaattactttcattataatcagtcttaccccccaacctataacgtaaaagacatgctggttccaaccgcggtgtggagcggcggtcacgactggctggcagatgtgtatgacgtgaatattctcctgacacagatcactaatctggttttccacgagtccatcccagagtgggagcacctggatttcatctggggcctggacgctccctggagactctacaacaaaattatcaatctcatgcggaagtaccag

SEQ ID NO: 15697 - DNA, 1197 bp, synthetic construct
  misc_feature 1..1197: note = source = /note="Description of Artificial Sequence: Synthetic coding sequence"
  source 1..1197: mol_type = other DNA
atgaaaatgcgctttcttggcctcgtcgtgtgcctggttctctggacacttcactctgaaggctcccgcgggaagttgacggctgtggacccagagacaaacatgaacgtttccgagatcatctcttactggggcttcccgtccgaggagtacctggttgagaccgaagatggctacatcctctgtctgaaccgaattcctcacggacgcaagaatcactcagataaggggccaaagcccgtggtttttttacagcatggtcttctggcggacagctctaactgggtaactaacttggccaactcttcactgggcttcattctggcggatgccgggtttgacgtctggatgggaaactcccgtggtaatacctggtcaaggaaacataagaccctgtccgtgagccaagatgagttttgggcattctcatacgacgaaatggctaaatatgacctccctgccagtataaactttattctgaataaaacaggccaagaacaggtgtactacgtaggccattcacagggaacaaccatcgggtttatagctttctcacagatcccagaactggcgaagcggataaaaatgtttttcgccctgggaccagtggcatccgtggctttttgcacctcgcccatggctaagctggggcggctgcccgaccacctaatcaaagacctgttcggggacaaagagttcctgccgcaatctgcctttcttaaatggctcggtacgcacgtatgtacacacgtgattttgaaggagttatgtggaaatctttgcttcctgttgtgcggttttaatgagcgcaacttgaacatgtctcgtgtggacgtgtatactacccacagccccgcaggcacaagcgtgcaaaatatgttacattggagtcaggcggtgaagtttcaaaaatttcaagccttcgactggggttccagcgcgaagaactactttcactacaaccagtcctatcccccaacctataacgtgaaggatatgcttgtgccaactgcagtgtggagcggcggtcatgattggcttgcagacgtgtacgacgtgaatatcctgctgactcagattactaatctggtattccacgaatctattccagagtgggaacacttggattttatttggggcttggatgctccgtggagactctataacaaaataattaatctaatgcgaaaataccag

SEQ ID NO: 15698 - DNA, 1197 bp, synthetic construct
  misc_feature 1..1197: note = source = /note="Description of Artificial Sequence: Synthetic coding sequence"
  source 1..1197: mol_type = other DNA
atgaagatgcgcttccttggtctggtcgtctgcctggtgctttggactttgcattcggaaggatcgcgaggaaagctgaccgccgtggatccggaaaccaatatgaatgtgtcagagatcattagttactggggatttccaagcgaagaatacctggtcgaaaccgaagatgggtacatcctttgcctgaaccgaataccccatggtcggaagaaccatagcgataaaggcccgaaacctgtggtgttccttcagcatggactccttgcggattcgtccaactgggtgacgaatctggcaaattcatcgctgggattcatcctggcggatgccggttttgacgtgtggatgggcaactccagaggcaacacttggtccagaaagcataagaccctttccgtcagccaagacgaattttgggcattttcctacgatgaaatggccaagtatgatctccccgcgtcgatcaactttattctgaacaaaaccgggcaagaacaagtgtactacgtcggccactcgcaaggaaccaccattgggtttatcgccttctcgcagattcccgaactggccaagagaattaagatgtttttcgcactgggacccgtggcatcagtggccttctgtacttcgcctatggccaaacttggacgactccctgatcacctgattaaggacctgtttggtgataaggaatttctcccgcaatcggcgtttcttaagtggctgggtacccatgtctgtactcacgtcatcctcaaggaattgtgtggaaatctttgctttctgttgtgcggattcaatgagagaaatctcaacatgagccgagtcgacgtgtacaccacccactcaccagcgggtacctcggtgcagaacatgcttcattggtcccaggcggtgaagtttcagaaatttcaagcattcgattggggcagctccgcaaagaactacttccactacaatcaatcctacccacccacttacaatgtcaaggacatgctggtgccaaccgcagtgtggagcggaggacatgattggctggcagatgtgtacgatgtgaacatacttcttacgcaaataactaacctcgtgtttcacgagagcattcccgagtgggagcatctcgatttcatttggggcctggacgcaccgtggagactgtacaacaagatcattaaccttatgcggaagtaccag

SEQ ID NO: 15699 - DNA, 1197 bp, synthetic construct
  misc_feature 1..1197: note = source = /note="Description of Artificial Sequence: Synthetic coding sequence"
  source 1..1197: mol_type = other DNA
atgaagatgcgctttctgggactggtggtatgtctcgttctgtggacactacacagcgaaggcagtagagggaaactcactgccgtcgatcccgagactaatatgaacgtgtcagagatcatttcttattggggctttcccagtgaggagtatctcgtcgaaaccgaggatggatacattttgtgcttgaaccgaatccctcatggccgcaaaaatcattctgataaaggaccaaagcccgtcgtcttcctgcaacacggactgctcgctgacagttcaaactgggtcaccaatctggcgaattccagcctggggttcattctggctgatgccggattcgacgtatggatgggcaactctaggggcaatacctggtctcggaagcacaaaaccctgtccgtgtcacaggacgagttttgggcattttcctatgatgagatggctaaatatgacctgcccgcgagcataaatttcatcctgaataaaactggtcaggagcaggtgtattacgttgggcactctcagggcaccaccattggatttatcgcgttcagccagatacccgagctagcaaagagaataaaaatgtttttcgcgttgggacctgtggcatcagttgcattttgcactagcccaatggccaagctggggcgcctgcctgatcaccttattaaagacttattcggagataaggagttccttccccagtccgcattcctgaagtggctcggaactcacgtctgcacacacgtgatcctgaaggaactgtgcggtaacctttgctttctgttgtgtggattcaatgaacggaatcttaacatgtcccgcgtagacgtttacacaacacattccccggctgggacgagtgtgcaaaatatgctgcactggagtcaggccgtgaaatttcagaaatttcaggcatttgattggggaagctctgccaagaactattttcactataatcagtcgtacccgccaacatataatgtcaaggacatgttggtaccaactgcggtttggagcggtgggcacgactggttggccgatgtttatgacgtgaacattctcctgacacaaatcacaaacctcgtgttccacgaatctataccagaatgggaacacctagatttcatctggggccttgacgcaccgtggagactgtataataaaattataaatctgatgaggaaataccag

SEQ ID NO: 15700 - DNA, 1197 bp, synthetic construct; identical to SEQ ID NO: 15699
  misc_feature 1..1197: note = source = /note="Description of Artificial Sequence: Synthetic coding sequence"
  source 1..1197: mol_type = other DNA

SEQ ID NO: 15701 - DNA, 1197 bp, synthetic construct
  misc_feature 1..1197: note = source = /note="Description of Artificial Sequence: Synthetic coding sequence"
  source 1..1197: mol_type = other DNA
atgaaaatgaggttcctcggcttagtggtgtgcctggtgctttggacactacatagtgagggtagccgagggaaattgaccgctgtagatccggaaaccaacatgaacgtgagcgaaattatttcatactggggctttccctctgaggaatatctggtcgaaaccgaggacggctatatcctgtgcctgaaccgaatcccccatggtagaaagaatcacagtgataaaggaccaaaaccagtcgtgttcctgcagcacggtttgctggcagactcctcgaactgggtgactaatttggctaacagcagcttggggtttattctggcagatgccgggtttgacgtatggatgggcaattccagaggaaacacctggagccgcaagcataaaactctgtccgtatctcaagacgagttctgggctttttcttatgacgaaatggctaaatacgaccttcctgcttcaatcaatttcatcctgaataagactggtcaggagcaagtgtattacgtggggcattctcagggtaccacaattgggtttatcgcgttcagtcagattccagagcttgctaaaaggataaaaatgttttttgccctgggaccggttgcatcagtggcattttgtacaagcccaatggcaaagttagggagactgccagaccaccttatcaaggatctgtttggcgacaaagaatttttacctcaatctgcgtttctgaagtggctgggaactcatgtttgtacccacgtaatccttaaagaactctgcggaaatttgtgtttcctcctctgcggattcaatgagcgaaacctgaatatgtctcgagtggatgtgtatacgacacactcacctgccgggacttctgtgcagaacatgctgcactggtcccaggcagtgaaattccagaaattccaggcattcgattgggggtcttccgccaaaaactattttcactacaatcagtcttatccaccaacatataatgtaaaggacatgctggtgcctacggctgtatggagcggggggcacgactggttagctgacgtatacgatgtgaatattttactgacacaaatcaccaacctggtgttccacgagtctataccggaatgggagcacttagattttatttggggcttggacgcgccctggaggctatataataaaataatcaatctgatgcgaaaataccaa

SEQ ID NO: 15702 - DNA, 1197 bp, synthetic construct
  misc_feature 1..1197: note = source = /note="Description of Artificial Sequence: Synthetic coding sequence"
  source 1..1197: mol_type = other DNA
atgaagatgagatttctgggacttgtcgtgtgtctcgtgctgtggactttgcatagcgaagggtccaggggcaaacttaccgccgtggatccggagactaatatgaacgtgtcggagatcatttcgtactggggatttccatccgaagaatacctcgtggaaaccgaagatggatacattctgtgccttaaccgaattccacatggcagaaagaatcatagcgacaaaggtcctaaacccgtcgtctttctccaacatggacttctcgccgattcctcaaactgggtgaccaaccttgcaaacagcagcctggggtttattcttgcagatgccggtttcgatgtgtggatgggcaactcaaggggtaatacttggtccaggaagcacaagacccttagcgtgagccaagacgagttttgggcattttcatatgatgagatggctaaatacgatctcccagcttctatcaacttcatccttaacaagaccggacaagagcaagtgtactacgtgggtcattcgcagggtactaccattggtttcattgcatttagccagattccagagcttgccaagagaatcaagatgtttttcgcgctgggtcccgtggcctcagtcgcattctgtacttcccctatggccaagctgggtagacttccagatcatctgatcaaggacctgtttggcgataaggaattcctgccgcagagcgccttcctgaagtggctcggtacccatgtgtgcactcacgtgatccttaaggagctctgtggaaacctgtgttttcttctctgtggattcaacgaacgaaacctgaatatgtcacgggtggatgtgtacactacccattctccagcaggaaccagcgtgcagaatatgcttcattggtcgcaggcagtcaagtttcagaagtttcaggcttttgattggggatcctccgcgaaaaactattttcattacaaccaatcgtaccctcctacttacaacgtgaaagacatgctggtccctactgccgtgtggtccggcggacatgattggttggcagatgtgtatgatgtcaacatactcctcacccaaattacgaatctggtgtttcacgagagcataccggaatgggaacatctggactttatctggggactggacgcaccctggcggctttacaacaagatcattaacctcatgaggaagtatcag

SEQ ID NO: 15703 - DNA, 1197 bp, synthetic construct
  misc_feature 1..1197: note = source = /note="Description of Artificial Sequence: Synthetic coding sequence"
  source 1..1197: mol_type = other DNA
atgaaaatgcggtttctgggattggtcgtctgcctggtgctttggaccttgcatagcgaaggatcacgcggaaagctgactgccgtggatcctgaaaccaacatgaacgtgtcggaaatcatttcatactggggatttccatctgaagagtacctcgtggagacggaggacgggtacatcctgtgtctcaatcgaatcccacacgggaggaaaaatcattccgacaaggggcccaaaccggtggtgttcttgcagcacggccttttggccgacagcagcaactgggtaaccaatctggccaactcctcgctgggtttcatcctggccgacgccggcttcgacgtgtggatgggaaattcccggggaaatacctggtcccggaagcataaaactctgagcgtctcacaagacgaattctgggctttctcgtacgacgagatggctaagtatgatctcccggcatcgatcaacttcattctgaataagaccgggcaggaacaggtgtactacgtgggccactcccaggggactaccatcgggttcatcgcattctcccagatcccagagcttgccaagcgtatcaagatgttctttgccctcggacccgtcgcatccgtcgccttctgcacttccccaatggctaaactgggtaggctgcctgaccatctgatcaaagatctgtttggagataaggagttcctgccgcaaagcgccttcctgaaatggctcggtacccacgtgtgtactcatgtcattctgaaggaactctgcggaaacctgtgctttctcctgtgcggattcaatgagcggaatctgaacatgtccagagtggatgtgtataccactcactcccctgccgggacttccgtgcagaacatgctgcactggtcccaggcagtcaagttccaaaagtttcaagcgttcgactgggggagctccgcgaaaaactacttccattacaaccagagctaccctcctacttacaatgtgaaggacatgctcgtcccgaccgctgtgtggtctggaggccacgactggttggcggacgtttacgatgtcaacatcctgctcacgcagatcaccaacctggtgttccacgaatccatcccagagtgggaacacttggatttcatctggggcctggacgctccgtggcggctgtacaacaagatcattaacttgatgcgaaagtatcag

SEQ ID NO: 15704 - DNA, 1197 bp, synthetic construct
  misc_feature 1..1197: note = source = /note="Description of Artificial Sequence: Synthetic coding sequence"
  source 1..1197: mol_type = other DNA
atgaagatgcgcttcttagggctggttgtgtgcctggtgctgtggaccctgcacagtgaagggtctcggggtaagctgacggcagtggatcctgagaccaacatgaacgtgtctgagatcatatcttattgggggtttccctccgaggagtacctggttgagaccgaagacgggtacattctgtgtctgaacaggatcccacacggaaggaaaaatcacagcgacaaggggccaaagcccgtggtttttctgcagcacgggctcctggcagactcctccaactgggtgacgaacctggccaattcaagcctggggttcattctggcggatgctggcttcgatgtatggatggggaacagccgaggcaacacttggagccgcaaacacaagacgttgtccgtaagccaggacgagttctgggctttttcctacgacgagatggcaaaatatgatctccccgcctccataaactttattctgaacaaaaccggacaagagcaggtgtattacgtgggacattcccagggcactacaattgggtttatcgcatttagccaaatacctgagctggcgaagaggattaagatgtttttcgccctaggccctgttgctagtgtggcattttgtactagccccatggcaaagctggggaggttgccagaccacctgattaaggacttgttcggggacaaggagttcctcccccagtcagcctttctgaaatggctcgggacacatgtgtgtacacacgtaatcctcaaggagctctgcggaaacctctgtttcttactttgtggctttaatgaaagaaatcttaacatgtccagagtggacgtgtatacgacacatagcccggccggcacgtccgtgcaaaacatgcttcactggtcgcaggctgtcaagttccagaagttccaagcatttgactggggtagctccgccaagaattactttcattacaatcagagctacccaccaacatacaacgtgaaagacatgctcgtccctaccgcagtatggtccgggggacatgactggctggcagacgtgtacgacgtgaacatcctgttgacacagattactaacttggtgttccacgagtccatccccgaatgggagcatctggatttcatttgggggttggacgccccatggcgtctctacaataaaatcattaatctcatgcggaaataccag

SEQ ID NO: 15705 - DNA, 1197 bp, synthetic construct
  misc_feature 1..1197: note = source = /note="Description of Artificial Sequence: Synthetic coding sequence"
  source 1..1197: mol_type = other DNA
atgaagatgcgtttcctggggctcgtggtgtgcttggtgctatggaccctccatagtgaaggctcacgtggcaagctcactgccgtcgatcccgaaaccaacatgaacgtgtctgagattatttcctattggggatttccgtctgaagaatatttggtggaaaccgaagacgggtacatcctgtgtctgaacagaattccccacggaaggaagaatcacagcgacaagggacctaaacccgtggtttttctgcaacacggactcctagctgactccagcaactgggtgacgaatttggccaactcttcactggggtttatcctggccgatgctggattcgacgtttggatgggaaactcacggggaaatacctggtctcggaagcacaagactctgtcagtatcccaggacgaattctgggctttctcttatgatgagatggcaaaatatgaccttccagccagtattaatttcatactcaataaaactggacaggagcaggtttactacgttgggcatagtcagggcactacaattgggttcattgctttctcccaaatcccagaactcgccaagcggataaaaatgttttttgctcttggccctgtcgcgagcgtggctttctgcacctctcccatggcgaaactggggcgtctccccgaccacctcatcaaggatcttttcggtgataaagaatttctcccccaaagcgcctttctgaagtggctggggacccacgtttgcacccacgttatcctcaaggagctgtgcggcaatctttgtttccttctttgtggatttaatgagaggaacttaaacatgtcgagggtggatgtgtatacaacccactctccggcagggacctctgtgcagaacatgcttcattggtcacaggccgtgaaatttcagaaattccaggcgtttgactgggggtctagcgcaaagaattattttcattataaccagagttacccccccacttataacgtgaaggacatgttggtaccaactgccgtgtggtcaggaggccatgactggctggccgatgtttatgacgtgaacattcttctgacgcaaattacaaacttggtctttcacgagtcaatccccgagtgggagcaccttgacttcatctggggcctggatgccccctggcgactgtacaacaaaattattaacctgatgaggaagtatcag

SEQ ID NO: 15706 - DNA, 1197 bp, synthetic construct
  misc_feature 1..1197: note = source = /note="Description of Artificial Sequence: Synthetic coding sequence"
  source 1..1197: mol_type = other DNA
atgaaaatgaggtttctgggcctggtggtctgtttggtcctttggacccttcactccgagggatcgagaggtaaacttaccgcggtggatcctgaaaccaatatgaatgtgtcggagattatctcgtactggggctttccatcggaagaataccttgtggaaaccgaagatgggtacattctgtgccttaatcgaatccctcacggtcgcaagaaccattcagacaaaggacccaagccagtggtgtttcttcaacatggactccttgcggacagctcaaactgggtgaccaatctcgcgaactcatcccttggctttattcttgccgatgcaggcttcgatgtctggatgggtaacagcagaggaaacacctggtcacgaaaacacaaaacgctctcggtgagccaggatgagttttgggcattttcatacgatgaaatggcaaagtacgacctccccgcatcgattaactttatcctgaacaagaccggtcaagagcaggtgtactacgtgggacattcccagggaactaccatcggctttattgcgttttcacaaatacctgaacttgctaagagaatcaagatgttttttgcattgggtccagtggcctccgtcgccttttgtacttcgccgatggcaaaacttggtcggcttcccgatcatctcattaaagacctgttcggagacaaggaatttctgccacagagcgcctttcttaagtggctgggaacgcatgtttgcactcacgtgatcctcaaagagctgtgtggcaatctttgctttcttctctgtggttttaacgagcggaaccttaacatgtcgcgggtggacgtgtacacgacccatagccccgccggaacgtcagttcaaaacatgctgcattggtcccaggcagtgaagttccagaaatttcaagcattcgattggggatcctccgccaagaactactttcactacaaccaatcgtatccccccacttacaatgtcaaagatatgcttgtgcctacggcagtgtggtccggtggccacgattggctggccgatgtctacgacgtgaatatactcctcacccagatcactaatctggtgttccatgaatccattcctgagtgggagcatctcgatttcatatggggacttgatgcaccttggcgcctttacaacaagataatcaatcttatgcgtaagtaccaa

SEQ ID NO: 15707 - DNA, 1197 bp, synthetic construct
  misc_feature 1..1197: note = source = /note="Description of Artificial Sequence: Synthetic coding sequence"
  source 1..1197: mol_type = other DNA
atgaagatgcggttcctaggactcgtagtttgtcttgtcctgtggacgctccacagcgagggctctagggggaagctgacggcggtcgatcccgagactaatatgaatgtgagcgagattataagctactgggggttcccaagcgaagagtatctcgtggaaactgaagacggatatatcttgtgcctgaatcgaatcccacatggcaggaaaaaccactcagacaagggtcccaagccagtggtctttttgcagcatgggctactagctgactcatccaattgggtcacgaatctcgccaactcatcactgggatttattctggccgacgccggatttgacgtgtggatgggcaactccaggggaaacacctggagtagaaagcacaagactcttagcgtatcccaggacgaattttgggcgtttagctatgacgagatggccaaatacgatctgcccgcctccatcaatttcattcttaacaagacaggtcaggagcaagtgtattacgtggggcacagtcaaggcacaacaattggcttcatagcattttctcaaatacccgaacttgcgaaacgcattaaaatgttttttgctctcggcccagtggcctcagtggccttttgtaccagccctatggccaaactcggccgcctgccagaccatctcatcaaggatctgttcggcgacaaggagtttcttccacagtcagctttcctgaaatggctcgggacccacgtgtgcactcatgtaattctgaaggaactgtgtggaaacctgtgcttcctgttgtgtggcttcaacgagaggaacctgaatatgagtagggttgatgtgtacactacgcacagtcccgcgggcactagcgtgcaaaatatgctccattggtcccaggcggtaaaattccagaaattccaggccttcgactggggtagctccgctaagaactacttccactacaatcagagctatccaccaacctacaacgtgaaagatatgctggtgcctactgctgtctggagtgggggacacgactggttagccgacgtgtatgatgtaaacattctgctcacacaaatcactaatttggtcttccacgagtccatccctgaatgggagcacctcgacttcatttggggtctggatgctccctggcggctctacaataaaattatcaatctcatgcgcaaataccag

SEQ ID NO: 15708 - DNA, 1197 bp, synthetic construct
  misc_feature 1..1197: note = source = /note="Description of Artificial Sequence: Synthetic coding sequence"
  source 1..1197: mol_type = other DNA
atgaaaatgcggttcctcggactggtcgtctgtttggtgctgtggactctgcactcagagggctctagaggaaaattaactgctgtagaccccgaaacgaacatgaacgtgtctgaaataatttcttattggggctttcctagcgaggagtacctggtagaaaccgaggatgggtatatcctttgcctaaaccgtattccacatggaaggaaaaaccatagcgacaaaggtcccaagccggtggtgtttctacagcacggcttgttggctgattcatcaaattgggtgacaaatctcgccaattcttccctgggattcatcttagccgacgcgggttttgatgtctggatgggtaattctcgtgggaacacatggtctaggaaacacaaaacactgtctgtaagccaggatgagttctgggccttcagctatgatgagatggctaaatacgacttacctgccagcattaactttatccttaacaagaccggacaagaacaggtgtactacgtaggccatagccaaggaaccaccatcggatttatcgctttcagtcaaattcccgagctcgctaagcgcatcaagatgttcttcgccctgggccccgtcgcttccgtcgcgttctgtacgtcaccgatggccaaactgggaagactgccagatcacctgataaaggatttattcggggataaagagtttctcccccaaagcgcgtttttgaagtggctgggcacacatgtatgtacccatgtgatactcaaagaactctgcggaaatctgtgttttctcctgtgcgggttcaatgagcgaaacctgaacatgtctagggtagacgtatacacgacacatagccccgctggtacaagcgtacagaacatgcttcattggtcacaagctgtgaaatttcagaagtttcaagctttcgattggggctcctctgctaagaattacttccattacaaccagtcatacccacccacctacaatgtgaaggacatgcttgtccctacggctgtgtggtctggcggccacgattggctggcagacgtgtatgatgtgaacatactgcttacgcagatcactaacctagtgtttcacgagtcgatccctgagtgggaacaccttgacttcatatggggcttggatgctccgtggcgcctgtataataaaattatcaacctgatgcgaaaataccag

SEQ ID NO: 15709 - DNA, 1197 bp, synthetic construct
  misc_feature 1..1197: note = source = /note="Description of Artificial Sequence: Synthetic coding sequence"
  source 1..1197: mol_type = other DNA
atgaaaatgcgttttttaggtctagtagtatgtttagttttatggacgctacattcggaaggttcgcgaggtaaattaacggcggtagatccggaaacgaatatgaatgtatcggaaataatatcgtattggggttttccgtcggaagaatatttagttgaaacggaagatggttatatactatgtttaaatcgtataccgcatggtcgtaaaaatcattcggataaaggtccgaaaccggtagtatttctacaacatggtttactagcggattcgtcgaattgggttacgaatttagcgaattcgtcgttaggttttatactagcggatgcgggttttgatgtatggatgggtaattcgcgtggtaatacgtggtcgcgaaaacataaaacgttatcggtttcgcaagatgaattttgggcgttttcgtatgatgaaatggcgaaatatgatctaccggcgtcgataaattttatattaaataaaacgggtcaagaacaagtttattatgtaggtcattcgcaaggtacgacgataggttttatagcgttttcgcaaataccggaattagcgaaacgaataaaaatgttttttgcgctaggtccggttgcgtcggttgcgttttgtacgtcgccgatggcgaaactaggtcgtctaccggatcatttaataaaagatctatttggtgataaagaatttctaccgcaatcggcgtttttaaaatggttaggtacgcatgtttgtacgcatgtaatactaaaagaattatgtggtaatctatgttttttactatgtggttttaatgaacgtaatttaaatatgtcgcgtgtagatgtttatacgacgcattcgccggcgggtacgtcggtacaaaatatgctacattggtcgcaagcggtaaaatttcaaaaatttcaagcgtttgattggggttcgtcggcgaaaaattattttcattataatcaatcgtatccgccgacgtataatgtaaaagatatgttagttccgacggcggtttggtcgggtggtcatgattggttagcggatgtttatgatgtaaatatattattaacgcaaataacgaatttagtatttcatgaatcgataccggaatgggaacatttagattttatatggggtctagatgcgccgtggcgattatataataaaataataaatttaatgcgaaaatatcaa

SEQ ID NO: 15710 - DNA, 1197 bp, synthetic construct
  misc_feature 1..1197: note = source = /note="Description of Artificial Sequence: Synthetic coding sequence"
  source 1..1197: mol_type = other DNA
atgaaaatgagattcttaggcctggtggtgtgcttggtgctttggacgctgcactccgaaggcagcagaggcaagctcaccgctgtggaccctgaaaccaatatgaatgtgagtgagatcatctcttattggggcttcccatcagaggagtatctcgtggagaccgaggacgggtacattctgtgcctgaacaggattccccacgggcggaagaaccatagcgacaaagggcccaaaccagtagtttttctgcagcatggactactagcggatagctcaaattgggttacgaatctggccaactcttcactcggtttcatcctggctgacgcgggttttgatgtgtggatgggcaactctaggggtaatacatggtcccgcaaacacaagactctgagtgtgtcccaggatgagttttgggcttttagttatgacgagatggccaagtatgacttacccgctagcataaatttcatcttgaataagaccggacaggaacaggtctactatgtgggacactctcaaggcaccacgatcggcttcatagctttcagccagataccggagttggcaaagcggatcaagatgttttttgcactggggccagtagcctctgtagcattctgtacttccccaatggcgaaactcggcaggctgcccgatcacttaattaaagacttatttggtgacaaggagtttttgccacagagtgccttcttgaaatggttagggacccacgtatgcacccacgtgatcttgaaagagctgtgtggcaatctgtgcttcctgttgtgcggctttaacgaacggaacctgaacatgagcagggtggacgtctatacgacacactcacctgcaggcactagcgttcaaaacatgctgcattggtcgcaagccgtgaagtttcagaaatttcaagcttttgattggggatccagtgcaaagaactactttcattacaatcagtcttacccccccacctacaacgtgaaggatatgctcgttcccaccgccgtgtggtccggaggccacgattggctggcagacgtgtacgacgtgaatattctgctcacacaaattactaatctggtcttccacgaatccattcctgagtgggaacacctggacttcatatggggcctggatgcaccttggagactctataataagataataaacctgatgagaaaatatcag

SEQ ID NO: 15711 - DNA, 1197 bp, synthetic construct
  misc_feature 1..1197: note = source = /note="Description of Artificial Sequence: Synthetic coding sequence"
  source 1..1197: mol_type = other DNA
atgaagatgcggtttctgggattggtcgtgtgtcttgtgctgtggacgcttcatagcgaaggttcgcgcgggaagctgactgccgtggatccagagacgaacatgaacgtgagcgaaatcatctcttactggggtttcccgagcgaggagtacctggtggagactgaggatggctatatactctgtcttaatcgcatcccacacggcagaaagaaccattcggataagggacctaagccagtcgtgttcctgcagcatggactgctggcggactcctcaaactgggtgaccaacctcgcaaattccagcctcggatttatcctggcggacgccggcttcgatgtctggatgggaaactcgagaggaaacacctggtcccgcaaacacaagactctgagcgtctcccaggacgaattctgggcgttctcgtacgacgaaatggcgaagtacgatctcccagcatccattaactttatcctgaacaagacgggacaagagcaagtgtactacgtgggacattcccaaggaactactatcgggtttatcgctttttcacaaattccggagctcgcgaagaggattaagatgttcttcgccctgggtcctgtggcatcagtcgccttctgcactagccctatggcaaaactgggccggctgcctgaccatttgatcaaggatctttttggtgataaggagtttctcccccagtcggccttcctgaagtggctgggaacccacgtctgcactcacgtgatcctgaaagagctgtgcggaaacttgtgcttcctgctgtgcggattcaacgaacggaacctcaacatgtcccgggtggacgtgtacaccacccatagcccggccggaacttccgtgcagaacatgttgcactggagtcaggccgtgaagttccaaaagttccaggccttcgattggggatcgtcagccaaaaactacttccactacaaccagtcttacccaccaacttacaatgtcaaggacatgctggtgccaaccgccgtgtggtccggggggcacgactggctcgccgatgtgtacgatgtgaatattctcttgacccaaatcaccaatctcgtgttccacgagagcatccctgagtgggaacacctcgatttcatctggggcctcgatgcaccgtggcgcctgtacaacaagattatcaacctgatgaggaagtaccaa

SEQ ID NO: 15712 - DNA, 1197 bp, synthetic construct
  misc_feature 1..1197: note = source = /note="Description of Artificial Sequence: Synthetic coding sequence"
  source 1..1197: mol_type = other DNA
atgaagatgcgcttcctgggactcgttgtgtgcctagtgctgtggacactccattcagaagggagtcgagggaaacttactgccgttgatccggaaacaaacatgaacgtgtctgagatcatttcttactggggtttcccttcggaggaatatctggttgagacagaggatgggtacatactgtgcctcaacagaataccacatggaaggaagaaccattcagataaaggcccgaagcctgtcgtgttcctgcaacacggcctcctggcagactcttcaaactgggttaccaatctggccaattcatcattaggcttcatattggccgacgctggctttgatgtgtggatgggaaatagccgggggaacacctggagtagaaaacataagaccttgtccgtatcccaggacgagttctgggccttctcctatgacgagatggccaaatatgacctccccgccagcatcaattttattcttaacaaaaccggacaggaacaagtatattatgtcgggcactctcaggggaccaccattggatttatcgccttctcccagatacccgagctggcgaagagaataaaaatgttcttcgcactggggcctgtcgctagcgtcgccttctgtacctctccaatggccaagctgggccgcctccctgaccatttgatcaaggacctcttcggagacaaagaatttctaccacagtcagcctttctcaagtggctggggacccatgtgtgtacacatgttatattgaaggaactgtgcggcaacctctgctttcttctgtgcggcttcaatgagcgcaacctaaatatgtccagggtggatgtgtacacaacccattctccggcaggaacaagtgtccagaacatgctacattggagtcaggctgtcaaatttcagaagtttcaggccttcgattggggcagctccgccaagaactactttcattataaccagagttacccccctacctataacgtgaaggatatgctggtgcctaccgcagtctggtccggtggccacgactggctcgcagatgtgtacgacgtgaatatcctcctcactcagatcacaaacctggtgtttcatgagagtattccggagtgggaacaccttgacttcatctgggggcttgacgccccctggcgactgtacaataagataattaacctcatgcgtaaataccag

SEQ ID NO: 15713 - DNA, 1197 bp, synthetic construct
  misc_feature 1..1197: note = source = /note="Description of Artificial Sequence: Synthetic coding sequence"
  source 1..1197: mol_type = other DNA
atgaaaatgaggtttctgggtcttgtggtctgccttgtgttgtggaccctccactcagagggatcccgtggtaagctgactgctgtagaccccgagaccaacatgaatgtatcagagatcatcagctattggggcttcccatccgaagaatacttggtggagacagaagatggatatatcttgtgtctgaacagaatccctcatggccgcaaaaaccatagcgacaagggacccaagccagtcgtattcctgcaacacggacttctcgctgactcttccaattgggtgaccaacctggccaacagttcactcggatttatcctcgctgatgccggctttgacgtctggatgggtaatagccgcggaaacacttggagtaggaagcacaaaaccctctcagtgtcacaggacgaattctgggctttctcctacgacgaaatggctaagtatgacctgcccgctagcatcaactttattttgaacaagaccggacaggaacaagtgtattacgtcggacactcccagggtaccaccataggcttcatcgccttcagtcaaatccccgagcttgctaaacgcataaagatgttctttgcacttggacccgtggcaagtgttgctttctgcacttcccctatggcaaagctgggtagacttcctgaccatctgattaaggacctctttggtgataaggaatttctcccccaatccgccttcctcaagtggctgggaacacacgtctgtacccacgtgattctgaaagagctttgcggaaatttgtgctttcttttgtgcggtttcaacgaaagaaaccttaacatgtcccgtgtagatgtgtatactacccactcaccagctggcacatccgtccaaaacatgcttcattggtctcaggcagtcaagtttcaaaagtttcaagcttttgactggggctcatccgccaaaaactattttcattataatcaatcatatccccctacttacaatgttaaggacatgctcgtgccaactgctgtgtggagtggaggtcacgattggcttgctgacgtctatgacgtcaatattcttctcactcagatcactaatttggtgttccacgaaagcattcccgagtgggaacacctggacttcatctggggcctggatgcaccttggcgcctgtacaacaaaatcattaacctgatgaggaaatatcag

SEQ ID NO: 15714 - DNA, 1197 bp, synthetic construct
  misc_feature 1..1197: note = source = /note="Description of Artificial Sequence: Synthetic coding sequence"
  source 1..1197: mol_type = other DNA
atgaagatgaggttcttgggactggtggtgtgtctcgtgctgtggactctgcattcagagggttcccgaggcaaactgaccgccgtcgatccagagaccaatatgaacgtctcagagatcatctcttattggggctttccatccgaggaataccttgtggaaacagaagacgggtacatcctgtgcttgaaccgcataccgcacgggcgcaagaatcactctgataaaggccctaaaccggtggtgttccttcagcatggcctgttagccgattcctcgaattgggttacaaacctggcaaatagttcgttgggtttcattttggccgatgcagggttcgacgtttggatgggcaactctaggggcaatacatggtcgcggaaacataagacgctctcagtgtcacaggacgagttttgggcattcagttatgacgaaatggccaagtatgatctgcctgccagcattaattttattctgaacaagacggggcaagagcaggtgtattacgtaggacacagccaggggaccaccatagggtttattgcattctcccagattcctgagctggctaaaagaatcaaaatgtttttcgctctgggtcccgtggcaagtgtcgctttctgtacttcccccatggctaagcttggccgtctgccggatcacctgatcaaagatctgttcggcgacaaggagttcctaccccagagtgcctttttaaagtggctaggcactcatgtgtgtacccacgtgattttaaaggaactatgtggaaacctgtgttttctgctgtgcgggtttaacgagcggaatttgaatatgtcaagggtcgacgtgtataccacccacagtccggcaggcacctctgtacaaaatatgctgcactggagccaggccgttaaattccagaagttccaggctttcgactggggatctagtgccaagaactatttccactacaaccagtcttatccccctacatacaacgttaaagatatgttggttccgaccgctgtctggtccggaggacacgactggctggccgatgtgtacgacgtgaacatcctgctcacccagatcaccaatctggtctttcacgagtctatacccgagtgggagcaccttgacttcatctggggcctcgatgctccatggcgcctctataataagattataaatcttatgcgaaagtaccag

SEQ ID NO: 15715 - DNA, 1197 bp, synthetic construct
  misc_feature 1..1197: note = source = /note="Description of Artificial Sequence: Synthetic coding sequence"
  source 1..1197: mol_type = other DNA
atgaagatgcgttttctcggcctcgtcgtttgcctcgtgctttggaccttacactccgaaggatctcgaggaaagctgaccgccgtggatccagagactaatatgaatgtgtctgagatcatcagctattgggggtttccgagcgaggaatacctcgtggagaccgaggacggatatatattgtgcctgaatcggattcctcacggcagaaaaaatcacagcgacaaggggccaaagcccgtggtcttcctgcagcacgggctgcttgcggattcttcaaattgggttacaaatctggccaatagttctctggggttcatcctcgctgatgcaggattcgatgtttggatggggaattctagggggaacacatggagtcgaaagcataagaccctctctgtaagccaggatgaattttgggcttttagctatgatgaaatggctaaatatgatttgcccgcatccataaactttattctgaataagaccggccaggagcaggtctactacgttggacactcccagggtacgacaatagggtttattgctttttcacagatccccgaactggccaaacgcattaagatgtttttcgctctgggtcccgtcgcttcagtggcattctgtaccagcccaatggctaagctgggacgattgcctgaccatttgattaaggacctattcggagataaagagttcctgccacagagtgccttcctgaaatggctgggcacacatgtgtgcacgcatgtgatactgaaagaattgtgcggaaatctgtgcttcttgctctgcggcttcaacgaaagaaacctgaacatgtccagagtggatgtgtacactacccattctcccgctgggacttctgtccaaaacatgctgcattggtcacaagccgtgaaatttcagaagtttcaggctttcgattggggtagtagtgccaagaactatttccattataaccagtcttatcctcctacttataatgttaaggacatgctagtccccaccgcagtgtggtctggtggtcacgactggctggcggacgtttacgatgtgaacattttgctgacgcagattacgaacctggtcttccatgagtctattcctgagtgggaacacctggacttcatatggggactcgacgccccctggaggctgtacaataagattattaaccttatgcggaagtaccaa

SEQ ID NO: 15716 - DNA, 1197 bp, synthetic construct
  misc_feature 1..1197: note = source = /note="Description of Artificial Sequence: Synthetic coding sequence"
  source 1..1197: mol_type = other DNA
atgaagatgcgcttcttgggactggtagtttgcttagtgctgtggacacttcactcggagggcagtaggggcaaattgacagctgtagacccggagaccaatatgaatgtcagcgagatcatttcttattggggtttcccatctgaagaatacctagtcgaaaccgaggatggttatatcctgtgtctaaatcgtattcctcatggaaggaagaatcattctgataagggtcctaagcccgtggttttccttcagcatggcctcctcgctgattccagtaattgggtcactaatttagctaatagtagtctgggcttcatccttgctgatgccggatttgatgtttggatgggcaattctcggggcaacacctggtcacgcaagcataaaacgcttagcgtgtcccaggacgagttctgggccttcagctacgacgagatggcgaaatacgatcttccagccagcattaactttatccttaacaagactggccaagaacaagtatattatgtcggccacagtcagggcactacgatcggctttatcgcattcagtcaaatacccgagttagccaaaaggatcaaaatgttcttcgcactggggcccgtggcttctgtggccttctgtaccagcccaatggccaaattgggaaggttgccagatcatctaattaaagatttgttcggcgacaaggagtttttgcctcaatccgcttttcttaaatggctgggcacgcatgtttgcacacacgtgatcttgaaggaactctgtggaaacctgtgcttcctcctttgtgggtttaacgagaggaatttgaatatgagtagagtggacgtgtacaccactcattcccctgccggaacttcagttcagaacatgttacattggtcccaagctgtgaaatttcagaaattccaagcttttgactggggatcttcagccaagaattacttccactataatcaaagctaccccccaacttacaacgtcaaagatatgcttgtgcctacagcagtgtggtcagggggccacgattggctggctgatgtttatgacgtgaatatattgctgacacagatcacaaatctcgtattccacgagtccatcccagagtgggaacacttggacttcatctggggactggacgctccttggaggctgtataacaagattattaatctgatgaggaagtaccaa

SEQ ID NO: 15717 - DNA, 1197 bp, synthetic construct
  misc_feature 1..1197: note = source = /note="Description of Artificial Sequence: Synthetic coding sequence"
  source 1..1197: mol_type = other DNA
atgaaaatgagattccttggattggtggtatgtctcgttttgtggacactgcactccgagggaagcagaggtaaactgacagctgtggatccggagacaaatatgaacgttagtgagataattagctattggggatttccctcagaggagtacctggtggaaaccgaggatggttatatcctctgtttgaacaggatccctcatggaaggaaaaatcactccgataagggcccaaagccagtagtgtttttgcagcacggacttctcgctgactcaagcaactgggtcacaaacctcgccaactcaagcctgggattcatcttggccgacgccggctttgacgtgtggatgggcaactcacgcggcaatacctggtccaggaagcacaagaccttgtctgttagccaggatgaattctgggccttcagctacgacgagatggcaaagtacgacctgcctgcgtccattaacttcattcttaacaaaactggtcaggagcaggtgtactacgttggacactcccagggtacaacaattggttttatcgcgttctcccagatacccgagctcgccaaacgcatcaaaatgttctttgccctgggccctgtcgcctccgtggccttctgcacgtctcccatggctaagctcggaagactgccagatcacctgataaaggacctgtttggtgacaaggaattccttcctcaatccgcctttcttaagtggcttggaacacacgtgtgcacacatgtcatcttgaaggagctgtgcggaaacctttgcttcctgctgtgcggattcaatgagcgcaacctcaacatgtcacgcgttgatgtctacaccactcacagcccggctggcacctccgtgcagaatatgctccactggtcccaggctgtaaagttccagaaatttcaagccttcgactggggctcatcagcaaagaattactttcattataaccagtcatatcctcctacatataatgttaaggacatgttggtgccgactgcggtctggtctggcggtcacgactggctggctgacgtgtatgacgttaacattctcttgacccaaatcaccaacctggtcttccacgagagcattcctgaatgggaacacctcgacttcatctggggtctcgatgctccctggaggctgtataacaaaataattaatttgatgcgcaagtaccag

SEQ ID NO: 15718 - DNA, 1197 bp, synthetic construct
  misc_feature 1..1197: note = source = /note="Description of Artificial Sequence: Synthetic coding sequence"
  source 1..1197: mol_type = other DNA
atgaagatgaggtttttgggcctggttgtgtgcttggtcctgtggaccttgcatagcgaaggttcccgaggaaaactgacggccgtggacccagagactaacatgaatgtgtccgaaatcattagctactggggtttcccaagtgaggagtatttggttgagaccgaggacggttatatcctgtgcctcaatcgaattccgcatggccgcaagaatcatagcgacaaggggccgaagcctgtggtctttctccaacacggtttgctggccgattctagcaattgggttaccaacttggccaactcttccttggggttcattctggctgatgctggttttgatgtgtggatggggaatagcagggggaacacttggtctagaaagcataaaacactgtccgtgagtcaggatgagttctgggccttttcctatgacgaaatggcaaagtacgatctgcccgcttccattaacttcatccttaataaaactgggcaggaacaggtctactatgttggtcattcccagggcacgactattggcttcattgccttctcccagatccccgaactcgctaagcggatcaaaatgttttttgcactgggccccgtggcctctgtggcattctgtacctccccaatggctaaactgggaaggctgcctgaccacctgataaaggacctctttggcgacaaagaatttctcccacagtccgcgttccttaagtggctgggcacccacgtgtgcacccatgtaatcctgaaagaactctgtgggaatctgtgcttcctgctgtgtggctttaacgagaggaatctgaatatgtccagggtggacgtatacaccacacacagcccggccggcacgagcgtccagaacatgcttcactggtcccaagccgtgaagtttcagaaattccaggccttcgactgggggagctcagccaaaaactactttcattacaaccagtcttatccacctacctacaacgtgaaagatatgcttgtccctaccgctgtgtggtcaggcggccatgactggctggctgacgtttatgatgtcaacattctgctgacacaaataacaaaccttgtcttccatgagtctattcctgaatgggaacatctggactttatctgggggctggatgccccttggcggttgtataacaagattataaatcttatgcggaagtaccag

SEQ ID NO: 15719 - DNA, 1197 bp, synthetic construct
  misc_feature 1..1197: note = source = /note="Description of Artificial Sequence: Synthetic coding sequence"
  source 1..1197: mol_type = other DNA
atgaagatgcgattcttgggcctggttgtgtgtctggtcctttggaccctgcactcggagggttccagaggcaaactgaccgccgtggatcccgaaaccaacatgaacgtgtcagaaatcatctcatattggggttttccttcagaagaatacctggtggagactgaggacggctacatcctctgcctgaataggatccctcacgggcgcaaaaatcactcagataaaggtcctaagcctgtcgtgtttttgcagcacggactcctggccgactcatccaactgggtgaccaatcttgcaaacagttccctgggcttcattctagctgatgccggtttcgatgtgtggatgggcaacagccgtggaaatacctggtctcggaaacacaaaacactcagtgtctcacaagacgagttctgggcgttctcctacgatgagatggccaagtacgatcttcccgcatctatcaacttcattttgaataaaacaggccaggaacaagtctactatgtgggtcacagtcaggggacgacaatcgggtttatcgccttttcacagatcccagagctcgccaagcgtattaaaatgttctttgccctgggacctgtggccagcgtggcattctgcacttctcccatggccaagttgggacgcctgccagaccacttgattaaagacttattcggggacaaggagtttctgccccaatctgcattcctcaagtggctggggacccatgtatgtacgcacgtaatcttaaaggagctgtgcggcaacctttgctttctgctttgtggttttaatgagcgaaatctcaacatgtccagagtggatgtctataccacacacagtccggccggtacctcagttcaaaacatgttacactggtcccaggcagtgaaatttcagaaatttcaggcattcgactggggctcttctgccaaaaactattttcactataatcagagttatcctcccacttacaatgtgaaggacatgctggtccctacagctgtatggtccggagggcacgattggcttgccgatgtgtacgacgttaacatcttgcttacccagataacaaatctcgtcttccacgaatccattcccgagtgggagcacttggattttatatggggtttagacgctccctggcgcctatataataaaattataaatctcatgaggaagtatcag

SEQ ID NO: 15720 - DNA, 1197 bp, synthetic construct
  misc_feature 1..1197: note = source = /note="Description of Artificial Sequence: Synthetic coding sequence"
  source 1..1197: mol_type = other DNA
atgaaaatgcggtttctgggccttgtggtctgtctggtgctgtggaccctgcactcagaggggtctcgtggaaagcttacagcagttgaccctgaaaccaatatgaatgttagtgagatcattagctactggggatttccatccgaggagtacctggtcgaaactgaagatggttatatcttatgcctcaatcgaataccacacggccggaaaaaccatagtgataagggtccaaagccagttgtttttttacagcacggtctgctggccgatagctcaaattgggttacaaacctggccaattcttcgctaggctttatcctggccgatgccgggttcgatgtgtggatgggtaacagcagaggaaatacttggtctcgcaagcacaagacgctgagcgtctcgcaggacgagttctgggctttctcctatgacgagatggccaaatacgacctgcccgcttcgataaactttatactgaacaagacgggtcaagaacaggtgtactacgtcggtcacagccagggtaccacaatcgggttcatcgcattctcgcagatccccgagctggccaagaggattaagatgttttttgctcttggacctgtggctagtgtggcattttgtactagtccaatggcaaagcttggtagactacccgaccatctgatcaaggatctttttggagacaaggagtttttaccacaaagtgccttcctcaaatggctcgggacccacgtgtgtacccacgtgatactgaaagaactctgcggtaacttatgtttcttgttgtgcgggttcaatgaacgcaatttaaatatgagcagagtggacgtatacactacacatagtccggcaggtacatcagtccagaatatgctccactggtcacaggccgtgaaattccagaagttccaggcattcgactgggggagtagtgctaaaaattacttccactataaccaatcatacccgccgacatacaacgtaaaagatatgcttgtgcctacggcagtgtggtctggtgggcacgactggctcgctgatgtgtatgatgttaacattctcctgacccagattacaaacttggtgttccatgagtccattccggagtgggagcatctcgatttcatttgggggctcgatgccccttggagactctacaataaaatcattaaccttatgcggaaatatcag

SEQ ID NO: 15721 - DNA, 1197 bp, synthetic construct
  misc_feature 1..1197: note = source = /note="Description of Artificial Sequence: Synthetic coding sequence"
  source 1..1197: mol_type = other DNA
atgaagatgcgttttctgggattagttgtgtgccttgtgctctggaccttacactcagagggctcacggggcaagctaaccgccgtggatcccgaaactaacatgaatgtctccgaaatcatttcatattggggtttcccctccgaggagtacttggtggagacagaagacgggtatatactgtgccttaatcgcattcctcacggcagaaagaaccacagtgacaagggtccaaagccagtggtctttctgcagcacgggctcctagccgactcctctaactgggtgactaacctggcaaacagtagcctgggtttcatcctggctgacgcaggttttgacgtttggatgggtaactctagaggcaacacttggtccaggaagcacaaaactctcagtgtgagtcaggacgagttctgggccttttcatacgacgagatggcaaaatacgacctgccggcttcgatcaactttatcctcaataagaccggacaggagcaggtgtattatgtgggtcattcacagggcactacaatcggattcatagctttctcccaaattccagaactggctaagcgcattaaaatgtttttcgccctggggcccgtcgcgagcgtggcattttgtacatcccccatggcgaagctcggtcgcctgccagatcatctgattaaggacctctttggagataaggagttcctcccgcagagcgcttttttgaagtggttgggcactcatgtttgtacccatgttatcctcaaggagctttgcggcaatttgtgctttctgctgtgtggttttaacgaacggaatctgaacatgtctcgggttgacgtgtacacgacgcactctccagccggcacctctgtccagaacatgttgcattggtcccaggctgttaaatttcagaagtttcaggccttcgattggggctcttctgcgaagaattactttcactacaatcagtcttaccctccaacctacaacgtaaaagacatgttggttccaactgcagtgtggagtggagggcacgattggctcgctgacgtttatgatgtcaacatactgctgacacagataactaatctggtattccacgagagcatacctgaatgggaacatttagactttatctggggccttgacgccccatggcggctgtataataaaattattaacttgatgagaaagtatcag

SEQ ID NO: 15722 - DNA, 1197 bp, synthetic construct
  misc_feature 1..1197: note = source = /note="Description of Artificial Sequence: Synthetic coding sequence"
  source 1..1197: mol_type = other DNA
atgaagatgcggttcctcggcctggtggtgtgtctcgtgctgtggacccttcattcagaaggtagccggggcaagctcacggccgtggaccctgagactaacatgaatgtctccgagattatctcctactggggtttcccgagcgaggagtacctggtggaaactgaggacggctacattctttgcttgaaccgcatcccacatggaaggaaaaatcatagcgataagggtccgaagccagtggtgtttctgcaacacgggctgttggctgatagctcaaactgggtgactaatctcgcgaacagctctctgggcttcatccttgctgacgcgggtttcgatgtgtggatgggaaatagccgcggaaatacttggtcccggaagcacaagaccctgtcggtcagccaggatgaattctgggcgttctcgtacgacgagatggcgaagtacgacctcccggcgtctatcaatttcatcttgaataagaccggacaggaacaagtgtattacgtgggtcactcgcaaggaaccacgatcggcttcatcgcattctcccaaattcccgagttggcaaagagaattaagatgtttttcgcccttggcccagtggcctccgtcgctttttgcacctccccaatggcgaagctgggacggctgccggatcacctcatcaaggatctcttcggagacaaggagttcttgccgcagtccgcctttcttaagtggctgggaactcacgtttgtactcacgtcatcttgaaggagctctgcggaaacctgtgcttcctcctctgcggattcaacgagagaaatctgaatatgagccgggtcgacgtctacactactcatagcccggccgggacctcggtgcaaaacatgctccactggtcccaggccgtgaagttccagaagtttcaggcctttgactggggatcatcggctaagaattactttcattacaaccaatcatacccgccgacctataatgtgaaggacatgctggtgccgaccgcggtctggtcgggagggcatgattggctggcggatgtgtacgacgtgaacatcctgttgacccagatcaccaacctggtgttccatgagtccatcccggagtgggaacacctggacttcatctggggcctggacgcaccttggcgtctgtacaacaaaatcatcaatcttatgagaaaataccag

SEQ ID NO: 15723 - DNA, 1197 bp, synthetic construct
  misc_feature 1..1197: note = source = /note="Description of Artificial Sequence: Synthetic coding sequence"
  source 1..1197: mol_type = other DNA
atgaagatgcgctttctggggttggttgtgtgtctggttctttggacactccactccgaaggtagccggggcaagctgaccgccgtggatcccgagactaatatgaacgtgtccgaaatcatttcgtactgggggtttccatccgaagagtatctcgtggagactgaggacggctatatactgtgcctcaatcggattccacatgggcggaagaaccatagcgacaaagggccgaagcctgtggtctttttgcagcatggattgttagcagattcaagcaactgggtcaccaatctggcaaattcgtcattgggctttatacttgccgacgccggattcgatgtttggatgggaaatagtaggggcaacacatggagtcgcaagcacaaaactctgagcgtgtcccaagacgaattctgggccttcagttacgatgaaatggccaagtatgacttgccggcttctattaacttcattctgaataagaccgggcaagaacaagtctattatgtgggacattcacaaggtacaaccatcggattcattgccttcagccagatcccagaattggctaaaaggatcaagatgttctttgcgctgggcccagtggcgtccgttgcattttgcactagtcccatggccaagctgggtagactgcctgaccacctgatcaaggaccttttcggagataaggaattcttgccgcagagcgcatttttgaagtggctcgggacacatgtgtgtacccacgtcattctgaaggaattgtgcggcaacctctgcttcctgctatgcggctttaacgagcgcaacctaaatatgtccagggttgatgtatacactacgcactcaccagcaggcaccagcgttcagaatatgttgcattggtcacaggctgtgaagttccagaaattccaagccttcgattgggggtccagcgccaaaaactacttccattataatcaaagttatccccctacctataacgtgaaagacatgctcgttccaactgcagtctggagtggcggacacgactggttggctgatgtttacgacgttaacattctcctgacacagatcaccaaccttgtttttcatgagtccatccccgagtgggagcaccttgatttcatttggggtctggacgccccttggagactatataataaaattattaatctcatgcgtaagtaccag

SEQ ID NO: 15724 - DNA, 1197 bp, synthetic construct
  misc_feature 1..1197: note = source = /note="Description of Artificial Sequence: Synthetic coding sequence"
  source 1..1197: mol_type = other DNA
atgaagatgagattcctgggacttgtggtgtgtcttgtcctgtggacattacattctgaaggatccagagggaagctaaccgccgtggacccggagaccaatatgaatgttagcgagataatttcttattggggctttcctagtgaagagtacctagtagagacggaggacgggtatatcctgtgccttaatcggatcccacacggacggaagaatcacagtgataagggcccaaagccagtggtgtttctccaacacgggctgctcgcagactcgtcaaactgggtgaccaatctggccaactcctcgctgggtttcatccttgccgacgctgggttcgatgtgtggatgggaaatagtcgggggaacacctggtcacgaaagcataagacactgtccgttagccaggacgagttctgggctttttcatatgatgagatggccaagtacgacctacctgcatccatcaatttcatcctcaataaaactggccaggaacaggtatattatgtgggccatagtcagggcactacaatcgggttcattgcatttagccagattccagagctcgccaaacggataaagatgttcttcgcattggggccagtcgcttctgtggccttctgcacctcccctatggccaaactcggccgcctgcctgatcatctgatcaaagacttgttcggcgacaaagaattcctgccccaaagcgcctttctgaaatggctgggcacacatgtgtgcacacatgtcattctgaaagagctgtgcggaaatctatgcttcctactctgtggcttcaacgagagaaacctgaacatgagcagggtggatgtgtacaccacacatagcccggctggaacaagcgtacagaatatgctgcattggagccaggctgtaaagttccagaaattccaggctttcgactggggatcctctgctaaaaactatttccattataaccaatcttacccccctacctacaatgtcaaggacatgctggtgcccactgcagtgtggagtggcggacatgattggctcgccgatgtgtatgatgtaaatattctcttaacccaaatcaccaatctggtctttcacgaaagcattccagagtgggaacacttggactttatctggggactagacgccccttggcgcctctataacaaaatcatcaatttaatgcgcaaataccag

SEQ ID NO: 15725 - DNA, 1197 bp, synthetic construct
  misc_feature 1..1197: note = source = /note="Description of Artificial Sequence: Synthetic coding sequence"
  source 1..1197: mol_type = other DNA
atgaagatgcggtttcttggactggtcgtttgtctcgtcctttggactctgcacagcgagggcagcaggggaaagttgacagcggtggaccctgagaccaacatgaacgttagcgagattattagttattggggctttccgtcagaggaataccttgtggaaaccgaagatggatacattctgtgcctcaacaggattccacacggccgaaagaatcattctgacaaggggcctaaacccgtagtattcttgcagcatggcttactcgccgactcatctaactgggttactaatctggcgaattcatctctggggtttattctggccgacgctgggtttgatgtgtggatgggcaacagcagaggcaacacttggtcacgcaagcataagacgctttctgtatcccaggatgagttctgggctttttcctatgacgagatggccaaatatgatttaccagcgtcgattaatttcattctgaacaagacagggcaagaacaggtgtactatgtgggtcacagccaaggtacgaccattggttttatcgccttttcgcagattcctgagttagctaaacggatcaaaatgtttttcgcgctggggcctgtagcctccgtagccttctgcacatctcccatggctaagctgggtagactgcctgaccacctgataaaagatctgtttggcgacaaggaatttctaccacaatctgcatttcttaagtggcttggtactcacgtatgtacccacgtcatcctgaaggagctgtgcggtaacctctgcttccttctgtgtgggtttaacgaaaggaacctaaacatgtccagggtggatgtatataccacccactcaccagccggaacttcagttcagaatatgttgcattggtcgcaggccgttaagttccaaaagttccaggctttcgattggggaagttccgctaaaaattatttccactacaaccagtcctatcctccgacatacaacgtgaaagacatgctggtgcccaccgcagtatggagtgggggacacgactggctggcggatgtttacgatgtgaacatcctgttaactcagataaccaatcttgtctttcacgagagcatccctgaatgggagcaccttgattttatctggggcctggatgcgccatggcgtctttataacaaaataatcaatcttatgcggaagtatcag

SEQ ID NO: 15726 - DNA, 1197 bp, synthetic construct
  misc_feature 1..1197: note = source = /note="Description of Artificial Sequence: Synthetic coding sequence"
  source 1..1197: mol_type = other DNA
atgaaaatgcgctttctgggactggtggtgtgcctggtgctgtggaccctccactcggagggatcgcggggaaagctgacggccgtggaccccgaaactaacatgaatgtgtcagagatcatttcctactggggtttcccaagcgaagagtacctggtggaaacggaggacggctacattctgtgcctgaacaggatcccccacggaaggaagaaccatagcgacaaggggccgaagcctgtggtgtttctccagcatggactgctggcggattcatccaattgggtcaccaatctggcaaactcctcgctcggcttcattctggcggatgcaggtttcgatgtgtggatgggcaacagccgggggaatacttggtcaaggaaacataaaacgctcagtgtgtcacaggacgaattctgggcgttctcctacgatgaaatggccaagtacgatctgcctgcttccatcaacttcatactgaacaagaccgggcaagaacaagtctactacgtcgggcacagccaaggaaccactatcggattcatcgcttttagccaaatccccgagctggccaaacggatcaagatgtttttcgcgctcggcccagtcgcatccgttgccttctgcacttcgccgatggccaaactggggcgcctgccggaccacctcatcaaggatctgttcggagacaaggaattcttgccgcaatccgcattcctgaagtggctgggaacccatgtgtgtactcacgttatcctgaaggagttgtgcggcaacctctgttttctgctctgcggattcaacgaaagaaacctgaacatgtcgcgcgtcgacgtgtacacgacgcactcaccggccggtaccagtgttcagaatatgctgcactggtcgcaggccgtgaagttccagaagttccaggccttcgactgggggagcagcgcgaagaactacttccattacaaccagtcctaccctccgacctacaacgtgaaagatatgttggtgccgaccgccgtgtggtccggaggccacgactggttggccgacgtgtacgacgtgaacatcctcctgacccaaatcactaacctcgttttccacgagtccattccagagtgggaacatctggattttatctggggcctggacgccccttggcggctgtacaataagattatcaatctcatgcggaagtaccag

SEQ ID NO: 15727 - DNA, 1197 bp, synthetic construct
  misc_feature 1..1197: note = source = /note="Description of Artificial Sequence: Synthetic coding sequence"
  source 1..1197: mol_type = other DNA
atgaagatgcggttcctgggccttgtagtgtgccttgtgctttggaccctgcacagcgagggatcgcgcggaaaactgactgccgtggacccagaaactaacatgaatgtctcagaaatcatctcgtactggggctttccgtcggaagagtacttggtggagactgaggacggatacatcttgtgtttgaaccgaatcccgcacggacgcaagaatcattccgacaaggggccaaagccggtggttttcctccagcacggtttgctcgcggatagctcgaactgggtgactaacctcgccaacagctcccttggattcatcctggccgacgctggcttcgatgtctggatgggaaattcgaggggaaacacctggtcccggaagcacaaaactctgtctgtgtcgcaggacgaattctgggcgttcagctacgacgaaatggcgaaatacgacctcccggcgtccattaactttatcctcaacaagactggacaggagcaggtgtactacgtggggcacagccaggggactacgattgggttcatcgccttctcccagattccagaactggccaagcgcatcaaaatgttctttgctttgggccctgtggcgtccgtggccttctgcactagcccaatggccaaacttggacgcctgcctgaccacctgatcaaagatctcttcggggataaggaattcctcccgcagtccgcgttcctgaagtggctgggcactcatgtgtgcacccacgtgatcctgaaggagctctgcggaaacctgtgcttcctcctgtgtggcttcaacgagcggaatctcaacatgtcccgggtggacgtctacactacccactccccggccggaactagcgtccaaaacatgttgcactggtcccaggcagtgaagttccagaagttccaggctttcgactggggatcctctgcgaagaattactttcactacaatcaaagctaccctccgacgtacaacgtgaaggacatgctggtgccaactgcagtgtggtcggggggccatgactggctggctgatgtgtacgatgtcaatattctgctcacccagatcaccaacttggtctttcatgaatcaatccctgaatgggaacatctcgatttcatctggggccttgacgccccgtggcggttgtacaacaagatcatcaatctgatgcgcaaataccaa

SEQ ID NO: 15728 - DNA, 1197 bp, synthetic construct
  misc_feature 1..1197: note = source = /note="Description of Artificial Sequence: Synthetic coding sequence"
  source 1..1197: mol_type = other DNA
atgaagatgcggttcctgggcctggtggtgtgtttggtcctttggactttacattctgagggttccagaggcaaattgaccgccgtggatcctgaaaccaatatgaacgtgtccgaaattattagctattggggtttcccatcagaggagtatcttgtggaaactgaggatggctacatcctttgtctgaaccggatcccgcacggaagaaagaatcactccgataaaggccctaaaccagtggtctttttgcagcatggtctgctggcggactcctcaaactgggtcactaacctcgctaatagctccctaggttttatacttgccgatgccggatttgacgtgtggatgggcaatagccgcggtaacacctggtctcgcaagcataaaacactgagcgtcagccaagatgaattctgggcgttttcctatgatgagatggcgaaatatgacctccccgctagtatcaactttatccttaataagaccggccaggaacaagtctactacgtcggccacagccaaggaacgaccattggattcattgccttctcccaaatccccgaactggcaaagcggataaaaatgttctttgcactgggtcccgttgccagtgtggctttttgtaccagccccatggccaaactcgggaggctccctgaccacttaataaaggatctgttcggagataaggagttcttaccgcaatccgcattcttaaaatggctgggcactcatgtgtgcacccatgtgatcctgaaggagctgtgcggtaatctgtgttttctcctttgcggctttaacgaaaggaaccttaacatgtccagggtggatgtgtacacgacgcattcaccagccggtacctcagtgcagaatatgctgcactggtctcaggcagtgaaatttcagaaattccaggcttttgattggggcagctctgcgaaaaactactttcattacaatcaaagctatcctccaacctataacgttaaagatatgcttgtgcccacagcagtctggagtggcgggcatgactggctagcagatgtgtatgatgtgaatatcttgttgacacagataaccaacctggtttttcatgagtcaatcccggagtgggaacacctcgacttcatttggggattagacgctccgtggcggctttacaataaaattatcaacttaatgaggaagtaccag

SEQ ID NO: 15729 - DNA, 1197 bp, synthetic construct
  misc_feature 1..1197: note = source = /note="Description of Artificial Sequence: Synthetic coding sequence"
  source 1..1197: mol_type = other DNA
atgaaaatgcggttcttgggactggttgtgtgcctggtgctgtggactctgcactccgagggatcgcgggggaagctgaccgccgtggacccggaaactaatatgaatgtgtcggaaatcatctcatattggggcttcccttcagaggagtacctggtggaaaccgaggatggatatatcctgtgcctgaaccgcatcccacacgggcgcaaaaatcatagcgacaagggaccgaagcctgtcgtgttccttcagcacggactgctcgcggactcgagcaactgggtgactaatctggctaattcctcccttggtttcatcctcgcagatgcgggatttgacgtgtggatggggaactcaagaggaaacacttggtcccggaaacataagactctgagcgtgtcgcaggacgaattttgggccttttcctacgacgaaatggctaagtacgatctgccagcctccatcaacttcatcttgaataagactggacaggagcaagtgtactacgtcggccactcgcaaggaactacgatcggattcatcgccttcagccagatccctgagctggcgaaacgcatcaaaatgttcttcgcactcggtccggtggcgtccgtggccttctgtacttcgcccatggcgaaactgggccggctgccggatcacttgatcaaggacctcttcggcgacaaggaattcttgccacagtcggcattcctgaagtggctcggcactcacgtctgcactcatgtgatactgaaggagttgtgcgggaatctgtgcttcttgctttgtggattcaatgagcgcaatttgaacatgtctagggtcgacgtgtacactacccattcgcctgcaggaacttcagtccaaaacatgctccattggtcccaggcggtgaagttccagaaattccaggcgttcgattggggctcctcggccaagaattacttccattacaatcagtcgtacccaccgacttacaatgtgaaggatatgctggtcccaaccgccgtgtggtctggcggtcacgactggctcgccgacgtgtacgatgtgaatatcctcctcacgcagatcacgaacctggtattccacgagagcatccccgaatgggagcacttggatttcatctgggggttggacgccccatggcgcctgtacaacaagattatcaacctcatgcggaagtaccag

SEQ ID NO: 15730 - DNA, 1197 bp, synthetic construct
  misc_feature 1..1197: note = source = /note="Description of Artificial Sequence: Synthetic coding sequence"
  source 1..1197: mol_type = other DNA
atgaagatgagattcctcggtttggtggtgtgtttggtgctttggactctgcattcggagggaagcagaggaaaactgaccgcagtggacccagaaaccaatatgaacgtgagcgaaatcatctcctactggggattcccatccgaggagtatctggtggaaactgaagatggctacatcctgtgccttaatagaatccctcacggccggaagaatcattcggataaaggacctaagccggtggtctttctgcagcacggcctcctcgcagactcgtcaaactgggtgactaacctcgctaactcaagcctgggcttcatcctggctgacgccggattcgatgtctggatgggaaactcgcggggcaacacttggtcgaggaaacataagactctctcggtgtcgcaggacgaattctgggcgttttcctacgacgagatggcgaagtacgacctcccggcgtctatcaatttcatcttgaacaaaaccggccaggaacaagtctactacgtgggccattcccaaggcaccactatcggatttatcgcgttctcgcaaatcccggagctcgccaaacgcattaagatgttctttgccctcggaccagtggcttctgtcgcgttctgcacttcgccgatggctaagctggggcgccttccggatcacttgatcaaagacctgtttggagataaggaattcctgccacaatcggcgtttctgaagtggttgggaacccacgtgtgcacccacgtgatactgaaggaactgtgtgggaatctctgttttctcctctgcggatttaacgaacgcaatttgaacatgtccagggtcgatgtgtacaccactcactccccagcaggaactagcgtgcagaatatgctgcactggtcacaggccgttaagttccagaagttccaggcctttgactggggttcctcagctaagaactacttccactacaaccagtcgtaccccccaacctacaacgtgaaggacatgctggtcccgactgctgtgtggtccggcggccacgactggctggcggacgtgtacgacgtcaacatcctccttacgcaaatcactaatctggtgttccatgaatcaatcccggagtgggaacatctggatttcatctggggactggacgccccgtggcgactgtacaacaaaatcatcaacctgatgcgcaagtaccaa

SEQ ID NO: 15731 - DNA, 1197 bp, synthetic construct
  misc_feature 1..1197: note = source = /note="Description of Artificial Sequence: Synthetic coding sequence"
  source 1..1197: mol_type = other DNA
atgaagatgaggttcctgggattggtggtttgtctggtgctgtggaccctgcacagcgagggcagccggggcaagctgacggctgttgatccagagaccaatatgaatgtgagtgagattatcagctactggggtttccctagcgaagaatatctggtagaaacggaggacggatatatcctctgcctgaaccgcataccccatggtcggaagaaccacagcgataagggccctaagcccgtcgttttccttcaacatggtctgctggccgactcgtctaactgggtcacgaacctcgctaacagtagtctgggattcatactggcggacgccggcttcgacgtgtggatgggcaactcccgcggtaatacttggtcacgaaaacacaagaccctctcggtcagtcaagatgagttttgggctttctcctatgacgagatggctaaatacgacttgccggcctctattaattttatcctcaacaaaacagggcaggagcaggtctactacgtcggacactctcagggcaccaccatcggtttcatcgccttctcccagattccagaactggcaaaacggattaagatgttcttcgccttgggtccggtggcctctgtagccttctgtacctcaccgatggccaaattggggcgtctccccgatcatctgattaaagatctctttggcgacaaggaattcctcccgcagtcggcgttcctgaagtggctaggcacacacgtctgcactcatgtcatcctgaaggaattgtgcggcaacctgtgctttctgctgtgcggtttcaacgagagaaatctgaatatgtctcgcgtggatgtgtacacgacacacagcccagctggcacctcggtgcagaacatgctgcactggagccaggcagtgaagtttcagaaatttcaggcttttgattggggctcctccgcgaagaattattttcactataaccagtcgtacccaccaacttataatgttaaggatatgctggttcccacagctgtttggagcggaggccacgactggctcgcggatgtctatgatgtgaacatcctcctgacgcagatcactaacctggtattccatgagagcattcccgagtgggaacacctcgacttcatctggggtcttgacgctccgtggcggctgtacaacaagattatcaacttgatgcgcaaataccag

SEQ ID NO: 15732 - DNA, 1197 bp, synthetic construct
  misc_feature 1..1197: note = source = /note="Description of Artificial Sequence: Synthetic coding sequence"
  source 1..1197: mol_type = other DNA
atgaaaatgagattcctaggcttggttgtgtgcttggtgctgtggacgctccatagcgaggggtccagggggaagctgacggcagtagatcctgagacgaacatgaacgtctctgagataatttcctactggggctttccatcggaggaatacctggttgagaccgaagacggatatatactatgtcttaatagaattccgcacgggagaaagaaccattccgacaaaggccccaagcccgtggtgtttcttcagcatgggttgctcgcagattctagcaactgggtgacaaatctggccaactcgagtctagggtttattctagccgacgccgggttcgacgtgtggatggggaatagtcgagggaatacctggtcacggaagcacaagaccctgtccgtttcccaggatgaattctgggccttttcctatgatgagatggccaagtatgacctccccgcttctattaatttcatactcaacaaaaccggccaggagcaagtatattacgtggggcattcgcaggggactacaataggcttcatcgctttcagccagatacctgagcttgctaaacgcattaagatgttctttgctcttggccctgttgctagcgtggctttttgcacgtctcccatggccaaattaggacgactcccagaccacctcatcaaagatctattcggcgataaggagtttctgccacagagtgctttcctgaagtggcttgggactcacgtgtgcactcacgtgattctgaaggaactctgcggcaacctgtgcttcttgctctgcggattcaacgagcgtaacctaaatatgtcaagagtggatgtttatacaactcacagtcctgctggcacgtctgtgcagaacatgctgcactggtctcaggcagtgaagttccagaagtttcaggcatttgattggggatcttctgccaagaattacttccactacaaccagtcatacccacctacgtataacgttaaggatatgctcgttcccaccgcagtctggtcagggggacatgactggctggcagacgtttatgatgttaacattctcctgacccagataacaaatttggtatttcatgagtccatccccgagtgggagcatctggacttcatatgggggttggacgcaccctggcgcttatataataagatcattaaccttatgcgcaagtaccag

SEQ ID NO: 15733 - DNA, 1197 bp, synthetic construct
  misc_feature 1..1197: note = source = /note="Description of Artificial Sequence: Synthetic coding sequence"
  source 1..1197: mol_type = other DNA
atgaagatgcgctttctcgggctggtggtgtgcctggttctgtggaccctccacagcgaaggttcccgcggaaaactgactgctgtggacccggagactaacatgaacgtcagcgagatcatttcctactggggtttcccctcggaggagtacctggtggagactgaagatggatacatcctgtgcctgaatcggatacctcatggtcgtaagaatcactcggataagggcccaaaaccagtcgtgtttctgcagcatggactcctcgcggactcctcgaactgggtcaccaacctcgccaactcgtcgctgggattcattctggctgatgccggattcgatgtctggatgggcaactcgagaggcaacacttggagccgcaagcacaaaaccctgagcgtcagccaagatgagttctgggcattctcgtacgacgaaatggcgaaatacgatctcccggcctccattaactttatcctgaacaagactggacaggagcaggtctactatgtggggcattcccaggggacgactattgggtttatcgccttcagccaaatccccgaactggcaaagagaatcaaaatgttctttgcgctggggcccgtggcctcggtggccttctgcactagcccgatggccaagctgggccggctcccagatcacctgatcaaagacctgttcggagataaggaattcctcccacagagcgcttttttgaagtggctggggactcatgtgtgcacccacgtcattctgaaggaactctgcggaaacctgtgttttctcctgtgcggatttaacgagagaaatctcaacatgtcacgggtcgatgtgtacaccacccactcgcctgcgggcacctccgtgcagaatatgttgcattggtcgcaagccgtcaagttccagaaattccaggccttcgactggggatcgtccgctaagaactatttccactacaaccagagctacccgcctacttacaacgtgaaggatatgttggtgccaaccgcggtgtggtcaggaggacatgattggctggcggatgtctacgacgtgaacatcttgctgacccagatcaccaatctggtattccacgaaagcatccccgaatgggaacaccttgactttatctggggattggatgccccttggcggctgtacaacaagatcatcaatctcatgcgcaagtaccag

SEQ ID NO: 15734 - DNA, 1197 bp, synthetic construct
  misc_feature 1..1197: note = source = /note="Description of Artificial Sequence: Synthetic coding sequence"
  source 1..1197: mol_type = other DNA
atgaaaatgcgctttcttggcctggtggtgtgcctggtgttatggacactgcactctgagggaagccgaggcaagcttaccgctgtggacccggaaaccaacatgaatgtcagcgaaattatatcttattggggctttccgagtgaggagtacctcgtcgagaccgaggacggctacatcctttgtcttaaccgtattcctcatggacgcaaaaatcattctgacaaaggccccaagcccgtggtctttctacagcatggacttctggctgactccagtaactgggtaactaaccttgcaaactcaagcctcgggtttatactggctgacgccgggttcgacgtttggatgggcaattctcgcggcaatacatggagcaggaaacacaagactctgtccgtgtcacaagatgagttttgggccttctcatacgacgagatggcaaagtatgacctgcctgcaagtattaactttatcttgaataagaccggtcaagaacaagtgtattacgtgggacactcccaggggactacgattgggtttatagcgttttcccagattccggagctagccaagaggattaaaatgtttttcgctctcgggccagtcgcgagcgtcgctttttgtacatcccccatggcaaaactgggaaggctccctgaccatttgatcaaggatctgttcggtgataaagagtttctccctcagagcgcctttctgaagtggctgggcacacacgtctgtacgcacgtgattctaaaagaactgtgcggcaacctatgcttcctactgtgcggtttcaatgagagaaatctcaacatgagtagagtagacgtctatacaacccattcccccgccgggacaagcgtgcagaatatgcttcactggagtcaggccgtgaagtttcagaaattccaggcattcgactgggggtcttccgctaagaactattttcactacaatcagagctatccaccaacctataacgtgaaagatatgttggtaccgaccgcagtgtggagtggtgggcatgattggctggcagatgtctatgacgtgaacatcctccttacccagattacgaatctggtgttccatgagagcatccctgagtgggagcacctcgatttcatctggggattggacgctccttggcgcctgtataacaagataattaacctgatgcgcaaatatcag

SEQ ID NO: 15735 - DNA, 1197 bp, synthetic construct
  misc_feature 1..1197: note = source = /note="Description of Artificial Sequence: Synthetic coding sequence"
  source 1..1197: mol_type = other DNA
atgaagatgagattcctggggttggtggtctgccttgtgctctggaccttgcacagcgaaggttcgagaggcaaactgaccgcagtggacccggaaaccaacatgaacgtgtcggaaatcatttcgtactggggctttccgtcggaggaatatctggtggagactgaggacggatacatcctgtgcctgaatcgcatccctcatggacggaagaatcactcggacaaggggccgaagccggtggtgtttctccagcatggactcctggctgatagcagcaactgggtgaccaatcttgcaaactcctccctgggatttatcctggcggacgccgggtttgatgtctggatgggaaactcgcgcggcaatacttggagccggaagcacaagaccttgtctgtgtcccaagatgaattttgggcgttctcgtacgacgagatggcaaaatacgatctgccggcttcaatcaacttcatcctgaacaagactggccaagaacaggtgtattacgtgggacattcacagggaaccactatcggtttcatagccttctcgcagatccctgaactcgctaagagaatcaagatgttctttgcactcgggccggtggcctccgtggcgttttgcacttcaccgatggctaagctcgggagactgccagaccatctgatcaaagacctgttcggagataaagagtttctccctcagagcgcctttctgaaatggcttggcactcacgtctgtacccatgtcatcctcaaagagctctgcgggaatctttgcttcctcctctgtggctttaacgagcgcaacctgaatatgtcacgcgtcgatgtgtacactacccactcaccggccggaaccagcgtgcagaacatgctccactggagccaggccgtcaagttccagaagttccaggcttttgactgggggtcgtccgcgaagaattacttccactacaaccaatcgtaccctccaacttataacgtgaaagacatgctcgtaccaactgctgtgtggtccggtggacacgactggctggcggacgtgtatgatgtgaacatcctgctgacccagatcaccaacctggtctttcacgaatccattccggagtgggaacacctggacttcatttgggggctggatgcaccgtggcgcctgtacaataagatcatcaacctgatgcggaaataccaa

SEQ ID NO: 15736 - DNA, 1197 bp, synthetic construct
  misc_feature 1..1197: note = source = /note="Description of Artificial Sequence: Synthetic coding sequence"
  source 1..1197: mol_type = other DNA
atgaagatgcgattcctggggctggtcgtttgcctggtcctgtggacacttcattccgagggatcgaggggcaaactcacagctgtggatcctgagactaatatgaatgtctcagaaattataagctactgggggtttccatctgaggagtacctcgtcgagacagaagacggctacatcctgtgtctgaacagaatcccacatgggcgaaaaaaccactcagacaaaggcccaaagccggtcgtctttctgcagcacggcctgctggccgacagtagcaattgggtgactaacctggcaaattcctccctgggattcatccttgccgatgccggcttcgacgtctggatgggtaactctcgaggcaatacttggagtagaaaacataagacattgagtgtatctcaggatgaattttgggcattctcgtatgacgagatggcgaaatatgaccttcccgcttcaatcaattttatactgaataagacgggtcaggagcaggtgtactatgtgggacactcccagggcaccaccattggcttcatagccttcagccagatccctgaactggctaaacggattaaaatgttcttcgccctgggtccagtggcaagcgtggctttttgcacttcccctatggcgaaactgggccgactcccggaccatctcattaaagacctcttcggagataaggaatttctcccacaatcggcctttttgaagtggcttggtacccatgtgtgtacacacgtcatcctgaaggagttgtgcggtaatctttgctttctgctgtgcggattcaatgaaagaaatctcaacatgtcccgggttgacgtctatacaacgcattcgccagccggcacctccgtgcagaacatgctgcactggagtcaggcggtgaaatttcagaagttccaggctttcgactgggggagttcagcaaagaactactttcattacaatcagtcttacccaccaacctacaacgtgaaagatatgctggtgcctacggcagtttggtctggtggtcatgattggttggccgatgtgtacgatgtgaatattctgctgactcagatcactaacctggtattccatgagagcatccctgagtgggaacacttggacttcatttggggcctagatgctccctggcgactgtacaataagatcattaacctgatgcgcaagtaccag

SEQ ID NO: 15737 - DNA, 1197 bp, synthetic construct
  misc_feature 1..1197: note = source = /note="Description of Artificial Sequence: Synthetic coding sequence"
  source 1..1197: mol_type = other DNA
atgaagatgcgctttcttggacttgtggtctgccttgttctgtggactttgcactccgagggatcgagaggtaagctgaccgccgtggatcccgaaaccaatatgaatgtgagcgagataatctcgtactggggattcccttccgaagagtatctcgttgaaactgaggacggctacatcctttgtctgaacagaataccgcatggtcgaaaaaaccatagcgataagggcccaaagcctgttgtgttcctccaacacggccttctcgcagacagctccaactgggtgaccaatcttgcaaattcttcactgggttttatcttggcggacgccgggtttgatgtctggatgggtaacagcagagggaatacgtggagccggaagcacaagaccctgagcgtgtcgcaggatgagttctgggcatttagctacgacgaaatggcaaaatacgatctgccggcctctattaacttcatactgaacaagactggacaagaacaggtgtactacgtgggtcattcacaaggcactaccattggattcatcgctttttcacaaattccagagttggctaagcggatcaaaatgtttttcgcgttggggcccgtggcatcggtcgctttttgtactagcccaatggcaaagttggggcgtctgcctgatcacttgatcaaggacttgttcggagataaagaatttctgccacagtccgcctttcttaagtggctgggtacgcacgtctgtacccatgttatccttaaggaactctgtggtaacctctgttttctgctgtgcggttttaacgagagaaaccttaacatgtcccgcgtggatgtgtacaccactcattcgccagcaggaacttcggtgcagaacatgctgcattggagccaagcagtgaagttccagaaattccaggcatttgactggggaagcagcgcaaagaattactttcattacaaccaatcctatcccccaacttataacgtgaaggatatgcttgtgccaaccgcagtgtggagcggtgggcacgattggctggctgatgtatacgacgtgaacatcctcctcactcagattaccaatctcgtgtttcatgagtcaattccagaatgggagcatctcgatttcatctggggcctggacgcaccttggaggctttacaacaagattatcaacctcatgagaaagtaccaa

SEQ ID NO: 15738 - DNA, 1197 bp, synthetic construct
  misc_feature 1..1197: note = source = /note="Description of Artificial Sequence: Synthetic coding sequence"
  source 1..1197: mol_type = other DNA
atgaaaatgcggttccttggactcgtggtctgtcttgtgctgtggaccctccactccgagggctcccgagggaagctcaccgcagtcgaccctgagacgaacatgaatgtcagcgagatcatatcatactggggattcccgagcgaagagtacttggtggaaactgaggacggatacatcctctgcctgaaccggattccgcacggaaggaagaaccatagcgacaagggccccaagccagtggtctttctgcaacacgggctcctggctgattcgtcaaactgggtgactaatctggcgaactctagtctcggattcatcctggcagacgctggtttcgatgtgtggatgggaaattcccggggcaacacttggtcgcgtaaacacaaaactctttccgtgtcgcaagacgagttctgggccttctcctacgatgaaatggccaagtacgacttgcccgcgagcattaactttatcctgaataagaccggacaagagcaagtgtattatgtgggccactcgcagggtactaccatcggatttatcgccttctcgcagattccggaactcgcaaagcgcatcaagatgtttttcgcgttgggaccggtggcttccgtcgcgttttgcaccagcccgatggcgaaacttggccggctgccagaccatctcatcaaagatctgttcggggataaagaattcctcccacagtcggcctttctgaaatggttgggcactcatgtttgcactcatgtcatcctgaaggagttgtgcggaaatctgtgttttctgttgtgcggattcaatgagcgcaacttgaatatgtcgcgcgtcgacgtctacactacgcattcgccagccggaacctcagtgcagaacatgcttcattggtcgcaagcagtgaaattccagaagttccaggcctttgattggggttcgtccgccaagaattacttccactacaaccagtcatacccaccgacttacaatgtgaaggatatgctggtgccgactgcggtctggtcgggaggccatgattggctggccgacgtgtacgatgtgaacatcctgcttacccagatcactaacctggtatttcatgaatctatcccggaatgggagcacctggacttcatatggggattggacgccccgtggcgcctttacaacaagatcattaatctgatgcggaagtaccag

SEQ ID NO: 15739 - DNA, 1197 bp, synthetic construct
  misc_feature 1..1197: note = source = /note="Description of Artificial Sequence: Synthetic coding sequence"
  source 1..1197: mol_type = other DNA
atgaagatgcgtttcttgggacttgtggtgtgcctggtcctgtggactctccatagcgaaggctcgcgcggtaaactgactgccgtggatccagagacgaacatgaatgtgtcggagattatctcgtactggggttttccatcggaggagtaccttgtcgagacggaggatgggtacatcctctgcctgaacaggattcctcacggacgtaagaatcactcggacaagggtccaaaacccgtggtgttcctgcagcatggattgctcgcagattcgtcaaactgggtgactaacctcgcgaatagctcgcttggcttcattctggcggacgccggcttcgatgtctggatggggaactcgaggggtaacacttggtcgcgcaagcataagaccctgtctgtctcgcaggacgaattttgggcattttcatatgacgaaatggcaaagtacgatcttcctgcttccatcaacttcatcctgaataagaccggacaggaacaggtctactacgttggccatagccagggaactactatagggttcattgcattttcccaaatccccgagctcgctaagagaataaagatgttttttgcattgggccctgtcgcctcagtcgcgttctgtacctccccaatggctaagctcggcagactccctgaccatctgattaaagacctttttggcgataaagagtttctgccccaatcagccttcctcaagtggttgggtacccatgtgtgcacccatgtgattcttaaagaactgtgtggaaacctctgtttccttctttgtggatttaacgaacgaaacttgaatatgtctagggtcgacgtgtacaccacccattcccccgcggggacctcagtgcagaacatgcttcactggagccaggcagtgaagttccaaaagtttcaagcgtttgattggggtagctctgcgaagaactactttcactacaaccaatcctacccacctacgtacaacgtgaaggatatgttggtgccgaccgccgtgtggtccggcggacacgattggctcgcggatgtgtacgatgtcaacatcctgcttacccaaattacgaacctcgtgttccatgaaagcatcccggagtgggaacaccttgacttcatttggggacttgacgccccctggaggctttacaacaagatcatcaacctgatgcgaaagtatcag

SEQ ID NO: 15740 - DNA, 1197 bp, synthetic construct
  misc_feature 1..1197: note = source = /note="Description of Artificial Sequence: Synthetic coding sequence"
  source 1..1197: mol_type = other DNA
atgaagatgcgctttcttgggctcgttgtctgtctggtcctctggactctgcattcagaagggagccgcggcaaacttaccgctgtggacccagagactaatatgaatgtgtctgagatcatcagctactgggggttcccaagcgaggagtatttggtggaaactgaggacgggtatatcctgtgcctaaatcgaattccacacggccgtaagaaccatagcgataaaggacccaaaccagttgtctttctccagcacggcctgctcgctgactctagcaactgggtcaccaacctcgccaacagcagcctggggtttatccttgctgacgccggcttcgacgtttggatgggaaactctcgcgggaacacatggtctcggaagcacaagacactctcagtgagccaggatgagttctgggcgttcagctatgatgaaatggctaaatacgaccttcctgcttctatcaactttatcctgaacaagacagggcaggagcaggtctactatgtgggccattctcaaggcactacaataggcttcatcgccttctctcagatccctgagcttgccaagcgtatcaagatgttctttgcactgggacctgtggcgagcgtggctttttgtacctcgcccatggccaagctgggcagactccccgaccacttgatcaaggaccttttcggcgacaaagaatttctgccacagagcgcattcctgaagtggctgggaacccacgtgtgtacacacgtgattcttaaggagctgtgtgggaacctttgcttcctgctctgcggttttaacgaaagaaatctgaacatgagtagggtagacgtgtacaccactcacagcccagctggcaccagtgtgcagaatatgttgcactggtcgcaagcagtcaagtttcagaagttccaggccttcgattggggtagctctgccaagaattattttcattataaccaaagctatccacctacatacaacgttaaggatatgctggtccctactgctgtgtggtccggaggacacgactggctggccgatgtttacgatgtgaatatcctgttgacccagataacaaacctggtttttcacgaaagtatacctgagtgggagcatctcgacttcatttgggggttggacgctccctggcgcctgtacaacaagataatcaacctgatgagaaagtatcag

SEQ ID NO: 15741 - DNA, 1197 bp, synthetic construct
  misc_feature 1..1197: note = source = /note="Description of Artificial Sequence: Synthetic coding sequence"
  source 1..1197: mol_type = other DNA
atgaagatgcggttccttgggttggtggtgtgcctggtgctgtggacgttgcacagtgagggtagccgaggcaagttgacggcggtcgacccggagacgaatatgaatgttagcgaaatcatttcttattggggtttcccatccgaggagtatctggtggagacggaagatggctacattctgtgcttgaaccgcatccctcatggtcgcaagaatcatagtgacaagggtcccaaacctgtcgtatttcttcagcacggtctgctggcagacagctcgaactgggtcaccaatctggcgaacagcagcctgggcttcatattggcagatgcgggcttcgatgtttggatggggaatagcagaggcaacacgtggagccgtaaacataagaccttgtccgtcagccaggacgaattttgggcgttttcttacgatgaaatggcaaagtacgatctgccagcgtctattaattttattctgaacaagactggtcaagaacaggtctattatgttggacacagtcagggcaccaccatcggcttcattgcgttcagccagattccagaactggcaaaaaggattaaaatgttttttgctctgggtccggtagcgtccgtagctttttgcaccagcccgatggctaagctgggaagactgccggatcatttgatcaaggacctgttcggagacaaagaattcctgccgcagtccgctttcctgaaatggttgggtacgcatgtttgcacccacgtcatcctgaaggagctgtgcggcaacctgtgctttctgctgtgcggtttcaacgaacggaatctaaatatgagcagagtggatgtgtataccactcatagccctgccggtacctctgttcagaacatgttgcattggtcacaggctgtgaaatttcaaaagtttcaggcctttgattggggtagctccgccaaaaattacttccattataatcagtcctatccgccgacctataatgttaaggatatgctggttcctactgccgtctggagcggcggccacgattggctcgctgacgtttacgacgttaatattctgctgacccagattaccaatctcgtgttccacgaatctatccctgagtgggaacatctggattttatctggggactggacgccccgtggcgtttgtataacaagatcatcaatctgatgcggaaataccag

SEQ ID NO: 15742 - DNA, 1197 bp, synthetic construct
  misc_feature 1..1197: note = source = /note="Description of Artificial Sequence: Synthetic coding sequence"
  source 1..1197: mol_type = other DNA
atgaagatgagatttctgggactggtcgtctgtctggtgctgtggaccctgcactcggagggatcgcgaggcaaactcactgcggtcgatccggaaaccaacatgaacgtgtcagaaatcatctcgtattggggattcccgtcagaggaatacctggtggaaaccgaggatggatacatcctctgtcttaatcggatcccacatggaaggaagaaccactcggacaagggacctaagccggtggtctttctgcagcatggacttttggcggactcaagcaactgggtgactaatctggccaacagcagcctgggattcatcctcgcggacgcaggattcgacgtgtggatgggtaattcgcgggggaacacttggtcgcgcaagcataagaccctgtccgtttcgcaagacgaattctgggccttctcgtacgatgaaatggctaagtacgatctgccggccagtatcaactttattttgaacaaaaccggccaggagcaggtgtactacgtcggacacagccaaggaactaccattggtttcatcgcattctcacagatccctgaattggccaaacgcatcaagatgtttttcgcacttgggcctgtggcttccgtggctttctgcaccagcccaatggccaagctcggacggctgccagatcaccttatcaaggacctgttcggggataaagagtttctcccacagtccgccttcctcaagtggctcgggacccacgtgtgcacccatgtgatcctgaaagagctctgcggtaatctgtgcttcctcctctgcggcttcaacgaaagaaacttgaatatgtcgcgcgtggacgtgtatactactcactcccccgcgggcacgagcgtgcaaaacatgctccattggtcccaggccgtcaagttccagaagttccaggccttcgactggggttcctccgcaaagaattacttccactacaatcaatcatacccaccgacgtacaatgtcaaagatatgctggtgccgaccgcggtatggtctggcggccatgactggcttgccgatgtttacgacgtcaacatcctgctgactcagattactaatctcgtgtttcacgaaagcatccccgagtgggagcacctggactttatctggggactggacgctccgtggaggctgtacaacaaaattatcaacctgatgcgcaagtaccaa

SEQ ID NO: 15743 - DNA, 1197 bp, synthetic construct
  misc_feature 1..1197: note = source = /note="Description of Artificial Sequence: Synthetic coding sequence"
  source 1..1197: mol_type = other DNA
atgaagatgcggttcctgggccttgtggtgtgtctcgtgctgtggaccctccattcagaaggatcgcggggcaaacttaccgcagtggatcctgagactaacatgaatgtgtcggagattatctcctactggggatttccttcggaagagtaccttgtggaaaccgaagatgggtacattctctgccttaacagaattccccatggtagaaagaaccactcggataaaggccctaaacctgtcgtgttcctgcaacacggactgctggcagattcttccaactgggtgaccaatttggctaattcatcccttggttttatcctggcagacgccggatttgatgtttggatgggaaattcccgcggaaacacctggtcgcgcaaacataagacccttagcgtctcgcaagatgaattttgggcattctcttacgacgagatggccaagtacgatctgcctgcttcaattaacttcatccttaacaaaaccgggcaggaacaggtctactacgtgggacattcacagggaaccactataggctttattgcattttcacaaattccggagctcgcaaagcggattaagatgttcttcgccctgggtcctgttgctagcgtcgcattctgtacctcgcccatggcaaagctgggacggctgcccgaccatcttatcaaggacctcttcggtgataaagaatttctgcctcaaagcgcatttcttaagtggctgggaacccacgtgtgtacccacgtgattctcaaggaactttgtggtaacttgtgttttcttctctgtggttttaacgagcgcaatctgaacatgtcacgtgtggatgtctacactacgcattcgcctgccggaacctccgtgcagaacatgctgcattggtcccaggcagtgaaattccaaaagttccaagcatttgactggggatcatcagcgaagaactactttcattacaaccagtcctaccctcctacctacaatgtgaaggatatgcttgtgcccactgcagtctggtcaggcggtcatgactggcttgcagatgtgtacgatgtcaatatcctccttactcagatcaccaacctggtgtttcatgagagcatacctgaatgggaacatcttgatttcatctgggggctggatgcaccgtggaggttgtacaacaagatcatcaaccttatgaggaagtaccaa

SEQ ID NO: 15744 - DNA, 1197 bp, synthetic construct
  misc_feature 1..1197: note = source = /note="Description of Artificial Sequence: Synthetic coding sequence"
  source 1..1197: mol_type = other DNA
atgaaaatgagatttctaggcctggttgtgtgccttgtgttgtggactcttcattccgagggaagtagagggaagctcaccgcagtggatccagaaactaacatgaatgtatcagaaattatttcatattgggggtttccaagcgaagaatatcttgtagagacggaagatggatacatcttgtgtttgaatcgcatcccacacggtagaaagaaccacagtgataaaggaccgaagccggtggtctttctacagcatggtctattggcagactcctctaactgggtgacgaaccttgctaatagctctttagggtttattttggcggacgctggatttgatgtttggatgggcaattcacgtggtaatacttggagtcgtaagcataagacgcttagtgtttcgcaagatgaattctgggcattttcgtatgatgaaatggcaaagtatgatctcccagcatctattaacttcattctgaacaagacaggacaagaacaggtttactacgtcggacattcgcaaggaactacaattggatttattgctttttcgcaaatcccagaattggccaagaggatcaaaatgttttttgctttgggtccagttgcatcagtcgctttttgcacttcgcccatggccaagcttggaaggcttccagaccatttgattaaagatttgttcggagacaaggaatttctacctcaaagtgcttttctcaaatggctgggtactcacgtctgtactcacgttattttgaaagaactttgtggcaacttgtgtttcctcctttgcggctttaatgaacgcaacctaaacatgtctcgtgtggatgtgtacaccactcatagtcctgcaggcacttctgttcaaaatatgttgcattggtcccaagcggtcaaatttcagaagtttcaggcattcgattgggggtcttcggcgaagaattatttccactacaatcaaagctatccacccacctataatgtcaaagacatgttggtaccaacagcggtctggtctggaggccacgattggttggctgatgtgtacgatgtaaatattctcttgactcaaatcaccaatttggtgtttcatgaatcaatccctgagtgggaacatcttgattttatttggggacttgatgcaccctggaggctgtacaataagattataaacttgatgagaaaataccag

SEQ ID NO: 15745 - DNA, 1197 bp, synthetic construct
  misc_feature 1..1197: note = source = /note="Description of Artificial Sequence: Synthetic coding sequence"
  source 1..1197: mol_type = other DNA
atgaaaatgcgtttcctaggtctagtggtttgcctagttctgtggacattacatagcgagggctcccggggcaagctcaccgccgtagaccccgagaccaacatgaatgtgtctgagattatctcatactgggggtttccttccgaagagtacctggtggaaacagaagacggctacatcctgtgtttaaatcgtattcctcatggtcggaagaatcactcagacaaaggacccaagccggtggtcttcctgcagcatgggcttctggcagattcctccaactgggttacaaacttggcaaatagttcactcggtttcatccttgccgatgccgggtttgacgtttggatggggaactctcggggcaacacttggagccggaagcataagacgctgagtgtgtctcaggacgagttctgggcgttttcatacgacgaaatggccaagtacgatcttccagcgtccatcaacttcatcctgaacaagaccgggcaggaacaggtgtactacgtgggtcactcgcagggtacaaccatcggattcatagcattttctcagatccccgaattggccaaaagaataaaaatgtttttcgccctcggcccagttgcctccgttgccttttgtacgtcccccatggcaaagcttggacgcctcccagatcatctgatcaaagatctcttcggagacaaagagtttctgcctcagagcgccttcctgaaatggctagggactcacgtgtgcacccacgtgatactgaaagaactgtgcgggaacctgtgttttctcctttgtggattcaacgagcgaaacctgaatatgtccagggtcgatgtgtatacgactcacagtcctgccggcaccagtgttcagaacatgctgcactggagccaagcagtgaaatttcaaaagttccaggcttttgattggggctcttccgctaagaactacttccactacaaccagtcttatccgccgacatataacgtgaaagacatgcttgtacccacggccgtgtggtcgggtggacacgactggctcgccgacgtatatgacgtgaatatcctgctgacccagataaccaacctggtttttcatgagagcatccccgaatgggagcaccttgacttcatttggggactggatgccccctggcgcctctacaacaagataatcaacctgatgagaaagtatcag

SEQ ID NO: 15746 - DNA, 1197 bp, synthetic construct
  misc_feature 1..1197: note = source = /note="Description of Artificial Sequence: Synthetic coding sequence"
  source 1..1197: mol_type = other DNA
atgaaaatgcgcttcctcgggctggtagtgtgcctggtgctgtggactctccactcagaaggctcacggggaaaactcaccgctgtggatccggagactaatatgaatgtctctgaaatcatctcctactggggttttccatccgaagagtatttggtggaaactgaggacggttacatcctgtgtctcaatcggatccctcacggaagaaagaaccacagcgacaagggccccaaacctgtcgtctttcttcaacacggactgctcgctgactcgtccaattgggtgactaacctggccaactcctcactcggatttatcctcgccgatgcgggatttgacgtgtggatgggaaattcgcggggaaatacttggtcaagaaaacataagacgctgtcagtgtcgcaggatgaattctgggcctttagctacgatgaaatggccaagtacgatcttccggcgtcgatcaacttcatcttgaacaagacgggccaggagcaggtctactacgtcggccactcgcaagggaccacgattggatttatcgcattctctcagatcccggaactcgctaagcgcattaagatgttctttgctctgggacccgtggcaagcgtggccttctgcacttcaccgatggcaaagctcggacgactgcctgatcatctgatcaaagatctgttcggagacaaggagttcctgccacaatcagcattcctcaagtggctgggtactcacgtgtgcacccacgtcattctcaaagagctctgtggaaatctgtgctttctgctgtgcggatttaacgaacgcaacctcaatatgtcgcgggtcgacgtgtacaccactcactcgccagccggaacctcggtgcaaaacatgctgcactggagccaagctgtgaagttccaaaagttccaagcgtttgattggggctcatcggctaagaattacttccactacaatcaaagctatccgcctacgtacaacgtgaaagacatgctggtacccaccgccgtgtggtcgggcggacacgattggctcgcggacgtgtatgatgtgaacatccttctcacccagatcactaacctggtgtttcatgagtccatcccggagtgggaacacctcgacttcatctgggggctggacgctccatggaggctgtacaacaagatcattaacctcatgcgcaagtaccaa

SEQ ID NO: 15747 - DNA, 1197 bp, synthetic construct
  misc_feature 1..1197: note = source = /note="Description of Artificial Sequence: Synthetic coding sequence"
  source 1..1197: mol_type = other DNA
atgaagatgcggtttctgggactggtggtgtgtctggtcctttggactcttcacagcgaaggttcaagaggcaagctgactgcagtggatcccgaaaccaacatgaatgtctccgaaatcatttcctactggggcttcccatcggaagagtaccttgtggaaaccgaggacggatacattctctgcctgaaccgcatacctcatgggaggaagaatcattccgataaaggacccaagccagtggtctttcttcaacacgggttgctcgccgatagctcgaactgggtaaccaatctggcgaactcctcgcttggattcattctcgcagacgccggcttcgatgtgtggatgggcaactctcgaggaaacacttggtcacggaagcataaaactctctcagtgtctcaggacgaattttgggccttttcttacgatgagatggcgaagtacgatcttcctgctagtatcaactttattctcaacaagaccgggcaggaacaagtgtactacgtgggacatagccaagggaccacgatcggtttcatcgcgtttagccaaattcctgaactggccaagaggataaagatgtttttcgctcttggtcccgtcgcttcggtggccttctgcacttcgccaatggcaaaattgggcagactgccagatcacctgattaaggatcttttcggtgataaagaatttctgcctcagagcgcgtttctcaaatggctgggaactcatgtgtgtacccatgttatcctcaaggagctctgtggaaacctctgtttcctcctgtgcggctttaatgaaagaaatcttaacatgagccgtgtggacgtgtacaccacccactcgccagcaggaacttccgtccaaaacatgcttcattggagccaagcagtgaagtttcagaaatttcaagcatttgactggggttcttccgcaaaaaactactttcactataaccaatcttaccctccgacctataatgtcaaggatatgcttgtcccgacggcagtctggtccggaggtcatgattggttggcagatgtgtacgacgtaaacattttgttgactcagataaccaaccttgtgttccatgagtcaattcctgagtgggagcaccttgatttcatctggggtctggacgcaccgtggagactgtacaataagattatcaatctgatgcgaaagtaccag

SEQ ID NO: 15748 - DNA, 1197 bp, synthetic construct
  misc_feature 1..1197: note = source = /note="Description of Artificial Sequence: Synthetic coding sequence"
  source 1..1197: mol_type = other DNA
atgaaaatgaggtttttaggtcttgtggtttgccttgttttatggactttgcacagcgaaggatctcgaggtaaattaaccgcagtggatcccgaaactaatatgaacgtttctgaaattatttcatattggggtttcccttctgaagagtaccttgtggaaactgaagacggttacatcttgtgcctcaacagaatcccacatggaagaaagaatcacagtgataagggtccaaaacctgtagttttcctacaacatgggctcctagctgattcctctaactgggtgactaatcttgcaaattcatcactgggtttcattttggcagatgccggttttgacgtttggatgggcaacagtagggggaacacttggtctcgcaaacataaaacactctctgtttcacaggatgaattctgggctttcagctatgacgaaatggctaaatatgatttaccggcatccatcaattttattcttaataagaccggtcaggaacaagtttattacgtcggtcactctcaaggaaccacaatcggattcatcgcttttagtcagattcctgagcttgctaagcggattaagatgttctttgcccttggacctgttgcatctgtagccttctgcactagccctatggcaaaactcggtaggttacctgatcatcttattaaggacctttttggtgacaaggagtttctgccccaaagtgcttttcttaagtggctgggtacacacgtgtgcacacatgttatactaaaagaactctgtggcaatttgtgcttccttctctgcggtttcaacgagcgcaatcttaacatgtccagagttgatgtctacactacccattcacctgccggaacatccgttcagaacatgttgcactggtcacaagctgtcaaatttcagaagttccaagcttttgattggggttcttcagctaagaactatttccattataatcagagttacccccctacatataatgtgaaagatatgttagtgcctactgctgtatggagtggcggtcatgattggcttgcagacgtttatgatgttaatattctattgacccaaataactaaccttgtttttcatgagtcaattcctgagtgggaacaccttgattttatttggggattggacgccccttggaggctgtataataaaataataaaccttatgagaaaataccaa

SEQ ID NO: 15749 - DNA, 1197 bp, synthetic construct
  misc_feature 1..1197: note = source = /note="Description of Artificial Sequence: Synthetic coding sequence"
  source 1..1197: mol_type = other DNA
atgaaaatgcgcttcctgggtctggtggtctgcctggtgctgtggaccctccatagtgagggatcacgaggaaaactgacggctgtggatccggagacgaacatgaatgtgagcgagatcatctcctactggggcttcccatcagaagaatacctcgtggaaaccgaagatgggtacatcctgtgtctcaacagaatcccgcatggacgaaagaaccacagcgataagggaccaaagccagtggtgttcttgcagcacggcttgctcgcggactcctccaattgggtgacgaatctggcgaattcgtccctcggattcatcttggcagacgcgggcttcgacgtgtggatgggaaattcacgtggaaacacttggtcgagaaaacacaagaccctgagcgtgtcccaggacgagttctgggccttttcgtacgacgaaatggccaagtacgacctgcctgctagcatcaatttcatcctgaataagactggccaagagcaagtctactatgtcgggcacagccaaggcactacgattggtttcattgcgttttcacaaatcccagaactggccaagcgcatcaagatgtttttcgcgctcggacccgtagcctcggtggccttctgtacgtccccaatggctaagctgggtcgcctgccggaccatttgattaaggatctctttggggacaaggaattcctcccgcagagcgcgtttttgaagtggctgggcactcacgtgtgcacccacgttatcttgaaggagctgtgcggaaacctgtgcttcctgttgtgcggcttcaacgaacgcaatcttaacatgtcgagagtggatgtgtacactacccattcacccgcaggaacttctgttcagaacatgctgcactggtcccaggccgtcaagttccaaaagttccaggcctttgactggggaagcagtgccaaaaactacttccattacaaccagtcctatccgccgacctacaacgtgaaggatatgctcgtcccgactgccgtctggtcgggaggacacgattggctggcggacgtgtacgatgtcaatatcctgctgacccagatcaccaatctcgtgtttcacgaatcgattccggagtgggaacatctggacttcatctgggggcttgacgcgccctggagactgtacaataagatcatcaaccttatgcggaagtatcag

SEQ ID NO: 15750 - DNA, 1197 bp, synthetic construct
  misc_feature 1..1197: note = source = /note="Description of Artificial Sequence: Synthetic coding sequence"
  source 1..1197: mol_type = other DNA
atgaagatgaggtttctcgggcttgtcgtctgcctcgtgctgtggactcttcattccgaggggtcgagaggaaagctgactgcagtggaccctgaaaccaatatgaacgtgtccgagattatctcttactggggctttccttcggaagagtaccttgtggaaaccgaagatggctacattctttgcctgaatcgcataccacatggcagaaagaatcattccgacaaaggacccaagcctgtggtgtttctgcagcatggactccttgctgattcgtcgaattgggtgaccaaccttgcaaactcgtccctcggtttcattctggctgatgcaggtttcgatgtctggatgggaaacagcagaggtaatacctggtcccgcaaacacaagaccttgtctgtgtcccaagatgagttttgggcatttagctacgatgaaatggcaaaatacgacctgccagcctcgatcaactttattctgaataagactggtcaggaacaagtgtactacgtcggacatagccaaggcaccacgatagggtttattgcattctcccaaattcctgaactggccaaacgcatcaaaatgtttttcgcactcggtcctgtggcatccgtggccttttgcactagcccaatggcgaagctgggccgactccccgatcatttgataaaagatctgttcggagataaagaatttctccctcaaagcgcatttcttaagtggttgggaacgcatgtctgtactcatgtgatactgaaggaactgtgtggcaacctttgctttctgttgtgtggattcaatgaacgtaatcttaacatgtcccgtgtggatgtgtacactacgcattcacccgcgggaacgtcggtgcagaacatgctgcattggtcccaggcagtgaaatttcagaagtttcaagccttcgactggggttcgagcgccaagaactactttcattacaatcagtcgtatccccccacctacaacgtgaaagatatgcttgttcctacggcggtgtggtcagggggacatgactggcttgctgacgtgtacgatgtcaacatcctgcttactcaaatcacgaatctggtgtttcatgaatccatcccagagtgggagcatcttgacttcatctgggggctggatgctccatggcggctctacaacaagatcattaatctcatgcgtaaataccaa

SEQ ID NO: 15751 - DNA, 1197 bp, synthetic construct
  misc_feature 1..1197: note = source = /note="Description of Artificial Sequence: Synthetic coding sequence"
  source 1..1197: mol_type = other DNA
atgaaaatgcgcttcctaggtctggtcgtttgcttagtattatggacactccattcggagggctcccgaggtaagttgacagccgtcgaccctgaaaccaacatgaatgtctccgagataatttcatactggggctttccgtcggaggagtatctggtggagaccgaagacggttatatcctctgtttgaatcggattccgcacggccgtaagaaccactctgataagggcccgaagcctgtcgttttcctgcagcatggtttgctagcggactcaagcaattgggtcacgaatctagcaaactcttcattgggctttatcctcgccgacgccggattcgatgtttggatgggcaactcccgcggaaatacgtggtctcgtaagcataaaactctctccgtatcgcaggatgagttctgggcattctcatacgatgagatggccaagtacgatctgccagcgtcaatcaatttcattttaaataagacgggtcaggaacaggtgtattacgttggacattctcaaggtacgacgataggattcatcgcattcagtcaaattccagagcttgcaaagagaattaagatgttttttgcccttggccccgtcgcatcggtcgccttctgtacttcacccatggccaaattgggacgcctccctgaccacttgataaaggacttgttcggagataaagagttcttgcctcagtcggctttcttgaagtggctcggtacccacgtctgcactcatgtcattctgaaagagttgtgcggaaacctgtgcttcttactctgcggattcaacgagcgtaatcttaacatgtcaagagtcgatgtatacacaacccactcgccagccggcactagcgtgcaaaacatgttgcattggtcccaggcagtcaaattccagaagttccaagctttcgattggggctcctcagccaaaaactatttccactataatcagagttaccctccgacgtataatgtcaaagatatgcttgtgccaactgcagtgtggtccggcgggcatgactggctcgcagacgtctacgacgtgaatattttgctcacgcaaatcacgaacctcgtgttccatgagagtatcccggagtgggaacacttggactttatctggggccttgacgcgccctggcgtctgtataataagattatcaaccttatgagaaagtaccag

SEQ ID NO: 15752 - DNA, 1197 bp, synthetic construct
  misc_feature 1..1197: note = source = /note="Description of Artificial Sequence: Synthetic coding sequence"
  source 1..1197: mol_type = other DNA
atgaaaatgcgattcctcgggcttgtcgtatgtttggtcttgtggaccctgcactcagagggctctagaggtaaactgacagctgtagaccccgaaacgaatatgaatgtgagcgaaatcatttcctactggggtttcccatccgaggaatacctagtcgagacagaggacggatatattctgtgtctcaatcgaattccacatggccgcaagaaccactcagacaaggggccaaagcccgtcgtttttcttcagcacgggctgttggccgacagttctaactgggtgacgaacctcgccaatagcagtctggggttcatcttggccgacgccgggtttgatgtctggatgggaaacagtagagggaatacatggagccgaaagcacaaaaccctctcagtctctcaggatgaattctgggctttttcgtacgacgaaatggcgaaatacgatctgcccgcttctatcaattttatcctcaataaaacagggcaggaacaggtgtattacgttgggcactcccagggaactaccatagggttcattgccttctctcagatcccagagcttgcaaagcgcattaagatgtttttcgccctgggccctgtggcgtccgtcgccttctgcacctctcccatggcaaagttggggagacttcccgaccacctgataaaagacctatttggtgacaaagaattcttgccccagtcagcctttttgaagtggctcggaacacacgtttgtacacacgttatcttaaaggagctgtgcggcaacttgtgtttcttgctgtgtggatttaacgagcgcaatctgaacatgagtagggttgatgtatatacaacacacagtcccgctgggacatctgttcagaacatgctgcactggagtcaagcagtgaaatttcagaagtttcaggcgttcgactggggttcaagcgccaagaactattttcactataaccaatcctaccccccaacatacaacgttaaggacatgctggttcctactgccgtctggagtggcggtcacgattggttagcggacgtgtacgatgtgaacatcctgctcacgcagataactaacctcgttttccatgaaagcatccccgaatgggagcatctcgatttcatttgggggctagatgcgccctggcgtttgtacaataaaatcatcaatctgatgcgaaaataccag

SEQ ID NO: 15753 - DNA, 1197 bp, synthetic construct
  misc_feature 1..1197: note = source = /note="Description of Artificial Sequence: Synthetic coding sequence"
  source 1..1197: mol_type = other DNA
atgaaaatgcggttcttgggccttgtcgtgtgtttggtgctgtggaccctccactccgagggtagccggggaaaactgactgcggtcgatcctgaaactaatatgaacgtgtcggagatcatatcatactggggttttcctagcgaagaatatctggtcgaaaccgaggacggatacatcctgtgcctgaacagaattccgcatgggaggaagaatcactctgacaagggccccaaacctgtggtctttctgcagcatggtcttttggccgattcgtcaaactgggtcactaatctggcgaactcatctttggggttcatccttgctgatgctggcttcgatgtgtggatgggcaatagccgcggtaatacctggtcacgcaagcataagaccttgtctgtgtcccaggatgagttctgggccttctcatacgacgagatggcgaaatacgacctgccggcgtctattaacttcatcctgaacaaaaccggccaagaacaagtgtactacgtcggccactcccaagggaccaccatcggatttatcgcctttagccagattcccgaactggctaagcggatcaagatgtttttcgcactgggacctgtggcctccgtggcgttctgcacgtccccgatggccaaactggggcgcctcccggatcatctcatcaaggacttgtttggtgacaaggaatttctcccacagtcagcattcctgaagtggcttggcacccacgtgtgcactcatgtgattctgaaggagctgtgcgggaacctgtgtttcctgctgtgcggattcaacgagcgcaacttgaacatgtcaagggtggatgtctacactacccactccccggcaggaacctcggttcagaacatgctccactggtcgcaagccgtgaagttccagaaattccaggcctttgactggggatcgagcgccaagaattacttccactacaaccaatcctacccgccgacttataacgttaaggacatgctggtgccgacggcggtctggtccggaggtcatgactggcttgcggacgtgtacgacgtgaacatcctcctcactcagatcaccaatctggtgttccacgaatcgatccccgaatgggagcatctggatttcatctggggattggacgccccctggcggctttacaacaaaatcatcaacctcatgagaaagtaccag

SEQ ID NO: 15754 - DNA, 1197 bp, synthetic construct
  misc_feature 1..1197: note = source = /note="Description of Artificial Sequence: Synthetic coding sequence"
  source 1..1197: mol_type = other DNA
atgaaaatgaggtttttaggcctcgtcgtatgtctggtgctctggacactgcactcggagggctctagagggaagctgacagctgtggaccctgaaactaatatgaatgtttccgaaattatttcctactgggggttcccatctgaagagtatctggtggaaacagaggatggctatattttgtgcctgaatcgcattccgcatggtcgtaaaaatcactccgataaaggccctaaacccgtggtctttctgcagcacggtctcttggccgacagttcaaactgggtcactaacctggccaattcatccttgggttttattctggccgacgcggggtttgacgtgtggatgggaaacagtcgagggaatacgtggagccgaaagcataaaactctctcggtgagccaggacgaattctgggctttctcttacgatgagatggctaagtacgatctgcccgcttccattaatttcatattaaataagacgggtcaagagcaggtgtattacgtgggacactcacaggggactaccataggatttatcgcgttttcacagatccctgagcttgccaagcggattaagatgttttttgcactaggtcctgtagcttcagttgcgttttgtacatcccccatggcgaagctcgggagacttccagatcaccttataaaggatctctttggggacaaagaattcctgcctcagagtgcctttctcaagtggctcggaacccatgtgtgcacacacgtgatcctaaaggaactgtgtgggaatctgtgctttctcctttgcggattcaacgagagaaatctcaatatgagcagagtagacgtgtacaccacacactcacctgccgggacttccgtgcagaatatgttgcattggagtcaagcagttaaattccagaaattccaagcttttgactggggcagttcagccaaaaattacttccattacaaccaaagctacccacccacttacaacgtgaaggatatgctggtgccgactgcagtgtggtctgggggtcacgattggctggccgatgtgtatgacgtcaacattctcttgacccagatcacgaacctcgtgttccacgaaagcatccccgaatgggaacacttggactttatctggggtcttgacgccccatggcggctgtataataagattatcaacttgatgcgaaaataccaa

SEQ ID NO: 15755 - DNA, 1197 bp, synthetic construct
  misc_feature 1..1197: note = source = /note="Description of Artificial Sequence: Synthetic coding sequence"
  source 1..1197: mol_type = other DNA
atgaaaatgcggttcctcgggctcgtggtgtgtctggtgctgtggactctccattcggagggcagccgcggaaagctcaccgcagtcgacccagaaactaacatgaacgtgtccgagataatctcatactggggatttccctccgaagaataccttgtggaaaccgaagatggatatatcctttgtctgaataggattccccacggaaggaagaatcactccgacaaaggaccgaagccagtggtctttcttcaacatggacttctggccgatagctccaactgggtgactaacctggcaaactcctcgctgggtttcatactcgcagacgcaggttttgatgtgtggatggggaactcacgaggcaacacctggtcccgaaagcacaaaactcttagcgtgagccaagatgagttttgggcattttcatacgatgaaatggccaagtacgatctgcctgcaagcatcaactttattctgaataagaccggacaggaacaagtctactacgtgggacattcacagggaaccacgattggttttatcgcattttctcaaatacctgagcttgcaaagcgcatcaaaatgttttttgcactcggtcctgtggcatcggtggcattttgcacttctcccatggctaaacttggaaggctgccagaccatcttatcaaggatctttttggcgataaagagtttcttcctcaatcagcgtttcttaagtggctgggtacccacgtttgtacccacgtgattcttaaagagctttgtggaaacctgtgctttcttctttgtggattcaatgaaagaaatctgaatatgtcgagggtggatgtctacactacgcattcgccagcggggacctccgtgcagaacatgcttcattggtcacaagcagtgaagtttcagaaatttcaagcgtttgattgggggtcctccgcgaaaaactactttcattacaaccagtcgtaccctccaacttacaacgtcaaggatatgcttgtgccaacggcggtgtggtccggcggacacgattggttggcggacgtgtacgatgtgaacatcctgctgactcagataactaacttggtgttccacgaatcgatccctgaatgggaacatctcgatttcatttggggcctggatgccccttggagactgtacaacaagataatcaatcttatgagaaagtaccaa

SEQ ID NO: 15756 - DNA, 1197 bp, synthetic construct
  misc_feature 1..1197: note = source = /note="Description of Artificial Sequence: Synthetic coding sequence"
  source 1..1197: mol_type = other DNA
atgaaaatgaggttcctgggactggtagtgtgcctcgtcttgtggactctgcattcggaaggaagcaggggaaagctgaccgcggtcgatccagaaaccaatatgaatgtgtccgagataatctcatactggggattcccatcggaagaatacctggtcgagactgaagatggatacatcctgtgtcttaaccggatcccgcatggcagaaagaaccactccgataagggtcccaaacctgttgtgtttcttcaacacggtctgctcgcggattcctcgaactgggtaaccaatcttgcgaattcgtcgcttggattcattctggccgacgcgggatttgacgtctggatgggcaactcacgtggtaatacgtggagcaggaagcataagaccctttcggtcagccaggatgaattctgggcattctcatacgatgaaatggcaaagtatgacctgccagcttccatcaacttcatactgaataagactggacaagagcaggtgtactacgtgggacattcgcagggaaccactatcggattcattgctttctctcaaatacctgaacttgcaaaacggatcaaaatgtttttcgcacttggccccgtggcgtccgtggctttttgcaccagccctatggcgaagctcggacgcttgcctgaccacctgatcaaggacctcttcggagataaggagttccttcctcagtcggcttttcttaagtggttgggaacccacgtgtgtactcacgtgatcttgaaggagctttgtggcaacctgtgttttctgctctgtggatttaacgagagaaacctcaatatgtcgagagtggatgtgtacacgactcattcgcccgccggtacttccgtccaaaacatgctccactggtcgcaagcagtgaagtttcaaaagttccaggcatttgattggggatcatcagcaaagaattactttcattacaaccaatcataccctccgacttacaacgtgaaggacatgctggtcccaaccgccgtgtggtcgggtgggcatgactggctggcggatgtctatgatgtgaatattcttctcacccagattaccaacctcgtctttcacgaatcgatcccagaatgggaacatcttgatttcatttgggggctggatgccccatggagattgtacaacaagattatcaatctgatgcgcaagtatcaa

SEQ ID NO: 15757 - DNA, 1197 bp, synthetic construct
  misc_feature 1..1197: note = source = /note="Description of Artificial Sequence: Synthetic coding sequence"
  source 1..1197: mol_type = other DNA
atgaagatgcgctttctgggcctcgtggtctgcctggtattatggacactccacagcgaaggctctcggggcaagctgacggcagtcgatccagaaaccaacatgaacgtcagcgagatcatctcctattggggctttccttcagaagagtacctggtcgagacagaggacggctacatcttgtgtcttaacaggattcctcacgggcgtaagaaccactctgataagggaccgaagcccgttgtgtttctgcagcatggactgcttgccgactctagcaattgggtgaccaatctggctaactccagcctcggattcatcctggccgatgcaggatttgacgtctggatggggaacagtaggggcaacacttggagccggaagcacaagaccctgagtgtgtcacaagacgaattttgggccttcagctacgacgagatggccaaatatgacctcccagccagtatcaactttattctgaataagaccggccaggaacaggtctattacgttgggcattcacaggggacgactattggtttcatcgccttctctcaaatccccgaactggcgaagcggattaaaatgttcttcgccttgggacctgtagcctcagtggctttttgtacgtcaccaatggccaaactgggacgccttccggaccacttaataaaagatctgttcggcgacaaggagttccttccgcaatccgctttcctgaagtggctgggcacacatgtgtgtactcacgtaatactgaaagaattgtgtggcaatttgtgtttcctgctatgcggctttaacgagcgcaaccttaacatgtcccgggttgacgtatatactacacatagcccagccggcacctccgtacaaaatatgctccactggtcccaggccgttaaattccagaagttccaagcgttcgactggggtagcagcgccaaaaactatttccattataatcaatcttaccctccaacctacaatgtgaaggatatgctggtccctacagcagtgtggagtggcggccatgattggctggccgatgtctacgatgttaatatactcctcacacagataaccaacctggtgttccatgagagtattccagagtgggaacaccttgactttatttggggattggacgctccatggagactctacaacaaaatcataaacctgatgcggaaataccaa

SEQ ID NO: 15758 - DNA, 1197 bp, synthetic construct
  misc_feature 1..1197: note = source = /note="Description of Artificial Sequence: Synthetic coding sequence"
  source 1..1197: mol_type = other DNA
atgaagatgaggtttctcgggctggtcgtgtgcctcgtgctgtggactcttcactctgagggatcccgcggaaaacttactgccgtggaccccgaaaccaatatgaacgtgtcggaaatcatttcctactggggattcccgtcggaagaatacctcgttgagactgaagatggctacattctctgcttgaaccgtataccacatggaagaaagaatcattcagataagggccctaagcctgtggtgtttctccagcatggtctgcttgccgattcctcgaactgggtcaccaacctggcaaactcatcgcttggttttatcctcgcagatgcaggatttgacgtctggatggggaattcgagaggtaatacttggtccagaaagcacaagaccctctcggtttcacaagacgagttttgggctttcagctatgacgagatggccaaatatgatcttccagcatccattaactttatactgaacaagacgggtcaggagcaggtctactacgtggggcattcacaaggcacgactattggatttatcgcattttcccagatcccagaacttgccaaacgcattaagatgttcttcgcactgggaccagtggcaagcgtggctttttgtacctccccgatggcaaaacttgggcgtctccctgatcacctgattaaagatttgtttggtgacaaagaattcctgccgcaatccgcatttcttaaatggcttggaacccatgtgtgtacccatgtgatccttaaggagctgtgtggtaacctgtgtttccttttgtgcgggtttaacgagaggaatcttaacatgtcgcgcgtcgatgtgtacacgactcacagccctgctggaacgtcggtgcagaatatgttgcactggtcgcaagcagtgaagtttcaaaagttccaggcatttgactgggggtcgtcggcgaagaactactttcactacaatcaatcatacccccctacttacaacgtgaaggatatgcttgttccaaccgctgtgtggtctggtggacacgattggctggcagacgtctacgacgtgaacatcctcctcacgcaaataactaatttggtgttccacgaatccattcctgaatgggaacaccttgactttatctggggtctggacgcgccttggcggctctacaacaagatcattaatctgatgcggaagtaccag

SEQ ID NO: 15759 - DNA, 1197 bp, synthetic construct
  misc_feature 1..1197: note = source = /note="Description of Artificial Sequence: Synthetic coding sequence"
  source 1..1197: mol_type = other DNA
atgaagatgaggttccttggcctcgtggtttgtctggtgctgtggactctgcactctgaaggttcccgcgggaaactcaccgccgtagatcctgagactaatatgaacgtttccgaaattatctcctactggggctttccttcagaagaatacttggtggaaacggaggatgggtatattctgtgcctgaatcgaatcccacacgggaggaagaaccactctgataaaggcccaaaacctgttgtgtttctccagcacggattgctggccgatagttctaactgggttacgaatctggctaactccagcctgggctttattctcgcagacgccgggttcgacgtctggatggggaattcccgggggaacacatggtccagaaagcataaaacactgtccgtgtcccaggacgagttctgggcgtttagttacgatgagatggccaagtacgaccttccagccagtatcaactttattctcaataaaaccggccaagaacaggtgtactacgtggggcactctcaggggaccaccattggcttcatcgctttcagccagatacctgagctggccaagcggatcaaaatgttttttgcactggggcccgtggccagcgttgcgttctgcacgtcccccatggctaaactgggaaggctgccagatcacctcattaaagatttgtttggagacaaagagttccttccccagagtgctttccttaagtggctgggcacccacgtctgtacgcacgttattctgaaagaactctgtggcaacctctgcttcctgctgtgtggattcaatgaacgcaatctgaatatgagcagggtcgatgtgtacactactcattctcccgccggaacatcagtgcagaatatgctgcactggtcccaggccgttaaatttcagaaatttcaagccttcgactggggaagctccgccaagaattattttcactataaccagtcataccctccaacatacaatgtaaaggacatgttggtgccgacagcagtgtggagtggcggccacgattggttggcagatgtctatgatgtgaatatcctgttgacacagattaccaatttggtttttcacgaatctatacctgagtgggagcacctggatttcatctgggggctggatgccccctggcggctgtataacaagattatcaatctcatgcggaaatatcag

SEQ ID NO: 15760 - DNA, 1197 bp, synthetic construct
  misc_feature 1..1197: note = source = /note="Description of Artificial Sequence: Synthetic coding sequence"
  source 1..1197: mol_type = other DNA
atgaagatgcgctttctgggcctcgtcgtgtgtctcgtgctgtggaccttgcatagcgaagggtcgcgcggaaagctgacggcagttgacccggaaaccaacatgaacgtgtcagagatcatctcatactggggtttcccgagcgaagaatacctcgtggagacggaggacgggtacatcctctgcctcaaccgcatcccacatggcaggaaaaatcatagcgataagggaccgaaacccgtggtgttcctccagcatggcttgttggccgattcatcgaattgggtgactaacctcgcaaactcctcgctgggattcatccttgcggatgcgggcttcgatgtgtggatgggcaattcgcgcggaaacacgtggagccggaaacataagaccctgtctgtgtcgcaagatgaattttgggccttctcgtacgacgaaatggcaaagtacgacttgcctgcaagcatcaacttcatcttgaataagactggacaggaacaggtgtactatgtaggacactcgcaggggaccactatcggtttcattgcctttagccagatcccagagctggccaagcgcatcaagatgttcttcgcgctgggacctgtggcctctgtggccttctgcacttcgcccatggctaaactgggccgattgccggaccatttgatcaaggatctcttcggggacaaagaattcctgcctcaatcagcgtttctgaaatggctcgggacgcatgtctgcacccacgtcatcctcaaggaactgtgcgggaacctgtgtttccttctgtgcggattcaatgaaaggaatctcaacatgtccagagtggatgtgtacaccactcattcgccggcgggcacctcggttcagaatatgctgcattggtcgcaagcagtgaagttccagaaattccaagccttcgattggggttcctccgccaagaactacttccactacaaccaatcctacccacctacttacaacgtcaaagatatgcttgttcctaccgccgtgtggtcgggcggccatgattggctggcggacgtgtacgacgtgaacattctgcttacccagatcactaatctggtgttccacgaaagcatcccagagtgggagcacctcgacttcatttggggactggacgcgccgtggcgcctctacaacaagattatcaatcttatgaggaagtaccaa

SEQ ID NO: 15761 - DNA, 1197 bp, synthetic construct
  misc_feature 1..1197: note = source = /note="Description of Artificial Sequence: Synthetic coding sequence"
  source 1..1197: mol_type = other DNA
atgaaaatgcgctttctgggtctggtggtgtgcctggtgctctggactctgcattcagagggctcgcgcggtaagctgaccgcggtggacccagaaactaatatgaacgtatccgagatcatctcctactggggatttccgtccgaagaatatcttgtggaaaccgaggacggatacatcctctgcctgaaccggatcccgcacgggcgcaagaaccatagcgataagggcccaaagccggtggttttccttcagcacggcctgctcgcggactcgtccaattgggtcaccaatctcgcgaattctagcttggggtttatcctggcagacgccggattcgacgtgtggatgggaaacagccggggaaacacctggtcccggaagcacaagaccctctccgtgtcgcaagacgaattctgggcttttagctacgacgaaatggctaagtacgacctgcctgcgtcaatcaacttcatcctcaacaaaacgggacaggagcaggtttactacgtgggtcactcgcagggaacgacgatcggctttatcgctttctcacagatcccggaacttgctaaacgcatcaaaatgtttttcgccctgggaccggtggcgagcgtggccttctgcacctccccgatggctaaacttggacggctgcccgatcatctgatcaaagatctgtttggagacaaggaattcctgccacagtcggctttcctgaagtggctgggaacccatgtgtgtacccatgtgatcttgaaggagctctgcggcaacctgtgcttcttgctttgcgggttcaatgaaagaaatctcaacatgagccgcgtggatgtctataccactcattccccagccggaacctcagtccaaaacatgctgcattggtcgcaggcggtgaagttccagaagttccaagccttcgattggggatccagcgccaagaattactttcactacaaccaatcgtaccccccaacttacaacgtgaaggacatgctggtgcctaccgcagtgtggagcggtggacacgattggctcgctgacgtctacgacgtcaatatcctcctgactcagattactaacctggtgtttcacgaatccattcctgagtgggagcacttggacttcatctggggactcgatgcgccgtggcgcctgtacaataagatcatcaacttgatgcggaagtaccag

SEQ ID NO: 15762 - DNA, 1197 bp, synthetic construct
  misc_feature 1..1197: note = source = /note="Description of Artificial Sequence: Synthetic coding sequence"
  source 1..1197: mol_type = other DNA
atgaagatgcgcttccttggcctggtggtctgtctggtgctttggaccctccactcagaaggctcaagggggaagctgactgcggtcgatcccgaaaccaacatgaacgtctcggagatcatctcatactggggttttccttcagaagaatacctggtcgaaaccgaagatggatacattctttgtctgaacagaatccctcatggacggaagaatcactccgacaagggacctaagcctgtcgtgtttctccaacacgggctgctcgctgattcgtctaattgggtcaccaaccttgcaaactcatccctcggctttatcctcgcagacgcgggtttcgacgtgtggatgggtaactcgcgcgggaatacttggtcgcggaagcacaagactctgtcggtgtcgcaagatgaattttgggcattttcatacgacgaaatggcaaaatacgacctccctgcatcaataaactttatactcaacaagactggacaagaacaagtgtactacgtcggtcactcgcaggggactaccattggttttatcgcattttcccaaattccagaactggccaagagaatcaagatgttttttgcactgggacctgtggcgtcggtggcattttgtacttcgcctatggccaaattgggccggcttccggaccatttgataaaggatctcttcggagataaggagtttctgccccaatcggcattccttaaatggctcggaacgcatgtgtgtactcatgtcattcttaaagaactctgtggaaatctttgctttcttctttgcggatttaacgaacgtaacctcaatatgtctcgtgtagatgtctacaccacccattcccctgcaggtacctccgtgcagaacatgctgcactggagccaagccgtcaaatttcagaagttccaggcattcgattggggttcatcggcaaagaattacttccactacaatcaatcctaccccccgacttacaacgtgaaagatatgcttgtgccgaccgctgtgtggtccggaggacatgattggctggcagatgtgtacgatgtgaacatcttgcttactcaaattacgaatctggtgttccatgaatccatcccagaatgggaacatctcgacttcatctggggtttggatgccccttggaggctgtacaacaagataatcaaccttatgcgcaaataccag

SEQ ID NO: 15763 - DNA, 1197 bp, synthetic construct
  misc_feature 1..1197: note = source = /note="Description of Artificial Sequence: Synthetic coding sequence"
  source 1..1197: mol_type = other DNA
atgaaaatgcgattcctcgggcttgttgtctgcctcgtcctctggacactgcattctgagggatctagggggaaactcacagctgttgatcccgaaactaacatgaatgtatcagaaatcatctcttattggggattcccttcggaagaatatctggtggagactgaagacgggtatattttatgtctaaataggatccctcatggacgcaaaaaccatagtgataaagggccaaaaccagtagtgttcttgcagcatgggttattggccgattcctctaactgggttacaaacttagctaattcctccctggggttcatactggcagatgctggattcgatgtctggatgggaaattcaaggggaaatacttggtcaaggaaacacaagactctgagtgtctcccaggatgaattctgggcattctcctacgacgagatggccaaatatgatctccctgcctctatcaactttatccttaataaaacagggcaggaacaggtctactacgtcggacatagtcagggaacaactatagggtttattgccttctcccagataccggagcttgctaaaagaatcaaaatgtttttcgctttggggccagttgctagtgtagcattttgtacttctcctatggcaaagctggggcgccttccagatcatctgataaaagatctttttggggataaagaatttctgccccaatcggcttttctcaagtggttgggaacacatgtatgtacacatgtgattctgaaagaactctgtggaaacctctgttttctactctgtgggttcaatgagcggaacttaaatatgtccagggtggatgtctacacaacacactctcctgcagggacatcagtgcagaatatgctccactggagtcaggcggtgaaattccaaaaattccaggctttcgattggggatcttcagcaaagaactatttccactacaaccagtcttatccgcccacttataatgtcaaagatatgctagtacctacagccgtttggtcagggggacatgattggctcgctgacgtgtatgatgtgaatattctgcttacacagatcacaaaccttgtgttccatgaatctattcctgaatgggaacacttagactttatctggggactggatgccccatggagactatacaataaaatcataaaccttatgaggaaataccag

SEQ ID NO: 15764 - DNA, 1197 bp, synthetic construct
  misc_feature 1..1197: note = source = /note="Description of Artificial Sequence: Synthetic coding sequence"
  source 1..1197: mol_type = other DNA
atgaagatgagattcctagggctggtggtttgcctggtgttatggactctgcactcagaaggcagtcgcggcaagctgaccgctgtcgatccggagacaaacatgaacgtgagcgaaatcatctcatactggggcttccctagtgaggaatacttggtagagacagaagacgggtacatactctgcctgaataggattcctcatggccgcaagaatcactctgacaagggtcctaaacctgtggtgtttcttcagcatggactcctcgctgatagttccaattgggtgaccaatctggccaactctagtttgggatttatcttggccgatgctggctttgacgtttggatgggcaacagtcgtgggaacacatggtcccgaaaacacaagaccctcagtgtgagtcaagatgagttctgggcattcagctatgatgaaatggcaaaatacgatctgcccgcctccataaattttatcctgaacaagaccggtcaggagcaggtatattatgtggggcactcccaagggacaacaatcggcttcattgcattctctcagatccctgagttggcaaagcgaatcaagatgtttttcgcgcttggacccgtagcctctgtggccttttgtacatcccccatggccaagctcggacggttacctgaccatcttatcaaggatctttttggggacaaagaatttcttccccagtctgcattcctgaagtggttagggacccacgtatgcacacacgtgatcctgaaggaactctgtggcaatctctgctttctcctgtgcggattcaatgaacgaaatctgaatatgagccgagtggacgtatacactacacactctcccgccgggacttccgttcagaacatgctccattggtcccaggctgttaaattccaaaaattccaagcatttgattggggaagctcggccaaaaattatttccattacaatcaaagctatccaccgacatacaacgtcaaggacatgttagtgcctaccgctgtgtggtctggcgggcatgattggctagcggacgtgtacgacgtgaatattctgctaacccaaatcaccaaccttgtctttcacgaatccatcccagagtgggaacatttggatttcatctggggccttgacgccccatggcgtttgtacaataaaattatcaacctcatgaggaagtatcag

SEQ ID NO: 15765 - DNA, 1197 bp, synthetic construct
  misc_feature 1..1197: note = source = /note="Description of Artificial Sequence: Synthetic coding sequence"
  source 1..1197: mol_type = other DNA
atgaagatgcgcttcttaggcttagttgtttgtctggttctttggacactccactcagagggctccagaggcaagttaacggccgtggatccagagacgaacatgaacgtttcagaaatcatttcctattgggggttcccaagcgaagaataccttgttgaaacagaagatgggtatattctttgcctgaatcgtattccgcatggtagaaagaatcactctgataaaggcccgaaacctgtggtattccttcagcatgggttactggcggatagcagcaactgggtaacgaaccttgcaaactcttcgctcgggttcatccttgcagatgcaggctttgatgtgtggatgggtaatagccgaggcaacacgtggtcaagaaaacacaagacattgagcgtaagccaggacgagttttgggcattcagttatgatgagatggccaaatacgatcttccggcctcaatcaattttattctgaacaaaactggccaagagcaagtctactacgttggacactctcaaggcacgacgattggatttattgcgttcagccagataccggaactggctaaacgcattaaaatgttttttgcactgggaccagtagctagcgttgcattttgtacgtcacctatggccaaattaggaagattacctgaccatttgatcaaggatctgtttggtgataaggaatttttaccgcaatcggcctttcttaaatggcttggtactcatgtgtgcacacacgttatcttgaaggaactttgtggaaatctgtgttttctactttgtggttttaacgagcgaaatctcaatatgtccagagtagacgtatatacaactcactccccagccggaacgtctgtgcagaatatgcttcattggagccaagcggtaaaattccagaaatttcaagctttcgattgggggtcttccgccaaaaattattttcattacaatcaatcttatccgccgacctacaatgttaaagacatgcttgttccgaccgccgtgtggagtggaggccatgattggttggcagacgtctatgacgttaacatactgcttacgcagatcacgaacctggtgtttcatgaatctattccggaatgggagcatctagattttatttggggcttagacgcaccttggcgtctttataataaaataattaacctgatgcgtaaatatcag

SEQ ID NO: 15766 - DNA, 1197 bp, synthetic construct
  misc_feature 1..1197: note = source = /note="Description of Artificial Sequence: Synthetic coding sequence"
  source 1..1197: mol_type = other DNA
atgaagatgcggttcctcggcctcgtcgtctgcctggtgctatggaccctgcactctgagggctctcgtggcaagctcaccgccgtggacccagagactaatatgaatgtgtccgaaataatctcctactggggctttccctctgaggagtacttggttgagactgaagacggatatatcctttgcctcaaccgtattccgcacgggagaaagaaccatagcgataagggcccaaagcccgtagtctttttgcagcacggactcctggcggattcctccaactgggtgaccaacctggccaatagtagtctgggctttatcttggccgatgctggtttcgacgtttggatgggtaacagtcgcggcaacacgtggtctcggaaacacaagacactgagcgtctctcaggatgagttctgggctttctcctacgatgagatggccaagtacgacctccctgcttctatcaatttcatccttaataagacagggcaggagcaggtatactacgtagggcattctcagggaacgaccattggattcatagccttctctcagatccccgagctggctaagcgcattaaaatgttcttcgcattggggcctgtggcctctgtcgccttctgcacctcgcccatggccaaactcggccgtctccccgatcatctgatcaaggatctgtttggggacaaggagtttttgcctcaaagtgccttcttgaagtggttgggcactcatgtctgtacccacgtcattctgaaagagctgtgtggcaacctatgttttctcctgtgcggctttaatgagcgcaacctgaacatgagccgcgttgatgtctataccacccacagtccagcgggcacgagtgtccagaacatgctccattggagtcaagcagtcaagttccagaagttccaagctttcgactggggatccagcgctaagaattatttccactacaaccagtcgtacccacccacttataacgtcaaggatatgctagtccccaccgctgtctggtctggtggacacgactggttggcggatgtctatgatgtgaacattttattgacccagataactaacttggtcttccacgagtccatccccgaatgggagcacttggattttatctggggtctggacgcgccctggcgtctgtacaataagattataaatttgatgcgcaagtaccag

SEQ ID NO: 15767 - DNA, 1197 bp, synthetic construct
  misc_feature 1..1197: note = source = /note="Description of Artificial Sequence: Synthetic coding sequence"
  source 1..1197: mol_type = other DNA
atgaagatgagattccttggtttggtggtgtgtctggtgctgtggactctgcactccgagggttcacgcggtaagctgactgcagtggaccccgaaactaacatgaacgtctccgaaatcattagctattgggggtttccaagcgaggaatacctggtcgaaactgaagatggttacattctctgtctgaaccgcatccctcatggacgcaagaaccattcggataaggggcccaagcctgtcgtgtttctgcagcacggccttctggccgatagctcaaattgggtgaccaatctggcaaactcaagcctcggcttcattcttgccgatgcaggatttgatgtgtggatgggaaattccaggggcaacacttggagccgtaaacataagaccctgagcgtgtcacaagacgaattttgggccttttcctacgatgagatggcaaagtacgaccttccggcctcaatcaactttatactcaacaagaccggacaggaacaagtttactacgtcggacattcgcaagggaccaccatcggattcatcgcattttcccagattcccgaacttgcaaaacgtattaagatgttttttgccctgggcccagtcgcatccgtggcattttgtacctcgccaatggcaaagctcggccgtctccctgaccatctgattaaggacctctttggcgacaaagagtttctcccccaatcggccttcctcaaatggctcggtacccatgtgtgtactcatgtgattctgaaggagctgtgcgggaatctgtgttttcttctttgcggttttaacgaaagaaaccttaacatgtcgcgagtggacgtgtacaccactcactctccggcagggactagcgtgcaaaacatgctccattggtcccaagcagtgaaatttcagaaatttcaagcctttgactggggcagctcggctaagaactattttcattacaaccagtcgtacccaccgacgtacaatgtgaaggatatgcttgtccctaccgctgtgtggtcgggcgggcacgattggcttgcagatgtgtacgatgtgaacattttgctcacgcaaataaccaacttggtctttcacgaatccattcctgaatgggaacatcttgacttcatatgggggctcgacgccccctggcgtctttacaacaagatcatcaacctgatgagaaagtaccaa

SEQ ID NO: 15768 - DNA, 1197 bp, synthetic construct
  misc_feature 1..1197: note = source = /note="Description of Artificial Sequence: Synthetic coding sequence"
  source 1..1197: mol_type = other DNA
atgaagatgcgcttcctgggactggtcgtctgccttgtcctttggaccctgcattcggagggatctcgcgggaagctcactgccgtggatcccgaaaccaacatgaacgtgtcagagatcatcagttactggggcttcccttcggaggaatacctggttgagactgaagatggttacattctgtgtttgaataggatcccgcacggccgcaaaaaccactctgacaaggggcccaagccggtcgtttttctgcagcatggacttctcgcggacagctccaattgggtaacgaatcttgcaaattcctccctgggatttatcctggcggatgcagggtttgacgtctggatgggcaattcacgaggaaatacctggtcgcggaagcacaagactttgtcggtgtcacaagacgagttttgggcgttctcctacgacgagatggcaaaatacgacctgccggcctccatcaacttcatcctgaataagaccggacaggaacaggtctactacgtgggacactcgcagggcaccaccattgggttcatcgccttctcgcaaatcccggaattggccaagagaattaagatgttcttcgccttgggaccggtggcctcggtcgctttttgcaccagtccaatggctaagctgggaaggctgccggaccacttgataaaagatttgttcggtgacaaagaattcctgccacagagcgcgtttctcaagtggctcggcactcacgtgtgcactcatgtgatcctgaaagaactctgcggtaacctctgttttctgttgtgcggattcaacgaacgaaacctcaacatgtccagagtggacgtgtacaccactcattcacctgcgggaacgtcagtgcagaatatgctccattggagccaggccgtgaagttccagaaattccaggccttcgactggggaagcagcgctaaaaactattttcactataatcaaagctaccctccaacctacaacgtgaaggacatgctcgtacccactgctgtgtggtccggtggccatgattggctggctgatgtgtacgatgtgaacatcctgctcacgcaaatcactaacctggtattccacgagtcgatcccagaatgggagcaccttgatttcatctggggcctggacgccccgtggcggctgtacaacaaaatcattaatctgatgcgcaagtaccaa

SEQ ID NO: 15769 - DNA, 1197 bp, synthetic construct
  misc_feature 1..1197: note = source = /note="Description of Artificial Sequence: Synthetic coding sequence"
  source 1..1197: mol_type = other DNA
atgaaaatgcgtttcttaggtttagttgtatgtttagttttgtggactttgcatagtgaaggatcaagaggaaaattgactgcagttgatccagaaacaaatatgaatgtttcagaaattattagttattggggttttccatctgaagaatatcttgtagaaacagaagatggatatattctttgtctaaatagaattccacatggaagaaaaaatcattcagataaaggacctaaaccagttgtttttctacaacatggattgttagctgattcatcaaactgggtaactaatttagctaactcttcattaggatttattcttgctgatgctgggtttgatgtttggatgggtaattcaagaggaaatacatggtctcgtaaacataagactctttctgtttcacaagatgaattctgggcattcagttatgatgaaatggctaaatatgatcttccagcttctattaattttattcttaacaaaacaggacaagaacaagtttattatgttggacatagtcaaggaactacaattggatttatcgcttttagtcaaatacctgaacttgcaaaacgaataaaaatgtttttcgctcttggaccagttgcatccgttgcattttgtacttcaccaatggcaaaattaggaagacttccagatcatttaataaaggatctttttggagacaaagaattcttacctcaatctgcttttttaaaatggttgggtactcatgtttgtactcatgttattttaaaagaattatgtggaaatttatgttttttgttatgcggatttaatgaaagaaatttaaacatgagtagagttgatgtttatactacacattcaccagctggaacttcagttcaaaatatgcttcattggtcacaagctgttaaatttcaaaagtttcaagcttttgattggggaagttcagctaagaattatttccattataaccaaagttatcctccaacatataatgttaaagacatgttagttccaactgctgtttggagcgggggacatgactggctagctgatgtttatgatgttaacattttacttactcaaataacaaatttagtttttcatgaatctataccagaatgggaacatttagattttatctggggtttagatgcaccttggagattatataataaaattattaatttaatgcgtaaatatcag

SEQ ID NO: 15770 - DNA, 1197 bp, synthetic construct
  misc_feature 1..1197: note = source = /note="Description of Artificial Sequence: Synthetic coding sequence"
  source 1..1197: mol_type = other DNA
atgaaaatgcgatttcttgggctcgttgtttgcctggttctgtggacacttcactctgaaggaagtagggggaaactcactgcagtcgatcccgaaacaaacatgaacgtctcagaaatcatttcttattggggattcccctctgaggaatacctggtagaaactgaagatgggtacatactctgtctcaaccgaatcccccatggacgaaaaaaccactccgataaggggcctaagccagttgtattcttgcagcacggacttcttgcggactcatctaattgggtaactaatcttgcaaatagtagtctcggattcattctggctgatgccgggttcgacgtctggatgggaaattccagaggaaacacttggtcccgtaagcataaaacactaagtgtgagtcaagatgaattctgggccttttcatatgatgaaatggcgaaatatgatctgcctgcctcgataaattttatactcaacaaaacagggcaggaacaggtttattatgttggacacagtcagggaactacaattggattcattgctttttcccagattcccgagctggcaaaaagaatcaaaatgttctttgcactggggcccgtggcgtctgtggctttttgtacatctccaatggccaaactgggacggctgccagaccacttaataaaagatctctttggagacaaagagttcctaccccagtcagcatttctgaagtggctagggacacatgtatgtacacatgttattctcaaagaactgtgtggaaatctgtgctttctcctgtgtggatttaatgaaaggaacttaaacatgagtagagtagatgtttacactacacactcaccagctgggacatccgtccagaacatgcttcactggtcccaggcagtaaagttccagaaatttcaggcgttcgactgggggtcttctgccaaaaattatttccattacaaccagtcttacccaccaacttacaatgtcaaagacatgcttgtacccactgctgtttggtcagggggacacgattggttagcagatgtctacgatgtaaatatcctcctgacacagatcacaaacctagtgtttcacgaatctataccagaatgggaacatcttgattttatttggggacttgatgcaccatggaggctgtataataagattataaacttgatgcgcaagtaccag

SEQ ID NO: 15771 - DNA, 1197 bp, synthetic construct
  misc_feature 1..1197: note = source = /note="Description of Artificial Sequence: Synthetic coding sequence"
  source 1..1197: mol_type = other DNA
atgaagatgcgatttctgggacttgtggtgtgcctcgtgttgtggaccctgcactcagagggcagcaggggaaaactcaccgctgtcgatccagaaaccaacatgaacgtgagcgagattatctcatactgggggtttccctccgaagagtacctcgtggaaacggaagatgggtacatcctttgtctgaatagaatcccgcatggccggaagaatcattccgacaagggtccaaagcctgtggtgttcctgcagcatggccttttggcagattccagcaattgggtgactaaccttgcaaatagctcgctcggattcatcctggcagatgcaggctttgacgtgtggatgggaaactcccggggaaacacgtggagccggaagcacaagactctgtccgtgtcgcaagatgaattttgggcctttagctacgacgagatggcaaagtacgatcttcctgcatcaattaacttcattcttaacaagactggccaggagcaggtgtactacgtgggccactcgcaaggaaccacgattgggtttattgcattttcacaaatccccgagcttgcaaaacgtattaagatgtttttcgcactgggacctgtggcatccgtggcattttgtacgtcaccaatggcaaagctcggtagacttcctgatcacctgatcaaggacctttttggagataaggagtttcttccgcaatcagcctttcttaaatggcttggtactcacgtctgtacccacgttatactcaaagaactctgtggtaatctttgctttttgctgtgtggtttcaacgaacggaatcttaacatgagccgtgtcgacgtctataccacccactcgccagccgggacttccgtccagaacatgttgcattggtcacaggccgtgaagttccaaaagttccaggcattcgactggggatcatccgccaagaactactttcattacaatcaaagctatcctcccacgtacaacgtgaaagatatgttggttccaaccgcagtgtggtcgggaggacacgactggctcgcggacgtgtacgacgtgaacatccttctgacccagatcactaatctcgtttttcatgaatctataccagaatgggaacatctggatttcatttggggactggatgcaccctggcggctgtacaacaagatcataaacctgatgagaaagtatcaa

SEQ ID NO: 15772 - DNA, 1197 bp, synthetic construct
  misc_feature 1..1197: note = source = /note="Description of Artificial Sequence: Synthetic coding sequence"
  source 1..1197: mol_type = other DNA
atgaagatgcgtttcttaggcctggtcgtgtgtttagtgttatggacattgcactcagaaggatcaaggggcaaacttaccgctgtcgaccccgagaccaatatgaacgttagcgaaattatcagctactggggctttccaagcgaggagtacctggttgaaaccgaggatggctacattctgtgcctcaaccgaatcccccatggtagaaagaatcattccgataaaggaccgaagcctgtagtttttctgcagcatgggctgttagctgacagcagcaactgggtcactaaccttgccaactctagtctcggtttcatcctcgctgacgcaggctttgatgtttggatggggaacagcagaggcaatacctggagcaggaagcataaaactctgtccgtttctcaggatgagttctgggcatttagctatgacgagatggccaaatatgatcttcctgcctctatcaatttcatcctcaataaaaccggacaggaacaggtgtactatgttggccactcacaaggaactactatcggttttattgcattttctcagatccctgaactggccaagagaatcaagatgttctttgctcttgggcctgtggctagcgtggcattctgcaccagtccaatggcaaagctgggtcgcctgcctgatcacctgatcaaagatctgttcggggataaagagtttctgccgcagagtgcttttctgaagtggcttgggactcatgtctgcactcacgtgatcttaaaggagctgtgcggaaacttgtgctttctactgtgcggcttcaacgaaaggaacctcaacatgagtcgggtggacgtgtacaccacacattcccctgcaggcacctccgtgcagaacatgctgcactggtcacaggccgtgaaatttcagaaattccaagctttcgattggggatcttccgccaaaaattacttccattacaaccaatcttatcctcctacctataatgtgaaagacatgctggtgcccactgctgtctggagcggcggtcatgattggttagcggatgtgtacgacgtgaatatcctgctcacacagatcactaacttggtgtttcacgaaagcattcccgagtgggaacacctcgactttatctgggggcttgacgccccatggagactctacaacaagattatcaatctgatgcgcaagtaccag

SEQ ID NO: 15773 - DNA, 1197 bp, synthetic construct
  misc_feature 1..1197: note = source = /note="Description of Artificial Sequence: Synthetic coding sequence"
  source 1..1197: mol_type = other DNA
atgaaaatgcgatttcttgggctcgtggtgtgtctggtgctgtggactctccactcggaagggtcccgcggcaaactgaccgccgtggaccctgagactaatatgaacgtgtcagaaatcatctcctattggggattcccaagcgaagagtacctggtcgaaaccgaggacggctacatcctctgcctgaaccggatcccgcacggacgcaaaaaccactctgacaagggcccaaagccggtggtgttcctccaacatggactgctcgccgactcgtcaaactgggtcaccaatttggccaattccagtctggggttcattctggccgatgctggttttgatgtgtggatgggaaactcaaggggaaacacctggtcccgcaagcacaaaaccctgtccgtgtcccaagatgaattctgggcattttcgtacgacgaaatggcgaagtatgatctgccagcttctatcaacttcatcctgaacaagactggccaggagcaagtctactacgtcggtcattcgcaggggaccaccatcggatttatcgcgttcagccaaatcccggagctcgcaaagcgcatcaagatgttcttcgcgctgggtccggtcgcctccgtcgccttttgtacttcgccgatggccaaactggggcgcctgccggaccatctcatcaaggatctgttcggggacaaggaattcctgccgcagtctgctttcttgaagtggttgggaacccacgtgtgcactcacgtcattctgaaggagttgtgtggcaacctctgcttcctgctgtgcggtttcaacgagcgcaacctgaatatgtcccgagtggatgtctacactacccactcaccggcaggaacttccgtccagaacatgttgcactggtcacaggccgtgaagttccagaagtttcaagcctttgactggggatcgtccgccaagaactacttccattacaatcagtcgtacccgcccacgtacaatgtgaaggacatgctcgtgcctacggctgtgtggagcggcggtcatgactggctcgcagacgtctacgacgtgaacatcttgctgacccaaatcaccaatctcgtctttcacgagtcgatcccggaatgggaacacttggacttcatctggggactggatgcgccctggagactttacaacaagataatcaatcttatgcggaagtaccag

SEQ ID NO: 15774 - DNA, 1197 bp, synthetic construct
  misc_feature 1..1197: note = source = /note="Description of Artificial Sequence: Synthetic coding sequence"
  source 1..1197: mol_type = other DNA
atgaaaatgcgctttctgggtctcgtcgtgtgtctagtgttgtggactctccactcagagggatccagaggcaaactaactgcggtggatcctgagactaatatgaacgtctctgagataattagttattggggattcccaagcgaagagtatttggtggagaccgaagacggctatatactgtgtctcaatcgaatacctcacgggcgaaagaaccactcggataagggcccgaaacccgtcgtgtttctgcagcacggactgcttgcagatagttctaactgggtaactaaccttgctaactcttctctgggctttattctagctgatgctggcttcgacgtttggatggggaacagtcgtgggaacacttggtcaagaaagcacaagacgctatccgtgagccaggatgaattttgggcattctcatacgacgaaatggctaaatacgacctccctgcttccatcaactttatccttaataagaccggacaagaacaggtttactacgtgggacattctcaggggacaaccatcggctttattgccttttctcagatcccagagctggccaaaaggatcaaaatgttcttcgccctggggcccgtggcttccgtggccttctgcacgagcccaatggctaaactgggacgactgcctgaccacctaatcaaggacctctttggcgataaggaattccttccacaaagcgcttttttgaagtggctggggacgcacgtgtgtactcatgtgattcttaaagaactttgcggaaatttatgtttcctgctgtgcggatttaatgaacgtaatctgaatatgagtcgggtcgatgtgtataccacacactccccggctggtaccagcgtccagaacatgcttcactggagtcaggccgtaaagtttcagaaattccaagcatttgactgggggtccagcgccaaaaactactttcattataaccagtcttaccctcccacatacaatgtcaaggacatgttggtccctacagccgtgtggtccggtggacatgactggctcgccgatgtgtacgacgttaacatcctgctgacacagatcacgaacctcgtttttcatgagtcaataccagagtgggagcatcttgacttcatttgggggcttgatgctccttggcgactatataacaaaataatcaatcttatgagaaaataccaa

SEQ ID NO: 15775 - DNA, 1197 bp, synthetic construct
  misc_feature 1..1197: note = source = /note="Description of Artificial Sequence: Synthetic coding sequence"
  source 1..1197: mol_type = other DNA
atgaagatgcggttcctgggactggtggtctgccttgtgctgtggaccctgcattcagaaggttcccgaggcaagctgacggccgtcgaccccgaaactaacatgaatgtgtccgaaatcatatcgtactggggattcccttcggaagagtaccttgtggaaaccgaagatggatacatcctgtgtcttaacagaatacctcatggacgaaagaaccattccgataagggcccaaaacctgtggtgttcctgcaacacggactgctggcagatagcagcaactgggtgacgaacctggcaaattcatcgctgggctttattcttgcagacgctggttttgatgtctggatgggtaatagccgaggaaacacctggagcagaaagcataagaccttgtccgtgtcgcaagacgaattctgggcattttcgtacgacgaaatggcaaagtacgatcttcctgcatcaattaacttcattctgaacaagaccggacaggaacaggtctactacgtcggccattcccaaggaaccactatcgggttcatcgcattttcccaaattcccgaacttgccaagaggattaagatgtttttcgcccttgggccggtggcatcggtcgccttttgtacttcgcctatggccaagctgggaaggctgcccgatcatctgattaaagatctttttggggacaaagaattcctcccacaatcagcatttctgaaatggctgggaacccatgtctgcacccatgtgatcctgaaagagctgtgtgggaacctgtgttttcttctctgtggatttaacgagagaaaccttaacatgtcccgcgtcgatgtctacactacccactcacccgcaggtaccagcgtccagaatatgctccattggtcacaagcagtcaagttccagaaatttcaggcctttgattggggatcatccgcaaagaattactttcactacaatcagtcttacccacctacttacaacgtgaaggatatgcttgtgcctaccgcggtgtggagcggaggacacgattggctggcagatgtttacgatgtgaatattctgctgactcaaattacgaatcttgtctttcacgaatcgattcctgaatgggaacaccttgatttcatatggggtcttgatgccccctggagactgtacaataagatcattaatctgatgcggaaataccag

SEQ ID NO: 15776 - DNA, 1197 bp, synthetic construct
  misc_feature 1..1197: note = source = /note="Description of Artificial Sequence: Synthetic coding sequence"
  source 1..1197: mol_type = other DNA
atgaagatgcggtttctgggcctcgtggtgtgtctggtcctctggaccctccactctgaaggttcaagaggaaagctgactgcggtggatccagagacgaacatgaatgtctccgaaatcatttcgtactggggattcccgtcagaagagtacctggtggaaacggaggatggctacattctctgccttaatcgtattccccacggcagaaagaaccactcggacaaaggacctaagccagtggtctttctccagcacgggctcctcgcggactcctcaaattgggtcactaacttggcgaacagcagcctgggatttatcttggcagatgcaggttttgatgtctggatgggaaactcaagaggtaacacctggtcacgaaaacataagactctttcggtgtcacaggatgagttttgggcattttcgtacgatgaaatggccaaatatgatctgccagcctccatcaactttatccttaacaagacgggtcaagaacaggtctactatgtgggtcactcgcaaggcactaccatagggttcatcgcgttttcccaaattccggaactcgcaaagcgcattaagatgttttttgcccttgggcccgtggcaagcgtggcattttgcacttcaccaatggcaaagttgggtcgattgcctgatcatctcattaaagatctttttggtgacaaagaattcctgccccaatcagcatttcttaaatggcttgggacccatgtgtgtacccatgttattctgaaggaactgtgtggaaatctttgcttcctgctgtgcggatttaacgagcgcaacctgaatatgagcagagtcgatgtgtacaccacccactccccagctggcacctctgtgcaaaacatgctgcattggtcgcaggccgttaagttccaaaagttccaggcatttgattggggctcatccgctaagaactacttccactacaaccagagctaccctcccacctacaacgtgaaagacatgctggtgccgaccgcagtgtggagcggcggacatgattggttggcggatgtgtacgatgtgaacattcttctgacccaaattacgaaccttgtgttccatgagtcgattccagaatgggagcatctggactttatctggggtcttgacgcgccgtggcggctttacaacaaaatcattaacctgatgaggaagtaccag

SEQ ID NO: 15777 - DNA, 1197 bp, synthetic construct
  misc_feature 1..1197: note = source = /note="Description of Artificial Sequence: Synthetic coding sequence"
  source 1..1197: mol_type = other DNA
atgaaaatgcggtttctgggactggtagtctgcttagtgctgtggaccctgcatagcgaggggtcacgtggcaaattaacagccgtggatcccgaaactaacatgaacgtttcggagatcatctcctactgggggtttccttcggaggagtacttagttgagactgaggatggctatattttgtgtttgaatagaattccccacggccggaaaaaccactctgacaagggacccaaacctgtcgtgtttctgcaacacggcttactggcggatagctctaactgggtgacaaacctggccaactcctcactcgggttcatactcgctgacgctgggttcgatgtgtggatggggaatagtagaggaaacacctggtctcgtaagcacaaaaccctgtccgtctcccaggacgagttttgggcgttctcatacgacgaaatggcgaagtacgatctgcccgctagtatcaacttcatcctgaataagaccggacaggagcaggtatactatgtgggtcattctcagggaacaaccattggatttatagctttttctcaaatacccgagctggccaaaagaattaagatgttcttcgccctcggcccagttgcctccgttgcgttctgtacttcacctatggccaagctaggtcgtctgcctgatcacctgatcaaggacctgttcggcgacaaagaattcctgcctcagagtgccttcctgaaatggctgggtacacatgtctgtacccacgtcatcctcaaggagctctgcggaaatctttgcttcctgttgtgtggctttaacgagcgcaatcttaacatgtcccgggtggacgtgtatacaactcactcgcccgccgggacttccgtccagaacatgctccactggagccaggcagtcaagttccaaaagttccaggcttttgactgggggagcagtgctaagaactacttccactataaccagagttatcctccgacctataatgtgaaagacatgcttgtacctaccgcggtgtggagcggggggcacgattggctggctgatgtgtatgacgtgaacattcttctgactcaaatcaccaatctcgtgtttcacgaatctatacccgagtgggaacacctcgatttcatttggggtttggatgcgccctggagactctacaacaagatcattaatctgatgagaaagtatcaa

SEQ ID NO: 15778 - DNA, 1197 bp, synthetic construct
  misc_feature 1..1197: note = source = /note="Description of Artificial Sequence: Synthetic coding sequence"
  source 1..1197: mol_type = other DNA
atgaagatgaggtttctgggacttgtcgtgtgtctggtgctttggaccctgcattcggaaggctcgcgaggtaaacttaccgcggtggacccagaaaccaatatgaatgtgtcggagatcatttcctactggggcttcccttcggaggaatacctcgttgaaaccgaggacggttacattctgtgtctcaaccgtatccctcacggacgtaagaatcactccgataagggacctaagccagtggttttcctccaacacgggctcctggcagattcgtcgaactgggtgaccaacctggcaaactctagtcttggattcattctggcagatgcaggttttgatgtctggatggggaattcgagggggaacacttggtctaggaagcataaaaccctcagcgtctcacaggatgagttttgggctttcagctacgatgaaatggcaaaatacgacctcccagcgtcgattaactttattctgaacaaaaccggacaagagcaggtctactacgtgggacattcccagggaactaccattggcttcatagcattttcacagatacctgaacttgcaaaaagaatcaagatgttttttgcgcttggtcctgtggcttccgtggcgttttgtacgtcccccatggcaaagctggggagactgcctgatcacctcattaaagatctgtttggggataaggagttcctgccacaaagcgcatttctgaaatggctgggaacccatgtgtgtactcacgtgattcttaaggaactctgcggcaacctttgctttctgctgtgtggtttcaatgaaagaaacttgaatatgtcgcgggtggacgtctacactacgcatagtcccgcaggcacttcagtgcaaaacatgcttcactggtcccaagccgtgaaatttcagaagtttcaggcctttgactggggatctagcgcgaagaactactttcactacaaccaaagctacccaccaacttacaacgtcaaggacatgcttgtgccaactgcagtgtggtccggcgggcatgactggctggcagacgtgtacgacgtcaatattcttctcactcagattacgaacctggtctttcatgaatcgattcctgagtgggaacacctggacttcatctggggccttgatgctccttggagactctacaacaaaatcattaatctgatgcggaagtatcaa

SEQ ID NO: 15779 - DNA, 1197 bp, synthetic construct
  misc_feature 1..1197: note = source = /note="Description of Artificial Sequence: Synthetic coding sequence"
  source 1..1197: mol_type = other DNA
atgaagatgaggttcttgggcttagtggtgtgcctggtactgtggaccctccattcggagggcagtcggggaaagcttactgccgtggatccagaaactaatatgaatgtctctgagattatatcctactggggatttccctccgaagagtatctggtagagactgaggatggctatatcttatgtctgaaccggattcctcacggccggaagaaccactccgataagggacccaagcccgtcgttttcttgcagcatggcttacttgcggatagctccaactgggtaaccaatctcgccaacagctcactgggctttatcctggccgacgccggatttgatgtgtggatgggcaattcacgggggaacacctggtcaaggaaacataagaccttgagcgtcagccaggacgaattctgggctttttcgtacgatgagatggctaaatacgatctacccgccagtatcaactttatcttaaataagaccgggcaggaacaggtgtattacgtgggccactctcagggaacaaccatcggttttattgccttttctcagatccccgagctggccaaaaggataaagatgttcttcgcactcgggccggtggcttctgtggccttctgcacatctccaatggcaaagctcggacggctgcccgaccacctgattaaggatctttttggagataaagagtttctgccacagtcagccttcctcaagtggctgggaactcatgtgtgtactcatgtcattcttaaagaactctgtggtaacctgtgctttcttctgtgcggctttaacgagagaaacctcaatatgtctagagtagatgtttatacaacacatagccctgctggtaccagtgtgcagaacatgctccactggtctcaggccgtcaaattccagaagttccaggcctttgattgggggtcctccgccaagaactattttcattacaatcagtcctacccacctacctataacgttaaagacatgctagtgcctaccgctgtgtggagtggcggccatgattggctggccgatgtgtacgatgtgaacatcctccttacccagatcacaaatctggtgttccatgagtcaatacccgagtgggaacacctggacttcatctggggtttagatgccccctggagactctacaacaaaattattaacctgatgaggaagtatcaa

SEQ ID NO: 15780 - DNA, 1197 bp, synthetic construct
  misc_feature 1..1197: note = source = /note="Description of Artificial Sequence: Synthetic coding sequence"
  source 1..1197: mol_type = other DNA
atgaaaatgcgattcctgggactggttgtgtgcctggtgctgtggacccttcacagcgagggctccaggggcaagctgaccgccgtggatccagagactaacatgaatgttagcgagatcataagttattggggcttcccgtccgaagaatatctggtggagactgaagatggctatatattatgcctgaatcgcatacctcacggccgcaaaaaccatagcgataagggcccaaagcccgttgtcttcctccaacacggcttactggccgacagcagtaactgggtgaccaacctggccaactcctctctgggcttcatcctggccgacgccggtttcgatgtgtggatgggtaattctaggggaaacacctggagcagaaagcacaaaacactatctgtgagtcaggacgaattctgggcttttagttacgacgagatggctaagtatgacctaccagctagcatcaacttcatcctgaacaagaccggtcaggaacaggtctattatgttggtcactcacaggggaccaccattggcttcatcgcttttagtcaaatcccagaattggctaaaaggatcaaaatgttttttgccttaggcccagtggctagcgtggcattctgcacatccccaatggccaagctgggaaggctacccgaccacctaatcaaggacctgtttggagacaaggaatttctccctcagtccgccttcctgaaatggctgggaacacacgtgtgtacacatgtgattctgaaagagctgtgtggaaacctgtgcttcttgctttgtgggtttaatgagagaaacttaaatatgagccgggttgatgtgtacacaacacattctcctgccggcacttccgtccaaaacatgctgcactggtcacaggccgttaagttccagaaatttcaggcattcgactggggctccagtgcaaagaattattttcattataaccagtcctacccacctacttacaacgttaaagatatgttggttccaacagccgtgtggtcaggaggtcacgactggctcgcagatgtttacgatgtgaacattctgttaacacagataactaacctggtatttcatgaatctattcccgaatgggaacacctggatttcatctggggattagatgctccctggaggctgtacaacaaaattataaacctgatgcgaaaataccag

SEQ ID NO: 15781 - DNA, 1197 bp, synthetic construct
  misc_feature 1..1197: note = source = /note="Description of Artificial Sequence: Synthetic coding sequence"
  source 1..1197: mol_type = other DNA
atgaagatgagattcttgggcctggtcgtgtgcctcgtgttgtggaccctgcatagtgagggatccagggggaaactaacggctgtcgatcctgagaccaacatgaatgtcagcgagatcatttcctactgggggtttccttcagaggagtacctggtagagactgaagatgggtacattctgtgtctgaatcgaatccctcatggcaggaagaaccattcggataaaggccccaaacccgtggtcttccttcagcatggactgttggcggattcttcaaattgggtcacaaacctcgccaactcaagtctcggcttcatactggccgatgcagggttcgatgtttggatgggaaattcccgcgggaatacctggagtcgcaagcacaagacactttccgtctctcaagatgaattctgggctttctcttacgatgagatggcaaagtatgacctgcccgcatcaatcaattttatcctaaacaagacaggtcaggagcaggtgtattatgtggggcactcccaagggacaactattggctttattgctttctctcagatcccagagctggccaagcgcatcaaaatgttcttcgccctaggaccggtggcttcagtggcattctgtacttccccaatggccaaactgggccgacttccggaccatttgattaaggatttattcggcgacaaggaattcctgccccaatctgcttttcttaagtggttggggactcacgtgtgcacccacgtgatcttgaaagaactgtgcggtaacctttgctttcttttatgtggcttcaacgagcgcaacctgaacatgagccgtgtggacgtttatacaacacatagtcccgccgggacgtccgtgcaaaacatgctccactggtcccaggccgttaagtttcagaaatttcaagcgttcgattgggggagctccgcaaagaattacttccactataaccagagctaccccccgacatataatgtgaaagatatgctggtgcctactgcggtgtggagcggaggacatgactggttagctgacgtgtacgacgtgaatattctgctgacgcagatcaccaacctggtttttcatgaaagtatccctgagtgggaacaccttgattttatttggggcctggacgcgccttggcggctgtataacaagattatcaatctgatgcgcaagtaccag

SEQ ID NO: 15782 - DNA, 1197 bp, synthetic construct
  misc_feature 1..1197: note = source = /note="Description of Artificial Sequence: Synthetic coding sequence"
  source 1..1197: mol_type = other DNA
atgaaaatgcgcttcctgggacttgtcgtgtgcctggtgctctggaccctgcatagcgagggatcgcggggaaaactgactgccgtcgacccggaaaccaatatgaacgtgtcggagatcatctcctattgggggttccctagcgaggagtatctggtggaaactgaggacgggtacatcctgtgcttgaaccgcatcccgcacgggagaaagaaccacagcgacaagggaccgaagcctgtggtctttctgcaacacggcctgctggccgatagcagcaattgggtcactaacctcgctaattcgtcgctcggctttatcctggctgacgcggggtttgatgtctggatgggaaacagcaggggaaatacgtggtcgcgtaagcataagactttgtcggtttcccaggacgaattctgggctttctcgtacgatgaaatggcgaaatacgatctgccagcatccataaacttcattctgaacaagaccggacaggaacaagtgtactacgttgggcattcccaaggtaccaccatcgggtttattgcgttctcccaaatcccagagctggccaaacggatcaagatgtttttcgccttggggccggtagcttcagtggcattttgcaccagcccgatggccaaactgggccgactgccggatcacttgattaaggacctgttcggagacaaggagttccttccacaatccgctttcctgaagtggctgggaactcacgtgtgcacccatgtcattctcaaggaactgtgtggcaatctttgtttcctgttgtgcggcttcaacgaacgtaacctgaatatgagccgggtggacgtctacacgacccattcaccggccggcacttcggttcagaatatgctccactggtcccaggccgtgaagttccagaagtttcaggcgttcgattggggctcttccgccaaaaactacttccattacaaccagtcctacccacccacctacaacgtgaaggacatgctggtgccaactgcggtctggtccggtggacacgattggctggccgacgtgtacgacgtgaacatcttgttgacgcagatcaccaatctcgtgttccacgagtcgattcctgagtgggagcacctggacttcatctggggactcgatgccccatggcggctgtacaataagatcatcaacttgatgagaaagtaccaa

SEQ ID NO: 15783 - DNA, 1425 bp, synthetic construct
  misc_feature 1..1425: note = source = /note="Description of Artificial Sequence: Synthetic coding sequence"
  source 1..1425: mol_type = other DNA
atggagtcgaaggcgttgcttgtcctgacccttgcggtctggctccagtccctgaccgcgtcgagaggtggagtggctgcagctgatcagcgaagagatttcattgacatcgaatcgaagtttgccctgagaactcccgaagatacggcagaggatacgtgtcatctgatcccaggcgttgcagaatcggtcgcaacttgtcatttcaatcactcgagcaagaccttcatggtaatccacgggtggaccgtgactggaatgtatgaaagctgggtcccaaagctggtcgcggccctgtacaagcgagagccagattcgaacgttatcgtggtggattggctttccagagcacaagaacactatcctgtctcggcaggttacactaagctcgtgggacaagacgtggcccgcttcatcaactggatggaagaagaattcaattacccgctggacaacgtccaccttttgggttactcactgggtgcacacgcggcaggcattgctgggtcgttgaccaacaagaaagtgaatcgtattaccggccttgatccagcaggtccaaactttgaatacgcggaagccccttcgagactgagtcctgacgatgcagattttgtggacgtgctgcacacctttactaggggttcaccaggccggtccataggcattcagaagcctgtgggacatgtggacatctacccaaacggaggcacctttcaacccggatgcaatatcggtgaagcaattagggtcatagcagaaagggggttgggtgacgtggatcagcttgtgaaatgttcccatgagcgctctatacacctgttcatcgactcacttctgaatgaagaaaatccgtcgaaggcctacagatgctcctcgaaggaagcattcgaaaaggggctgtgtctgtcctgccgcaagaacagatgcaataaccttggttacgagatcaacaaagtgcgcgccaagcggtcctcaaaaatgtaccttaaaacgcgatcacagatgccctacaaggtttttcattaccaagtcaaaattcacttttcgggcactgagtcggagactcataccaaccaagcatttgaaattagcctgtacggaactgtggcggagagcgaaaacattccctttaccctccccgaagtctctaccaacaaaacctactcgttcttgatctacaccgaagtggacattggagagcttttgatgctcaaactcaagtggaagtccgattcttacttctcctggagcgattggtggagctctccaggtttcgcaattcaaaagattcgcgtcaaggcgggcgagactcagaaaaaagtcatcttttgttccagagagaaagtgtcgcatttgcaaaagggaaaagcgcctgcggtgttcgtgaaatgtcatgataagagccttaacaagaagtcagga

SEQ ID NO: 15784 - DNA, 1425 bp, synthetic construct
  misc_feature 1..1425: note = source = /note="Description of Artificial Sequence: Synthetic coding sequence"
  source 1..1425: mol_type = other DNA
atggagtcgaaggccctgctggtgctgaccttggcggtgtggctgcagtcgctcaccgcttcacgcggaggggtggcagctgccgatcagcgcagagactttatcgacattgagtccaagttcgccctccggaccccggaggacacggccgaggacacttgccatctgattccaggagtggccgaatcagtggccacttgccatttcaaccattcctccaaaacgttcatggtcattcacggatggaccgtgacggggatgtacgagtcgtgggtgccaaaactcgtcgccgccctttacaagcgcgaaccggattcgaatgtgatcgtggtcgactggttgtccagagcacaggaacattacccggtgagcgcgggatacaccaagctggtcggacaagatgtcgctcggttcatcaactggatggaagaagaattcaactaccctcttgacaacgtgcacctgctcgggtacagcttgggagcccatgctgctggaattgccggaagcctgactaacaaaaaggtgaaccggattaccggcttggatccggctgggcccaacttcgagtatgcggaggccccatcacgccttagcccggatgacgccgattttgtggacgtcctccataccttcacgcggggatctccgggacgctctatcggcattcaaaagccggtgggacacgtcgatatctaccctaatggtggcacgtttcagccggggtgcaacattggcgaggcgatccgcgtcatcgcagaacgcgggctcggagatgtggatcaactcgtgaagtgctcgcacgagcggtcaattcacctgttcatcgatagcctgctgaacgaagaaaacccaagcaaagcataccgctgttcctccaaggaggcgttcgaaaaggggctctgcctctcctgccggaagaaccggtgtaacaacctgggatacgagatcaacaaggttcgcgctaaacgatcgtcgaagatgtacctcaagactcgctcccagatgccgtacaaggtttttcactatcaggtgaaaatccacttctcaggcactgaatcggaaactcacaccaaccaggccttcgaaatctccctctacggcaccgtggcagagtccgagaacatccctttcactttgccggaagtgtcaaccaacaagacctattcgtttttgatctacactgaagtggacatcggcgaactgctgatgctgaaacttaagtggaagtcggattcctacttctcttggtccgactggtggagctcaccagggttcgcaatccagaaaatacgtgtcaaagccggcgagacgcagaagaaggtgatcttttgttcaagggaaaaagtctcgcacctccagaaaggcaaggctccagccgtgttcgtcaaatgtcacgacaaaagcctgaacaagaagtcggga

SEQ ID NO: 15785 - DNA, 1425 bp, synthetic construct
  misc_feature 1..1425: note = source = /note="Description of Artificial Sequence: Synthetic coding sequence"
  source 1..1425: mol_type = other DNA
atggaaagtaaggcccttctcgtgctgacgttggcggtgtggttgcaatctctaacagcttctagaggcggcgtcgccgcagccgaccagagaagggatttcattgacattgaatccaagtttgcacttcggacccctgaagataccgccgaagatacctgccacctcatccccggcgtggccgaaagcgtggcgacctgccactttaaccactctagcaagacctttatggtaattcacggctggaccgtcaccggtatgtacgagtcttgggtacccaagttagtggcagctctgtacaagagggagccggattccaacgttattgtagtcgactggctctctcgggcccaagagcattatccagtgtccgcaggttacactaaactcgtggggcaagatgtggctcgatttatcaattggatggaggaggaattcaattaccctctggataacgtacacttactcgggtattcactaggagctcacgctgcgggaattgcagggtctctgactaacaagaaggttaaccgcatcaccgggttagaccctgctggcccaaacttcgaatacgccgaggcacccagcaggttgagcccagacgacgctgatttcgtggacgtgctgcacacctttaccaggggatccccaggccgctccatcggaatacagaaacccgtgggccatgttgacatctatcccaatggcggcacctttcaaccaggctgtaacatcggagaagctatccgggtaattgcggaacgagggctgggcgacgtggatcagcttgtaaaatgtagccacgaaaggtctattcatctgttcatcgattcactcttaaacgaagaaaatccctcaaaggcttataggtgttcgtccaaggaagctttcgaaaagggcctctgtctttcatgtcgcaaaaatcggtgcaataacctgggatatgagattaataaggtaagagctaagcggtcctctaaaatgtatctgaaaacccggtctcagatgccttacaaggtgtttcactaccaagtaaaaattcatttctctggaactgagtctgaaacacacaccaaccaggcatttgaaatttcgctatatggaactgtcgcagagtctgagaacatccctttcacgctccctgaggtgagcacaaataaaacctattcctttcttatttatacagaggtggatataggcgagttgttgatgctgaagttaaaatggaaatcagattcctacttctcttggagcgactggtggtcctctcccgggtttgccattcaaaagattcgcgttaaagcgggcgagacacagaaaaaggtaatattctgtagccgagagaaagtaagtcacctgcagaagggaaaggctccagccgtcttcgtgaagtgccacgacaaaagcctgaataagaagtccgga

SEQ ID NO: 15786 - DNA, 1425 bp, synthetic construct
  misc_feature 1..1425: note = source = /note="Description of Artificial Sequence: Synthetic coding sequence"
  source 1..1425: mol_type = other DNA
atggagtcaaaggccttgctggtcctgactctggccgtatggcttcagtcgctgactgcctccagaggcggtgtggcagcagctgaccagagacgcgatttcatcgatatcgagtccaaatttgcgctcagaaccccggaagacaccgccgaggatacctgccacctgatcccaggcgtggcggaatcagtggccacttgccattttaaccacagctcgaagaccttcatggttattcacggttggacggtgaccgggatgtacgaatcttgggtaccgaaactggtcgcggctctgtacaaacgggagcctgactcgaacgtcatcgtggtcgactggctctcgcgggcccaggaacactacccagtctcagcgggatacaccaagctcgtgggtcaggatgtggcacggttcataaattggatggaggaagagttcaattacccacttgacaatgtgcacctgctcggctactcgctgggagcccatgcggccgggatcgctggatcactgaccaacaaaaaggtgaacaggattactggactggaccctgccggaccgaacttcgaatacgccgaggcgccgagccgtctgagccccgacgacgccgatttcgtggatgtgcttcatactttcacgcggggatctccgggcaggtccatcgggatacagaagccagtgggtcacgtcgacatctacccgaatggaggaaccttccaaccagggtgcaacatcggagaagccattcgggtcatcgcagagcggggactgggagacgtggaccagctggtgaagtgctcacacgagcgctcgattcatctgtttattgactccctccttaacgaagaaaacccgagcaaggcgtatcgatgttcttccaaagaagcgttcgaaaagggattgtgtctttcatgccgcaaaaaccgttgtaacaatctgggatacgagatcaacaaggtccgggcaaagagatcgtcgaagatgtacctcaagactagatcccaaatgccctacaaggtgtttcattaccaggtgaagatccatttctcggggactgagtccgaaactcacacgaaccaggcgttcgagatcagcctctacggaaccgtagccgaaagcgagaatatccctttcaccctgccggaggttagcactaacaagacctactcgttcctcatctatactgaagtcgatatcggcgaacttctcatgctgaagctcaagtggaaatcggactcctacttttcttggtcagactggtggtcctcgcctggattcgctatccaaaagatcagggtgaaggccggcgaaacccaaaagaaagtgatcttctgcagccgcgaaaaggtgtcacacctgcaaaaagggaaggcaccggcagtgtttgtgaaatgccacgataaaagccttaataagaagtccggt

SEQ ID NO: 15787 - DNA, 1425 bp, synthetic construct
  misc_feature 1..1425: note = source = /note="Description of Artificial Sequence: Synthetic coding sequence"
  source 1..1425: mol_type = other DNA
atggagtcaaaagcactcctggtgttgaccctagccgtatggttgcagagcctgactgcgtcccgcgggggcgtggctgcagccgatcaacgccgagattttattgatatcgagtcaaagttcgccttacgcacccccgaggatactgctgaagatacgtgccacctcatacccggcgttgccgaatccgtggccacatgccatttcaatcacagctctaagactttcatggttattcatggctggaccgtcaccgggatgtatgagtcttgggtgccaaaacttgttgccgctttgtataagagggaacccgacagtaatgttatcgtagtggattggttatcgagggctcaggagcattaccccgtatcagccggatatacgaagctggttggccaggacgttgctaggttcatcaactggatggaggaggagtttaactatcctctggataacgtgcatcttttgggctactcgctgggggcccacgcagctggaatagctggcagcctcacgaacaaaaaagtaaatcgtattacgggccttgatcctgctggcccaaattttgagtatgctgaagcgccttcccgcctcagcccagatgacgctgattttgttgacgtgcttcatacattcacccgcgggtcccctggtagaagtatcggtattcagaagccagttgggcacgtggacatctacccgaacggaggcacctttcagccaggctgcaatatcggagaggcaatccgggtgatcgcagagagagggctgggagacgtggaccagcttgtcaaatgctcccatgagcgatcaatccatctgtttattgattctctgctcaatgaggagaacccatcaaaagcctatcgctgctcgtccaaagaagccttcgagaaaggtctttgcctgagttgtagaaaaaacaggtgtaataacctggggtacgaaattaataaggttagggcaaaaaggtccagtaaaatgtatctgaaaacccggtcccagatgccttataaagtgtttcattatcaggtcaagatccacttttctggaaccgagtccgagacccacaccaaccaagctttcgaaattagcctgtatggaactgtggccgagagcgagaacattcccttcacattacctgaagtttctaccaataagacctactcgtttctgatttatactgaggtggacatcggcgagctcctgatgctcaagttgaagtggaaatctgacagctactttagttggtcagattggtggtcaagccctggctttgcaatccagaaaatcagagtgaaggcaggagaaactcagaaaaaggttattttctgttcacgcgaaaaagtatcacatctgcaaaaaggaaaggcccccgccgtttttgtcaaatgccatgataaatctcttaacaagaagtctggg

SEQ ID NO: 15788 - DNA, 1425 bp, synthetic construct
  misc_feature 1..1425: note = source = /note="Description of Artificial Sequence: Synthetic coding sequence"
  source 1..1425: mol_type = other DNA
atggaatcaaaggcacttctggttctgacacttgcagtctggttgcagtctctgacagcgtcacgagggggtgtggcggcggcggaccagaggcgagattttatcgatatcgagtcaaagttcgcactgaggactcccgaggacactgcagaggacacatgtcacctgattcccggcgtggctgaaagcgtcgccacctgccactttaaccatagctcaaaaacattcatggtcatccacggatggactgtcactggtatgtacgaaagctgggtgccaaagcttgtggctgctctgtataaaagagagccggattccaatgtgattgtcgtggactggttgagtagggcacaagaacattatcccgtgtccgctggctacaccaagcttgttggacaggacgtggcgagattcatcaattggatggaggaagagtttaattaccctttagataatgtgcatctgctcggatactccctaggggcacacgcagcgggcattgccggttctctgaccaataagaaggtaaataggataacgggactggaccccgctgggccgaacttcgaatacgctgaagccccaagccggctgtcaccagacgatgcagactttgtggatgtcctgcacacctttacccggggtagtcctggtcggagcatcgggattcagaaacccgtggggcacgttgacatctacccaaatgggggcacttttcagcccggatgcaacattggtgaagccatccgcgtaatcgctgagcgtggactcggagatgttgatcagttggtaaagtgcagtcacgagaggagcatacacttatttatcgactccctactcaatgaggaaaatccctcaaaagcctaccgctgctcatctaaggaggcctttgagaagggcctgtgtctgtcctgcagaaaaaatagatgtaataatctgggctatgaaattaataaagtgcgggcgaagcgatcttcaaagatgtaccttaagaccaggtctcagatgccctacaaggtctttcattaccaggtcaagatacacttctcaggcaccgaaagcgaaactcacaccaatcaggccttcgaaatttccttgtatggcaccgtagcagaatccgagaacattcctttcaccttgcctgaggtgtcaacgaacaagacttacagcttcttgatttataccgaagttgacattggtgagctcctgatgctgaaattgaaatggaagtcggattcctacttcagctggtctgattggtggagctcaccggggttcgccatccagaaaattagggttaaggcgggggagacacagaagaaggtgatattctgctctcgcgagaaggtcagtcacctgcagaaagggaaggcaccagcagttttcgtgaaatgccatgataagtctttaaataaaaagtccggg

SEQ ID NO: 15789 - DNA, 1425 bp, synthetic construct
  misc_feature 1..1425: note = source = /note="Description of Artificial Sequence: Synthetic coding sequence"
  source 1..1425: mol_type = other DNA
atggagtcgaaggccctgctggtgctcaccctggctgtctggttgcaatctttaactgcctccagggggggtgtggctgcagcggaccagagaagggacttcatagatatcgagtcaaagttcgcattaaggaccccggaggacactgccgaagacacctgtcacttgataccaggggtggccgagtccgtggcaacttgtcactttaatcactcttctaagacttttatggtgatccacgggtggactgtaaccggaatgtatgaatcttgggtacctaagctggttgcggcactctataaacgagagcctgacagcaacgtgatagttgttgactggctctctagagcccaggagcattaccctgtttccgctggatacactaaacttgtcgggcaggatgtcgcccgatttatcaactggatggaagaggagttcaactatcctttagataacgtgcatttgcttggctactctctgggtgcccatgctgcaggaatagcaggctctcttacaaacaaaaaagttaatcgcatcacagggttggaccccgccggaccaaattttgagtacgctgaggccccctcaaggcttagccccgatgatgcggacttcgtagatgtgctccacacgtttacgcggggttcgcctggtcgaagcatcggaattcagaaacctgttggtcacgttgatatctatcctaatggagggacattccagccgggctgtaacatcggcgaagctattcgtgttattgccgaaagggggttgggggatgtcgaccaactggttaagtgttcccatgagcgctcaatccacttatttatagatagcttgctgaacgaggaaaaccccagcaaggcctaccggtgttctagcaaggaggcatttgaaaaagggttatgtttgagctgcagaaagaatcgttgcaataacttaggatacgaaatcaataaagtgagggcgaaacgtagctcaaaaatgtacctgaaaactcgcagccagatgccctacaaagttttccactaccaggtaaagattcacttcagcgggaccgaatcagagacacacactaaccaggcattcgagatttctctgtacggcaccgtagccgagagcgagaatataccctttaccctgcccgaagtgtccacaaacaaaacatactcgttcctgatctacaccgaggtggacattggggagctgctgatgctgaagctcaaatggaaaagcgatagttacttttcatggagcgactggtggagctccccaggcttcgcaattcagaagatccgtgtgaaagcaggtgaaactcagaaaaaggtcattttttgcagtcgggagaaggtttctcatctgcagaaagggaaggctccagcagtgttcgtaaagtgtcatgacaaatccttgaataagaaatccggt

SEQ ID NO: 15790 - DNA, 1425 bp, synthetic construct
  misc_feature 1..1425: note = source = /note="Description of Artificial Sequence: Synthetic coding sequence"
  source 1..1425: mol_type = other DNA
atggagagtaaggccttgctcgtccttaccctggccgtctggctgcagagcctcactgcctcgcgcggcggtgtcgctgctgccgatcagcgccgcgactttatcgatatagaatccaagttcgcactgcggaccccggaggacaccgctgaagatacttgtcatctgattcctggagtggcggaaagcgtggcgacttgccacttcaaccattcatcaaagactttcatggttatccacggatggactgttaccggcatgtacgaaagctgggtgcctaagctggtggctgcgctgtacaagagggaacctgattcaaacgtgatcgtggtggactggctctcaagagcgcaggaacactacccggtgagcgcgggctacaccaaactcgtgggacaggacgtggcccggttcatcaattggatggaggaagagtttaactacccgcttgacaacgtccatctgcttggatacagccttggagcccatgccgcaggaatcgccggatcacttaccaacaagaaagtcaatcggattaccggtctggacccggccggaccgaatttcgaatacgccgaggcgccatcccgactctcaccggacgatgccgatttcgtggacgtgctgcacaccttcacccggggctcccccggcagatccatcggtatccagaagcctgtggggcacgtggatatctaccctaacggaggaaccttccagcctggatgcaacatcggagaggccattagggtgatcgcagaaagaggcttgggagacgttgaccaacttgtgaagtgcagccacgagcggtcaattcacctgtttatcgacagcctcctcaacgaggaaaacccgtccaaggcttaccgatgtagcagcaaggaggcattcgaaaaaggactgtgcctgtcgtgccggaagaacaggtgcaacaatcttggatacgaaatcaacaaagtccgcgccaaacggtcctccaaaatgtacttgaaaaccagatcccagatgccgtacaaggtctttcattaccaggtaaagattcatttctcgggtacggagagcgaaacgcacactaaccaggcgttcgaaatttccctgtacgggaccgttgccgagtcggagaatattcccttcaccctgccggaagtgtcgaccaataagacctacagcttcctcatttacactgaggtggacatcggtgagctcctcatgctgaaactgaagtggaaatctgacagctacttcagctggagcgactggtggtcctccccggggttcgccatccagaagattcgggtgaaggccggcgaaacccaaaagaaggtcatcttttgctcccgcgagaaagtgtcacacctgcagaaggggaaagcaccagccgttttcgtcaagtgccacgataagtcgttgaataagaagagcggg

SEQ ID NO: 15791 - DNA, 1425 bp, synthetic construct
  misc_feature 1..1425: note = source = /note="Description of Artificial Sequence: Synthetic coding sequence"
  source 1..1425: mol_type = other DNA
atggaatcgaaagcattattagtacttacacttgccgtttggctgcagtcactgacggcctcacgcggtggggttgctgctgccgatcaaagacgtgatttcatagacatagaaagcaagtttgcactgcggacgcctgaagatacggcggaggatacgtgtcaccttattccaggggttgccgaatccgttgcgacatgtcatttcaatcattcgtctaagacatttatggtgattcatggctggacagttactggaatgtacgaatcttgggtccctaaattagttgcagcactctataaaagagaacctgactctaatgtgattgtggtagattggttatctcgtgcgcaggaacattatccggtgtccgcaggttacacgaaattagtgggccaggatgtggcacggtttatcaattggatggaagaagaattcaattatcctctggataatgttcaccttttggggtatagtctgggtgctcacgcagcaggcattgctggatctcttaccaataaaaaagtaaatcgcattacagggcttgaccctgccgggcctaacttcgaatatgcggaagcaccttcacgtctttcaccggacgatgcagatttcgtcgatgttcttcacactttcacccgcggcagtccgggcagatctataggcatacagaaacctgtaggtcatgtggatatctatccaaatggcggaacgtttcaacctgggtgcaatattggagaagctattagagtaatcgcagagcgcggccttggcgacgttgatcagctggtcaaatgctcgcatgaacgttctatacatctttttattgactcgctgttaaacgaggaaaatccatcgaaagcgtatcgctgtagttccaaggaagcttttgagaaagggctctgtctttcttgtaggaaaaatcggtgcaacaatttaggatacgagattaacaaagtaagagcaaagagatcatctaaaatgtatttaaaaacacggtcccagatgccttataaggtatttcattaccaggtaaagattcatttttcgggtactgagtccgagacccatacaaaccaggcatttgaaattagcttgtacggaaccgtggctgagtccgaaaatatccctttcacactcccggaggtatctacgaacaaaacatatagttttctgatttatacggaggttgatattggcgaactgcttatgttaaaactgaaatggaagtcagatagctatttttcttggtccgattggtggagctctcctggtttcgccattcaaaaaattcgcgttaaagctggagaaactcagaaaaaagtcatcttttgcagccgtgagaaggtgtcgcaccttcagaagggtaaggcaccagcagtctttgtcaagtgccatgacaaatctttgaataaaaaatcaggt

SEQ ID NO: 15792 - DNA, 1425 bp, synthetic construct
  misc_feature 1..1425: note = source = /note="Description of Artificial Sequence: Synthetic coding sequence"
  source 1..1425: mol_type = other DNA
atggagtcaaaagcactgctggtgctcaccctggcggtgtggctccaatccctgaccgcctcaagaggtggtgttgctgcagctgaccagaggagagatttcattgatattgaatcgaaatttgcactccgaacgcccgaagatacggccgaagatacttgtcacttgatccctggtgtcgccgagtcagtggcaacctgtcatttcaatcacagctcgaaaactttcatggtgattcatgggtggaccgtaactggcatgtatgaatcctgggtgcctaagctcgtggctgcactgtacaaaagggaaccagacagcaacgtgatcgtcgtggattggttgtcgcgggcccaggaacactacccggtcagcgcaggctacacgaagttggttggtcaggacgttgcgcggtttatcaactggatggaagaggagtttaactatccacttgacaacgtccatcttctgggttacagccttggggctcatgccgcagggatagcaggtagcctgactaataagaaagtgaatcggatcaccggattggatcccgcaggtcctaatttcgaatacgccgaagcgccttcccgcctgagccctgatgatgcggactttgtggatgtgcttcatacctttactagaggatccccagggcgttcgattggcatacaaaagcccgtcggacacgtggacatctaccctaatggtggaacttttcagcccggatgcaacattggcgaggcgattagggtcattgctgaaagaggactgggagatgtggaccagttggtgaagtgctcccatgaaagatcgattcatttgtttattgattccctccttaacgaagagaacccttctaaagcataccgctgtagttccaaggaggcctttgaaaaggggctgtgcctctcatgtaggaagaatagatgcaacaacctcggttacgagataaacaaggtacgtgcaaagagaagttctaagatgtatctcaaaactcgatcgcaaatgccctacaaggtgtttcactaccaagtgaaaattcatttctcgggaaccgaatcggaaacccacacgaatcaggcatttgaaatctccctttacggaaccgtggcagaatccgaaaacattcctttcactcttccagaagtgtcgaccaataagacttacagcttcttgatctacaccgaggtggatattggcgaactgcttatgctgaaactgaaatggaagtctgacagctacttttcgtggtcagattggtggtcgtccccaggatttgcaattcaaaagatacgcgtcaaggcaggggagacgcaaaagaaggtcatcttttgttccagagagaaggtcagtcatctgcagaaaggaaaggcaccggctgtgttcgttaagtgtcatgacaagtcgcttaacaagaagtcgggt

SEQ ID NO: 15793 - DNA, 1425 bp, synthetic construct
  misc_feature 1..1425: note = source = /note="Description of Artificial Sequence: Synthetic coding sequence"
  source 1..1425: mol_type = other DNA
atggagagcaaggctctgctggtcctaacactggcggtgtggttgcaaagcttgaccgctagcagaggtggcgtggccgctgcagaccagcgacgggatttcattgatatagagtcgaaattcgccttgcgtactcctgaagacactgctgaggacacctgccacctgatccccggtgtggccgaatcggtggcgacatgtcatttcaatcactcttccaaaacatttatggtgatccacggatggaccgtgacaggcatgtatgaatcttgggtgcctaagcttgtcgccgcattatacaaaagagagcctgattcaaacgtgattgttgtcgattggctgagtagagcacaggaacactatcccgtatcggcgggatacactaaactcgtcgggcaagatgtagctcgtttcatcaattggatggaagaagagttcaattacccactcgacaatgtgcatctgctggggtattcgcttggggcccatgcggctggaatagcgggcagcctgacaaacaaaaaggtgaacagaatcactggcctggatcctgctggccccaatttcgagtatgctgaggcacccagcaggctgtcccccgatgacgctgacttcgtagacgtcctccatactttcacacggggctcaccgggaaggtccatcggcattcagaagcctgttgggcatgtggatatttatccgaatggcgggacattccagcccggctgtaatatcggagaggccatcagagttatcgccgaacgtgggctgggtgatgttgaccagttggtgaagtgttctcatgaacgctctatccatctatttattgacagccttctaaacgaagagaatccatccaaagcctaccggtgtagcagcaaagaagccttcgaaaaggggctgtgtttgagctgccgaaagaaccggtgcaataatcttggatacgagattaacaaagtgagagccaagcgatcctctaaaatgtacctcaagacccgcagtcaaatgccctataaagtgtttcactaccaggtgaagattcatttctccggcacggaatcagaaacccacacaaaccaggcattcgaaatcagcctctacgggacagtcgctgagagtgagaatattcctttcactttgccagaagtgagcacaaataagacatacagcttcttaatctatacagaagtagatattggagagctcttgatgctgaagctgaaatggaagagcgatagctatttcagctggagcgactggtggtcctctccgggtttcgctatacagaagattcgcgtaaaagccggggagacacagaagaaggtaattttctgcagcagggaaaaggtttctcacctgcagaaagggaaggccccagccgtatttgttaaatgtcatgataaatcattgaataagaaatcagga

SEQ ID NO: 15794 - DNA, 1425 bp, synthetic construct
  misc_feature 1..1425: note = source = /note="Description of Artificial Sequence: Synthetic coding sequence"
  source 1..1425: mol_type = other DNA
atggagagtaaagctctcttggtcctgactctcgcagtatggctgcaaagccttacagcctccagggggggggtggctgctgccgatcaacgcagagactttattgacatagaatccaaatttgcgcttagaacacccgaggacaccgccgaggacacctgccatttgattccaggcgtggcagaaagtgtagctacctgccatttcaaccatagctcaaaaacttttatggttattcacgggtggactgttactggcatgtacgaatcttgggtccctaaacttgtggccgcactgtacaagcgtgagcccgacagtaacgtgattgtggtggattggctgtcccgagcccaggagcactatcctgtgtctgccgggtatactaagctcgttgggcaagacgtcgcacgcttcatcaattggatggaggaggaatttaactatcccctggataacgtgcacttgctgggctatagcttgggcgcacatgcggcaggcatcgccggatctctgacaaacaagaaagtaaacagaattacgggactcgacccggctggccccaacttcgagtacgccgaggcgccttcccggttaagccccgacgacgctgactttgtcgacgtgttgcatacattcactagggggtctcctggacgaagtattggaatccagaagcctgtgggacacgtcgacatctatccaaatgggggtacgttccagccaggatgtaacattggtgaggcaatccgtgtcatcgccgaaagggggctgggagatgtcgaccagttggtgaaatgctctcacgaacgcagcattcacctcttcattgacagcctgcttaatgaagagaacccatctaaagcgtatcggtgtagttcaaaggaagcgtttgaaaaaggactctgcttatcttgccgcaaaaacagatgcaataacctgggctacgagattaataaggttcgggcaaaacggtctagcaagatgtaccttaaaactagatcccagatgccctataaggtctttcactaccaggtcaaaatccacttttctgggacagaaagtgagacgcatactaatcaggcattcgagatctctctgtacggtaccgttgccgaatccgaaaacattccattcacactaccagaggtcagcacaaacaagacctactccttcctgatttacactgaagttgatattggcgagctactcatgctaaagctaaaatggaaaagtgactcatactttagttggtccgactggtggtctagccctggcttcgccatccagaagattcgcgtgaaagctggtgagacgcagaagaaggtaatcttttgctcaagggagaaagtgtctcacctacaaaaaggcaaggcccctgccgtcttcgttaaatgtcacgacaagagcttgaacaaaaaatccggc

SEQ ID NO: 15795 - DNA, 1425 bp, synthetic construct
  misc_feature 1..1425: note = source = /note="Description of Artificial Sequence: Synthetic coding sequence"
  source 1..1425: mol_type = other DNA
atggagtctaaagcattgttggtgttgactctggccgtgtggttgcagagtctgacagcatcccgcggtggagtcgctgctgctgaccaaagacgtgacttcatcgatatagagagtaaatttgctctgcgtacccccgaggacactgccgaagacacatgccatttgattcctggtgttgctgaatctgtcgctacatgccacttcaatcattcctccaagacctttatggtcattcacggatggaccgtgaccggcatgtacgagtcttgggttcctaaactggtcgctgccctttacaagcgtgaacctgactctaatgtgatcgtggttgactggctgagtagagcacaagaacactaccccgtatccgccggatataccaagctggtcggacaagacgtagcccgcttcatcaattggatggaggaggagttcaactaccctctggacaatgttcaccttctgggctattcacttggagctcacgcagctggaattgccggatctctgaccaacaagaaggtgaataggattacaggcctggatcccgccggtcccaactttgagtatgctgaggctccctctcgcctgagtcctgacgatgctgattttgtagacgtcctgcacacctttactcgtggatctcccggcagaagtattggaatccagaaaccagtaggccacgtggacatctaccctaatggcggtacttttcaacccggttgtaacatcggagaggccattcgtgtcatcgctgagcgcggacttggagatgtcgaccagcttgtaaagtgtagtcacgagaggtctatccatctgttcattgatagtctgctgaatgaagagaacccttctaaggcttataggtgctccagcaaagaagctttcgagaaaggtctgtgtctgtcatgtagaaaaaacagatgtaacaacctcggatatgagattaacaaggtgcgcgctaagcgttcctccaagatgtatctgaaaacaaggtcacagatgccttacaaggtcttccactaccaggtaaaaatccacttctctggaactgaatcagaaacccacaccaaccaggcattcgagatttccctctatggcactgtggccgagtccgaaaacatcccatttacattgcccgaggtctccactaacaagacctattcattcctgatttatactgaagtcgatatcggagagctgttgatgctcaaactcaagtggaagtccgacagctacttcagctggagtgattggtggtcatcccccggatttgctattcagaagattcgcgtaaaagccggagagactcagaagaaagtgatcttctgcagcagggagaaggtctcacaccttcagaagggaaaggccccagccgtctttgtcaagtgtcatgacaagagtctgaataagaagagtggt

SEQ ID NO: 15796 - DNA, 1425 bp, synthetic construct
  misc_feature 1..1425: note = source = /note="Description of Artificial Sequence: Synthetic coding sequence"
  source 1..1425: mol_type = other DNA
atggagtcaaaggccttgttggtgttgactctggcagtgtggttgcaatccctgacggcaagcagaggcggagtcgccgcagcagatcaaagacgtgatttcatcgacattgagtccaagtttgcactcagaacccccgaggataccgcagaagatacctgtcacctgatccccggagtggctgaaagcgtcgcaacttgccatttcaatcattcgtccaaaacttttatggtgatccatgggtggaccgtgacggggatgtacgaatcctgggtgccgaagctggtggcagctttgtacaaacgggagcctgattcgaacgtcatcgtggtggattggctcagccgcgcgcaagaacattacccagtgtcagccggttacactaagctcgtcggacaggacgtagccagatttatcaactggatggaagaagagttcaactaccccctggataatgttcatctcctgggatactccctgggagcccatgcagcaggaattgcaggttccctgactaacaagaaggtgaacaggattaccggtctggatcctgcaggtcctaactttgaatacgccgaggcaccttcgcggctcagcccagacgacgccgattttgttgatgtccttcacacgttcaccagaggatcgccaggaagaagcatcggcattcaaaagcctgtcgggcatgtggacatctatcctaacggcgggacttttcaaccaggatgtaacattggggaagccattcgagtgattgcggaaagaggcctgggggatgtcgatcagctggtgaaatgctcacacgaacggtccatccacctcttcatcgattcgctgctgaacgaagaaaatccctctaaggcataccgatgttcaagcaaggaagcattcgaaaagggtctttgtctgtcatgtcggaaaaaccggtgtaacaatctgggctacgagattaacaaggtcagagccaagagatccagcaagatgtacctcaaaactcgttcgcagatgccttacaaagtgtttcactaccaggtcaagatacacttttccggcaccgaatcggagactcacacgaatcaagcatttgaaatctctctgtatggaaccgtggcagaatccgagaatatcccgtttaccttgcctgaagtgtcaaccaacaagacgtacagcttcctgatttacaccgaagtggatattggagaacttcttatgctcaaactcaaatggaaatcagattcctacttctcgtggtcagactggtggagctcacctgggttcgcaatccaaaagattagggtgaaggctggagagactcagaagaaggtgatcttttgtagcagagaaaaggtgtctcatctgcagaagggaaaggcacctgcagtgtttgtgaaatgtcatgacaagtccctgaacaaaaagagcgga

SEQ ID NO: 15797 - DNA, 1425 bp, synthetic construct
  misc_feature 1..1425: note = source = /note="Description of Artificial Sequence: Synthetic coding sequence"
  source 1..1425: mol_type = other DNA
atggaatctaaggctctgttggtcctaacactcgccgtatggctgcagtctcttactgcgtccagggggggtgtggccgccgccgaccagaggcgcgatttcattgacatagagtctaagttcgctctgcgaactcctgaagacacggctgaagatacatgtcatctgatccccggagtggctgagtcagtggccacctgtcacttcaatcactcctcaaaaacttttatggtaatccatgggtggacagtgaccggtatgtatgagagctgggtccctaagctggtcgccgccctgtataagcgcgaacccgatagcaatgtcatcgtcgttgactggttgagcagggcgcaggaacactatcctgtgtccgcaggctataccaagctggtaggtcaggacgtcgcaagatttatcaattggatggaagaggagttcaattaccctttggacaacgtgcacctattaggctactcactcggcgcccacgctgccggaatcgcaggtagtctgaccaataaaaaagtaaataggattactggcctcgatcccgctggcccgaacttcgagtacgccgaagccccttcccgcctctcaccagacgacgcagattttgtcgacgtgctacatacttttacaagaggatccccagggagaagcattggaatccagaagccagttggtcacgttgatatttacccaaacggcggcaccttccagcctggctgcaatattggtgaggctatcagggtgatcgcagaaagaggcctgggagatgtcgaccagttggtgaagtgtagtcacgagcgctcgatccacctgttcatcgacagtctactgaatgaggagaacccatccaaagcttaccgatgctcgtcaaaagaggcttttgaaaaaggtctctgccttagctgcagaaagaaccgctgcaataacctcggatacgagattaataaggtgcgcgccaaacgctctagtaagatgtatctgaagaccaggtcccagatgccttacaaggtgttccattaccaggtcaagatccatttctctggtaccgagtccgagacccataccaatcaggcattcgaaataagcctctacggcacagtggccgagtctgaaaacattcccttcaccctcccagaggtgtcaacaaacaaaacatactctttcctcatatacaccgaagtagacatcggcgaacttttaatgttaaaactaaaatggaagagtgattcctacttttcctggtctgattggtggagttcaccaggcttcgccatccagaaaattcgcgtaaaagcaggcgagacccaaaaaaaggtcattttttgcagtcgcgagaaagtcagccaccttcaaaagggaaaggcccccgccgtgtttgtgaaatgtcacgacaagtcactcaacaagaaaagcggc

SEQ ID NO: 15798 - DNA, 1425 bp, synthetic construct
  misc_feature 1..1425: note = source = /note="Description of Artificial Sequence: Synthetic coding sequence"
  source 1..1425: mol_type = other DNA
atggagagtaaggcccttcttgttttgacactggccgtttggctacaatcgctgacggcgtcccgcggtggagtggcggcggcggatcagcgcagggatttcatcgatattgaaagcaaattcgctctccgcacccctgaagacactgcggaggatacgtgtcatctcatccctggagtcgccgagtccgtggcgacctgtcactttaaccatagcagtaaaacgttcatggttatccatgggtggaccgttacgggtatgtacgagagctgggtgcccaagttggtagcagcgctgtataaacgggagcctgactccaatgttatcgttgttgattggttgagcagggcgcaggaacattatcccgttagcgccggttacacgaagttggtgggacaagacgtcgctagattcataaattggatggaggaggagttcaactatcctcttgataatgtgcacctcctgggttactccctgggtgcacacgcagctggaattgccggcagtctgacaaacaagaaggtcaatcgaattaccgggctcgatccagcaggtcccaactttgagtatgctgaggcaccgtcccggctttctcccgacgacgcagatttcgtggacgtacttcacactttcactcgaggaagccccggaaggtccatagggatacagaagccggtcggacacgtagacatctatccaaacggtggcactttccaacccgggtgcaatatcggcgaggccattcgtgtcattgctgaacgcgggctcggcgatgtagatcagcttgtaaagtgctctcatgagcgaagcattcatttgttcattgactcgttactgaacgaagagaatccgtctaaggcgtatcggtgctcctctaaagaggctttcgagaaaggtttgtgtctttcctgccgaaagaatcgctgcaataacctagggtacgagatcaacaaagtacgagccaaacgctcgtctaagatgtacctgaagactcgttcccagatgccttacaaagttttccactatcaggtcaaaatccatttttcaggcacggagtctgagacccatacaaatcaggctttcgaaatttccctctacgggacggtcgctgaatctgaaaacattcccttcactctaccagaggtctcgacgaataagacgtatagcttcttgatttataccgaagtagatatcggtgagctcttgatgcttaagttgaagtggaagagtgattcctacttctcatggtcggattggtggagttcgccgggattcgctattcaaaagatccgggtgaaggcgggcgagacccagaagaaggtgatattttgctcccgagagaaggtctcgcacctccagaaggggaaagccccagccgtgttcgtgaaatgccacgataaaagccttaataagaaatccggc

SEQ ID NO: 15799 - DNA, 1425 bp, synthetic construct
  misc_feature 1..1425: note = source = /note="Description of Artificial Sequence: Synthetic coding sequence"
  source 1..1425: mol_type = other DNA
atggaatcgaaagcccttctcgtgcttactctcgcagtctggctgcaatcgcttaccgcttccagagggggtgtggcagcagccgatcagcgaagagatttcatagatattgagtcaaagtttgccctgaggaccccagaggatacggctgaagatacttgtcaccttatcccgggagtggctgaatccgtggcaacttgtcactttaatcatagctccaagacctttatggtgatccacggctggaccgtgaccggtatgtatgagagctgggtgccaaaacttgtcgccgcattgtacaagagggagcctgactcgaatgtcattgtcgtggattggctttcacgggcacaagaacactaccctgtgagtgcaggttacactaagttggtcggccaggatgtcgcacgattcattaactggatggaggaagagtttaactaccctctcgataacgttcatctgctggggtactctcttggtgcgcacgcggcaggaatcgccggaagccttactaacaaaaaggtcaatcgcattaccggactggatccagcgggacctaatttcgagtacgcagaggccccatcccgcctttcccccgacgacgcagattttgtcgatgtcctgcacacttttactcgagggtcgccagggcgttccatcggaatacaaaagcccgtcggacatgtggacatatacccaaacggtggaaccttccaacccggttgcaacattggagaagctatccgcgtgattgctgagcggggtctgggtgatgtcgaccagcttgtgaagtgctcgcatgaaaggagcattcatctgtttattgactccctccttaacgaagaaaatccctcaaaggcttatagatgtagctcgaaggaggcattcgaaaagggtttgtgcctctcgtgccggaaaaaccggtgcaataatctgggatacgaaatcaacaaagtgagagcaaagaggtcctccaagatgtatcttaagactcgctcccaaatgccatacaaagtgtttcactaccaagttaagatccatttttccggtactgaatctgagactcacaccaaccaagcatttgagatttcgctctacgggactgtcgcagagagcgaaaacattccatttaccctccccgaagtctctaccaacaagacgtactcattcttgatatacacggaagtggatattggggagttgcttatgctcaagttgaagtggaagtcggactcttacttcagctggtcagactggtggtcatcgccgggttttgcaattcaaaagatccgggtgaaggcaggggaaacccaaaagaaggtcatattctgtagccgggaaaaggtgagccatctccaaaagggaaaggcgcccgccgtgtttgtcaagtgtcatgacaaatccctcaacaaaaagtccggg

SEQ ID NO: 15800 - DNA, 1425 bp, synthetic construct
  misc_feature 1..1425: note = source = /note="Description of Artificial Sequence: Synthetic coding sequence"
  source 1..1425: mol_type = other DNA
atggagagcaaggccctgctggtcctcacgctggcagtatggctccagtcacttaccgcctcacggggtggagtggctgccgcagatcagcgccgagacttcatagatatagagtcaaagttcgcacttcggaccccggaggatactgctgaggatacctgccacttgatcccaggggtggcggagtccgtcgccacatgccattttaaccattctagcaagacgtttatggtgatccacggttggacagttacagggatgtacgagagctgggtgcccaagctggtggcagcactgtacaagcgcgagccagacagtaatgtaatcgtggtggactggctcagtcgtgcccaggaacattaccctgtgtcggcgggttacactaaattggtggggcaggacgtcgcgagattcatcaactggatggaagaggagttcaactacccccttgataatgtacatttactgggctattccctgggcgctcatgccgccgggatcgccggtagcctcaccaacaagaaggtgaatcggataaccggcctcgaccccgctggtcccaacttcgagtacgctgaggccccttcacgactgtcccccgacgacgccgactttgtcgacgtactccacacgttcactaggggctcccccggaagaagcatagggattcagaaacccgtggggcacgttgacatctatcccaacggaggaacctttcagccgggatgtaacatcggggaagccatacgggtgattgcagaacggggcttgggggacgtcgaccaactggtgaagtgcagccatgagcgcagtatccatctctttattgactcactcttgaacgaggaaaacccgtcgaaggcttatcgttgttcctccaaagaagcttttgagaagggactgtgtctctcctgccggaagaatcggtgtaataacctgggctatgaaattaataaggtgcgggcaaagaggagctccaagatgtaccttaagacacgatctcagatgccttacaaggtcttccactaccaggtgaagattcacttcagtggtactgagtcggagacccacacgaatcaggccttcgagattagtttatatgggacagtcgccgagtctgagaatattccgtttaccctgcctgaagtgtccactaacaagacatactccttcctgatatacacagaggtcgacataggggagttattgatgctgaagctaaagtggaaatccgacagctatttttcttggagcgattggtggtccagtcctggcttcgcaatccagaaaatccgcgtgaaggctggggagacccaaaagaaggtcattttttgcagcagagagaaagtgagccacttacagaaaggcaaggcgcccgccgttttcgtgaaatgtcacgataagagtctcaataagaagagcggc

SEQ ID NO: 15801 - DNA, 1425 bp, synthetic construct
  misc_feature 1..1425: note = source = /note="Description of Artificial Sequence: Synthetic coding sequence"
  source 1..1425: mol_type = other DNA
atggagtccaaggcgctgctggtgctgacgctcgcagtctggttgcaatcgctgaccgcttcccgcgggggcgtggctgcagctgaccaacgcagagatttcatcgatattgaatcaaagttcgccctcagaaccccggaggataccgccgaggacacttgtcaccttatccctggagtggcagagagcgtggcaacgtgtcacttcaaccactcgtcaaagaccttcatggttatccacggatggactgtgactggaatgtacgaatcctgggtgccaaaacttgtggccgctctctacaagagagagcctgactccaacgtgatcgttgtggactggctgtcaagggctcaagaacattacccggtcagcgctgggtacactaagctggtcggccaagacgtggccagattcatcaattggatggaagaggaattcaactacccgctggataacgtgcatctcctcggatactcgctgggtgctcatgctgccggaatcgcgggatcgctgactaacaagaaagtgaaccggataaccggccttgacccggcgggaccgaattttgaatatgctgaagctccaagcaggctgtcaccggacgatgcggactttgttgacgtgctgcacacttttaccagaggatcgccaggccggtcaattggcatccagaagccggtgggacacgtcgacatctacccgaatggaggaactttccagcccggatgtaatatcggagaagccatccgcgtcatcgcggagcgcggcctcggcgatgttgaccagctcgtgaagtgctcgcatgaaaggtctatccacctgttcatcgatagcctgctgaatgaggagaatccttcaaaggcatacagatgctcgtcaaaagaggctttcgagaaagggttgtgcttgtcctgccggaagaaccggtgcaacaacctgggttacgaaatcaataaggtccgggccaaacggagctccaagatgtatctgaaaaccagatcacagatgccgtacaaggtgtttcactaccaagtgaagatccatttctccggaactgaaagcgaaacccacactaatcaggcattcgagatctcactctacgggactgtcgccgaatccgagaacatcccattcactctccctgaagtgtcgactaacaagacttactcattcctgatctacactgaagtggatatcggcgagctgctgatgctgaaattgaagtggaagtcggactcgtacttcagctggtccgactggtggtcctctccgggctttgccattcaaaagatcagagtcaaagcaggtgaaacgcagaaaaaagtcattttctgctcccgggaaaaggtttcccatctgcagaaggggaaggcgcccgcagtgttcgtgaagtgccacgacaagtcgcttaacaagaagtcagga

SEQ ID NO: 15802 - DNA, 1425 bp, synthetic construct
  misc_feature 1..1425: note = source = /note="Description of Artificial Sequence: Synthetic coding sequence"
  source 1..1425: mol_type = other DNA
atggaatcgaaagcgttactagtattaacgttagcggtatggctacaatcgctaacggcgtcgcgtggtggtgtagcggcggcggatcaacgtcgtgattttatagatatagaatcgaaatttgcgctacgaacgccggaagatacggcggaagatacgtgtcatttaataccgggtgttgcggaatcggttgcgacgtgtcattttaatcattcgtcgaaaacgtttatggtaatacatggttggacggttacgggtatgtatgaatcgtgggttccgaaattagttgcggcgttatataaacgtgaaccggattcgaatgttatagtagtagattggttatcgcgtgcgcaagaacattatccggtttcggcgggttatacgaaattagtaggtcaagatgttgcgcgatttataaattggatggaagaagaatttaattatccgctagataatgtacatctattaggttattcgctaggtgcgcatgcggcgggtatagcgggttcgttaacgaataaaaaagttaatcgtataacgggtttagatccggcgggtccgaattttgaatatgcggaagcgccgtcgcgtttatcgccggatgatgcggattttgttgatgttctacatacgtttacgcgtggttcgccgggtcgatcgataggtatacaaaaaccggtaggtcatgtagatatatatccgaatggtggtacgtttcaaccgggttgtaatataggtgaagcgatacgtgtaatagcggaacgtggtttaggtgatgttgatcaactagttaaatgttcgcatgaacgttcgatacatctatttatagattcgttactaaatgaagaaaatccgtcgaaagcgtatcgatgttcgtcgaaagaagcgtttgaaaaaggtttatgtctatcgtgtcgtaaaaatcgatgtaataatctaggttatgaaataaataaagtacgtgcgaaacgatcgtcgaaaatgtatttaaaaacgcgttcgcaaatgccgtataaagtttttcattatcaagtaaaaatacatttttcgggtacggaatcggaaacgcatacgaatcaagcgtttgaaatatcgctatatggtacggtagcggaatcggaaaatataccgtttacgttaccggaagtatcgacgaataaaacgtattcgtttttaatatatacggaagttgatataggtgaattattaatgttaaaactaaaatggaaatcggattcgtatttttcgtggtcggattggtggtcgtcgccgggttttgcgatacaaaaaatacgtgtaaaagcgggtgaaacgcaaaaaaaagttatattttgttcgcgtgaaaaagtttcgcatttacaaaaaggtaaagcgccggcggtttttgtaaaatgtcatgataaatcgctaaataaaaaatcgggt

SEQ ID NO: 15803 - DNA, 1425 bp, synthetic construct
  misc_feature 1..1425: note = source = /note="Description of Artificial Sequence: Synthetic coding sequence"
  source 1..1425: mol_type = other DNA
atggaatccaaagccctgctggtgctgactcttgcagtgtggcttcaaagcctgaccgcatcccgaggtggtgtggcagccgccgaccaaaggagagactttatagatattgaaagtaagtttgcgctccggaccccagaggacactgccgaagatacttgccatcttatacctggggtcgcggaatcagtggcaacctgtcacttcaatcactcatcgaaaacctttatggtgatccatggttggaccgtgaccggcatgtacgagtcctgggtgcctaagctggtggctgcattgtacaaaagagagccagactcgaatgtcattgtggtggattggctttcgagagcacaggaacattaccctgtctccgccggatacaccaagctggtggggcaagatgtggcacgcttcataaactggatggaagaagaattcaattaccctctggataatgtccacttgcttggttactccctcggggcacatgccgcaggaatcgcaggatcccttacgaacaagaaggtgaataggattaccgggcttgacccagcgggaccgaacttcgagtacgccgaagctcctagtaggttgagcccagacgatgcggatttcgtggacgtccttcataccttcacccgtgggtcccctggccgttcaatcggtatccaaaaacccgtggggcatgtggacatctaccccaacggtggcaccttccaacccggatgtaatatcggagaagctatccgcgtgattgcagaaagaggtcttggggatgtcgaccaacttgtgaagtgttcgcatgaaaggagcattcatcttttcattgatagcctgctcaacgaagaaaacccttcaaaggcataccggtgctcctcaaaggaagcatttgaaaagggactgtgtctctcgtgcagaaagaaccgttgtaacaacctgggatacgaaatcaataaagtccgtgcaaagcgcagcagcaaaatgtacttgaaaacgagatcccagatgccctacaaggtgttccattaccaagtgaaaatccacttctcgggaaccgagtcggagactcatactaatcaggcattcgagatttccctctatggtactgtcgcagaatcggaaaacatccctttcacgcttccggaagtttcgacgaacaaaacctactcgttcctgatttacacggaagtcgacattggtgagctcctcatgctcaaacttaagtggaagtcagatagctacttctcgtggagcgactggtggtcgtctccaggctttgccatccagaaaatacgtgtcaaagcaggcgaaactcagaagaaagtgattttctgtagcagggaaaaagtctcccatttgcagaagggaaaggctccagcagtctttgtcaagtgtcatgataagagcctcaacaagaagtccggc

SEQ ID NO: 15804 - DNA, 1425 bp, synthetic construct
  misc_feature 1..1425: note = source = /note="Description of Artificial Sequence: Synthetic coding sequence"
  source 1..1425: mol_type = other DNA
atggaatccaaagccctactcgtcctgactctcgccgtttggttacaatccctcactgcctcacgggggggggtggctgccgcagatcagagacgtgactttatagatatcgaatctaaattcgccttgcgaactcctgaggatactgccgaagatacatgtcacttaatacccggagtggccgaatcagtcgccacttgccactttaatcatagtagtaaaacttttatggtcatacatgggtggacagtgacagggatgtatgagagttgggtccccaaacttgtcgcggctctatataaacgcgaacccgatagtaacgtgatcgtcgttgattggctttctcgggctcaggaacactaccctgtctcagcaggatatactaagctcgtgggacaggatgtggcacgctttattaactggatggaagaggagttcaactatccattagacaatgtacaccttcttggatacagtcttggggcacatgcagcaggaatagccgggtctcttactaataaaaaagtcaataggattacagggttagatcccgccggacccaacttcgaatatgctgaagccccctctcggttatctcccgatgatgccgattttgtggatgtgttacatactttcacacggggaagtcctgggagaagtataggaatacagaaaccagtcgggcacgtagatatctatcctaacggaggaactttccagcctgggtgcaatataggagaagctataagggtgatagccgaaagagggttaggggatgtggatcagctggtgaaatgctcacatgaacggtccatccacctttttatcgactccctgctcaatgaggaaaacccctccaaggcatatcgatgttcctccaaagaagcatttgaaaaaggactgtgtctctcttgtcggaaaaataggtgcaataacctgggatacgaaataaacaaagtgcgcgctaaaagatcctccaaaatgtatctgaaaactcgctcacagatgccctataaagtgtttcactaccaggtgaagattcatttctctggaactgaatccgaaacacatacaaatcaagccttcgaaatctccctttatggaactgtggcggagtctgaaaacatccctttcactctccccgaagtttccacaaacaaaacttatagtttcctcatatatacagaggttgatatcggggaactactgatgctaaagctcaagtggaaatctgattcatatttttcatggtcagattggtggtcttctcccgggtttgccatacagaaaatccgggttaaggctggggaaacacagaaaaaagtcatcttttgttctcgggaaaaggtctcacatctccaaaaggggaaagctcctgcagtgtttgtgaagtgccatgacaaaagtctcaacaagaaatcggga

SEQ ID NO: 15805 - DNA, 1425 bp, synthetic construct
  misc_feature 1..1425: note = source = /note="Description of Artificial Sequence: Synthetic coding sequence"
  source 1..1425: mol_type = other DNA
atggaaagcaaggctctccttgtgctcaccctggccgtttggctccagagccttaccgccagccgcggcggcgtggccgccgcggatcagaggagggatttcatagatatcgaatctaagttcgcgctgagaacccccgaggataccgctgaagacacatgtcacctcatccctggggtcgctgagagcgtggcaacctgccatttcaaccacagcagcaagacatttatggtgatacacggatggacagttaccggtatgtatgagagttgggtccccaagttggtggccgctctttacaaacgcgagcctgactctaacgtgatcgtagtcgattggctgtcaagagcacaggaacattacccagtaagcgctgggtatactaagctcgtgggtcaggatgtggctcgatttataaactggatggaagaagagttcaactaccccttagataatgtgcatcttctggggtactcacttggcgcacacgcggctggtatcgccggatccctcacaaataaaaaagtgaaccgcatcacagggctggaccctgccggaccaaactttgaatacgccgaggccccttctcgcctgtctccagatgatgcagatttcgtggatgtcctgcacacttttacgagaggatccccgggaagaagtatcggcatacagaaaccagttgggcacgtggatatttaccctaacggtggtacctttcagcctgggtgcaacatcggtgaagccattagggttattgctgagagagggctcggtgatgtggaccagttggtgaaatgttcccacgagaggagcatccacctgtttattgacagcctgttgaacgaggaaaaccccagcaaggcctacaggtgttccagtaaagaggcattcgagaagggactttgcctcagctgcagaaaaaaccggtgcaataacctgggttacgaaatcaacaaggtccgagccaagagatctagcaagatgtatctcaaaactcggtcgcagatgccttacaaggtgttccactaccaggtcaagatccactttagcggaacagaaagcgagacccataccaaccaagcttttgaaatctccctctatgggaccgtcgccgaatctgagaatattcctttcaccctgcctgaagtcagtaccaacaagacctattcttttctcatatacacagaggtggacattggcgaactgttgatgctcaaactgaaatggaaatcagacagctattttagctggagtgattggtggtccagcccagggtttgcaatccagaaaattcgtgtgaaggctggagagacccagaaaaaagtcatcttctgttcacgtgaaaaagtaagccatctgcagaaaggaaaagctcccgccgtgttcgtaaagtgtcacgacaaaagcttgaacaaaaaatccggt

SEQ ID NO: 15806 - DNA, 1425 bp, synthetic construct
  misc_feature 1..1425: note = source = /note="Description of Artificial Sequence: Synthetic coding sequence"
  source 1..1425: mol_type = other DNA
atggagtcgaaggccctgctcgtgctgactctcgcggtttggctccagagcctgaccgcctctagaggtggggtggctgcagccgaccagcgaagggatttcatcgacattgaatctaaatttgcgctgagaacaccggaggataccgctgaggatacttgccacttgataccaggagtggccgagtctgtagcaacatgtcatttcaaccacagtagcaaaaccttcatggtgattcacggctggaccgttactggcatgtacgaatcgtgggtacccaagctggtggcggctttatacaaacgagagccggactcgaacgtgatcgtggtcgattggttgtctagggcgcaggaacattatcctgtgtcggctggctacactaaactcgtaggccaggacgttgcgcggtttatcaattggatggaagaagagtttaactatcccctggataacgtgcacctgcttgggtatagcttgggtgctcatgcagccgggatcgcgggaagtctgacgaacaagaaggtcaaccggattactggacttgaccccgctggaccaaactttgagtacgcagaagcgcccagcaggctgtcccccgatgacgctgactttgtggacgtcctgcacacatttacaaggggcagcccaggacggtcgatcggcatccagaagcccgtaggacatgtcgatatataccctaacggaggaacattccagccgggctgcaatataggcgaagccattcgagtcattgctgagcgcgggctgggcgatgtggatcagctggttaaatgttcacatgagaggtcgatccatctgttcatcgattctctccttaacgaagagaacccatctaaagcataccggtgtagctctaaagaagcttttgaaaagggcctgtgtctgtcctgtcgtaaaaatcgctgcaacaatctcggctacgaaatcaacaaagtgcgtgcaaagcgatcatctaagatgtatctgaagaccagatcacaaatgccctacaaggtgtttcactaccaagttaagatccatttttccggcacagagtccgaaacgcacacaaatcaagcctttgaaatcagtttgtacgggaccgtggcagaatctgagaatattccattcacgctgcctgaagtgtcaaccaataagacttatagtttcctgatctacactgaggtagacataggcgagctattaatgctaaagttgaagtggaagtctgactcttatttttcctggagtgactggtggagctcacccggcttcgccatccaaaaaattcgggtgaaagcgggtgagactcagaagaaagtcattttctgttccagggaaaaggtatcccatcttcagaagggcaaggccccagcggtttttgtgaaatgccacgataagtccttaaataagaagagtgga

SEQ ID NO: 15807 - DNA, 1425 bp, synthetic construct
  misc_feature 1..1425: note = source = /note="Description of Artificial Sequence: Synthetic coding sequence"
  source 1..1425: mol_type = other DNA
atggaaagtaaggccctactggttttaacactggccgtgtggttacagagtctcactgcttcaagggggggtgtcgccgcagccgaccagcgaagggatttcatcgacattgagagcaaattcgccctgagaacacctgaggacacagcagaagatacatgccacctgatccctggcgtggctgaatcagttgctacatgccattttaaccactcatcaaagacattcatggtcatccacgggtggactgtgacagggatgtatgaaagctgggtccccaagttggttgctgcgctgtacaagcgcgagccagatagcaatgtgatcgtagtagactggctgtcacgagcacaggagcactatcctgtctcagccggttacactaagttggtggggcaagacgtcgcgcgattcattaattggatggaagaagaatttaactatccgcttgacaacgtgcatctgctaggttattctcttggggcacacgctgctgggatcgctggctcactaaccaataagaaagtaaaccgcataactggcctggatccagccgggccaaatttcgagtatgcagaagcgcctagccgtttatccccagatgacgctgacttcgttgatgttttacacaccttcaccagggggagtccagggagaagtatcggtattcagaagcctgtggggcatgtggacatttacccgaacggcgggacctttcagccgggttgtaatattggggaagccataagagtgatcgccgaacgagggctgggcgacgtggatcagctggtaaagtgctcgcacgagcgatcaatccatctgttcatcgatagcctgctgaacgaggagaacccatctaaggcctatcgatgttcatcaaaggaagcttttgagaagggtttatgcctgtcctgtaggaagaatcggtgtaacaacttgggctacgagatcaacaaggtgcgagcgaaaagaagctctaagatgtatctgaagacaagatcccaaatgccttataaggtctttcactaccaagtgaaaatccatttctccgggacagagtctgaaacacacaccaaccaggctttcgagattagcctgtacggcaccgttgccgagagtgaaaacattccctttacattaccagaggtgagtaccaacaagacctacagcttcctgatttatactgaggttgatatcggtgagctcctgatgcttaaactgaagtggaagagcgactcttacttctcttggagtgattggtggtcaagccccggattcgccatccagaagatcagggtaaaggccggtgagacccagaagaaagtgattttctgctctagagaaaaggtgagccacctgcaaaagggtaaagctcctgcagtattcgttaagtgtcacgacaagtctctcaataagaagagcggc

SEQ ID NO: 15808 - DNA, 1425 bp, synthetic construct
  misc_feature 1..1425: note = source = /note="Description of Artificial Sequence: Synthetic coding sequence"
  source 1..1425: mol_type = other DNA
atggaaagcaaggctctcctggtgctgacccttgcagtctggctccaatcccttaccgcaagcaggggaggtgtggcagcagcggatcaaaggagagatttcatcgacattgagtccaagttcgcacttagaaccccagaagataccgccgaggacacctgccacctgatacctggtgtcgccgagtccgtggccacttgtcatttcaaccattcctcgaaaacttttatggtgatccacggctggaccgtgaccggtatgtacgaaagctgggtcccaaaactggtggcggccctgtacaaaagagaacctgactcgaatgttattgtggtggattggttgtccagagcacaggagcactatcctgtgtcggcaggatacactaagctcgtcggacaagatgtcgcacgattcatcaactggatggaggaagagtttaactacccccttgataacgtgcatctgctgggctactccttgggtgctcatgcagcaggaattgcgggatcgctgacgaacaagaaggtcaacaggattactggtcttgacccagcaggcccaaatttcgaatacgcagaagcaccatcaagactgtcgcctgacgatgcggattttgtcgacgtgcttcacactttcactcgaggctcacctggacggtccattggaatccagaagcctgttggacacgtggacatttacccgaacggtggcacctttcagcctggttgtaacattggggaggcgatcagagtgattgctgaacggggtctgggtgatgtcgaccagctggtgaaatgcagccacgagcgttcgattcacctgttcatcgattcacttcttaacgaagaaaacccgagcaaggcataccggtgttcctccaaggaagcattcgaaaaaggactgtgtctgtcctgtcgaaagaacagatgcaacaacctcgggtacgaaatcaacaaggtgcgggccaagagatcgtcgaagatgtatctcaagaccaggagccaaatgccatacaaggtttttcactaccaagtgaagatacatttttcgggaactgagagcgaaacccacactaaccaggcattcgaaatttcactgtacggcacggtggccgagagcgagaacatccccttcaccctgcctgaagtctccactaataagacgtactcgtttttgatatacaccgaagtggatatcggagaactgcttatgttgaagttgaagtggaagagcgattcgtacttttcttggtcggattggtggagctcccccggatttgcgatccagaaaatacgagtgaaggcaggagaaactcaaaagaaagtcattttctgttcgcgggaaaaggtcagccacctccagaagggtaaggcccccgcagtgtttgtgaagtgtcatgataagagcctgaataagaaatcaggg

SEQ ID NO: 15809 - DNA, 1425 bp, synthetic construct
  misc_feature 1..1425: note = source = /note="Description of Artificial Sequence: Synthetic coding sequence"
  source 1..1425: mol_type = other DNA
atggagtctaaggcactgctggtcttgacattggcggtctggttacagagtttgactgcttccaggggaggtgtcgccgctgccgaccaacggcgggatttcattgatatagaatctaagtttgcattgagaacaccggaggataccgcagaggacacatgccacctcattccgggcgtagcagagtccgtagccacttgtcacttcaatcactcttctaagacctttatggtaatccacggatggaccgtcactggtatgtacgaatcttgggtgcccaagcttgtcgcagccctgtacaagagagagcccgattctaatgtcatagtggttgactggctgtcaagggctcaggagcactaccccgtgagcgccggatatactaagttagtcgggcaggacgtggcccgcttcatcaattggatggaggaagagtttaattatccgctcgataatgtgcatcttctggggtacagcctaggcgctcatgctgccgggatagccggatcgctcactaacaagaaggtgaataggatcaccggcctggatcctgctggaccaaacttcgagtacgccgaagccccctctagactgtcacccgacgacgctgactttgtggatgttctgcacacattcacacgagggagtcctggtcggagcatcggcatccaaaaacctgtcggccatgtcgatatttaccctaacggcggcaccttccagcctggatgtaacataggagaagctattcgtgtgatcgccgagcgggggctaggagacgtggatcagcttgtgaagtgttcccacgagcgttcaatccatcttttcattgatagcctactcaacgaggagaatccatctaaggcataccgctgttcttccaaggaggcattcgagaagggcctgtgtctcagttgcaggaagaatcggtgcaacaatctgggatatgagatcaataaggtgagggcgaaaaggtcaagtaagatgtacctcaagactaggagtcaaatgccctataaggtgtttcactaccaggtgaaaattcacttctctggaacagaaagcgaaactcataccaaccaagccttcgagatttcactgtatggcaccgtagcagagagtgagaacatcccattcaccctgcccgaagtgagcactaataagacgtactcattccttatctacaccgaggttgatataggagagttgcttatgctcaagctgaaatggaaatctgatagctattttagttggtccgattggtggtcaagtccgggcttcgctattcagaagattcgcgtcaaagcaggtgagacacagaaaaaggtgatcttctgctcacgcgaaaaagtttcccatctgcaaaaaggcaaagctccagcggtgtttgtcaagtgccacgacaagtcacttaataagaagagcgga

SEQ ID NO: 15810 - DNA, 1425 bp, synthetic construct
  misc_feature 1..1425: note = source = /note="Description of Artificial Sequence: Synthetic coding sequence"
  source 1..1425: mol_type = other DNA
atggaatcaaaggcactactggtcttgactcttgcagtgtggctgcagagtctgacggcctctcgcggaggagtggcagccgccgaccaaaggcgcgatttcatcgatatcgagtcaaaatttgctttgagaacccccgaggataccgctgaagacacatgtcacttaatcccaggtgttgctgaaagcgttgctacatgtcattttaatcactccagtaagacattcatggtcatacatggatggaccgtcacggggatgtacgaatcttgggttcccaaactcgttgcagctctgtataagcgcgagccagactccaacgtgattgtggttgactggttatcaagggcgcaagagcactaccccgtgagcgcagggtacacaaagcttgtggggcaggatgttgcacggtttatcaactggatggaggaggagtttaactatccccttgataatgtgcacttgctgggttactcactgggagcacatgccgcaggcattgccggctccttgactaataaaaaagttaatcgcattaccggcttggacccagccggtcccaactttgaatacgccgaggccccatcacggttgtctcctgatgatgcggacttcgtggatgttctccacacattcacccgcggtagtcccggccggtctataggcatccagaaaccagtcggccatgtcgatatataccccaatggggggactttccagcccggctgtaatattggagaagcaattcgcgtcattgccgagagaggattaggcgatgtggaccaattggtgaaatgctcccacgaacggagcatccacttgttcatagattcactgctcaatgaggagaatccatctaaagcctacagatgtagcagtaaggaagccttcgagaaggggttatgtctgagttgccgtaagaacaggtgtaataaccttgggtacgagatcaataaggttagagccaagaggtcctcaaagatgtacttgaagaccaggtctcagatgccctacaaggtttttcactatcaggtgaagatccatttcagcggaaccgagagcgagacccatacgaatcaggccttcgagatctccctgtacggaactgtcgcggagtccgaaaacatcccctttacactgcctgaagtctccactaataagacctatagctttctgatttatacggaagtggacatcggtgagctcttaatgttgaagctgaagtggaaatccgattcttacttcagttggtccgactggtggagctctcctggatttgctattcaaaagatacgggtgaaggccggcgaaacccaaaaaaaggttattttttgtagcagagaaaaagtaagtcatctgcagaagggcaaggcacctgcagttttcgtaaagtgccacgacaaatccttgaataagaaatcaggc

SEQ ID NO: 15811 - DNA, 1425 bp, synthetic construct
  misc_feature 1..1425: note = source = /note="Description of Artificial Sequence: Synthetic coding sequence"
  source 1..1425: mol_type = other DNA
atggaatcgaaagcattgctcgttcttaccttggcagtgtggctccaatcccttactgcgagcagagggggcgtggccgccgccgaccagcggagagatttcattgacatagaatccaagtttgctttgaggaccccagaagataccgccgaggacacctgccatctgatacccggagtggcagaatcagtcgcaacctgccactttaatcattcttcaaagactttcatggttatccatggatggactgtcaccggtatgtacgaatcctgggtgcccaaactcgtggcagcactttacaaacgcgaacctgactccaatgtcattgtggtggactggctgtcacgggcgcaggaacattaccctgtgtccgcaggttataccaagttggtaggccaagacgtcgcccggtttatcaactggatggaagaagagttcaattatccacttgataacgtgcacctgctgggatactcccttggcgcccacgctgcaggaatcgcaggcagcctgaccaacaagaaggtcaaccgaataactggactggaccctgcaggaccaaactttgaatacgccgaagcacccagccgactttctccagatgatgcggattttgtggatgtgcttcatactttcacccgagggagccctggccgctcgattgggatccaaaagccagtcggtcatgtggacatttacccgaatggagggacttttcagcccggatgcaacatcggggaagcaatccgggtgattgccgaacggggtcttggagatgtggatcaacttgtgaaatgctcgcatgagagatccattcatttgtttatcgactcactgcttaacgaagaaaatccgtccaaggcgtatagatgtagctccaaggaggccttcgagaaaggtctttgtctgtcctgccggaagaataggtgtaacaacctgggctacgagattaacaaagtgcgggctaagcggtcctcgaagatgtaccttaaaacccgctctcagatgccctacaaggtgtttcattaccaggtgaagattcatttttctggcacggaaagcgagactcacaccaaccaagccttcgaaatttcactttacgggactgttgcagagtcagaaaacatcccgtttactcttcctgaagtctcaaccaacaaaacttactcctttttgatttacaccgaagtcgacatcggtgagctcctgatgcttaagctgaaatggaagtcagattcatacttcagctggtcggattggtggtcctccccaggttttgcaatacagaagatcagggtgaaggcaggggaaacgcagaaaaaggtgatcttctgttcgcgagaaaaggtgtcgcatctgcaaaaaggcaaggcccctgcagttttcgtgaaatgtcacgataagtcgcttaacaaaaagagcggt

SEQ ID NO: 15812 - DNA, 1425 bp, synthetic construct
  misc_feature 1..1425: note = source = /note="Description of Artificial Sequence: Synthetic coding sequence"
  source 1..1425: mol_type = other DNA
atggagagcaaagcccttcttgttctgaccctcgccgtgtggctccagtctctgaccgccagtcggggaggagtggcagctgccgaccagcgcagggattttatagatattgagtccaaattcgcattgcgaactcccgaggataccgcggaagacacttgtcacctcatccccggcgttgccgaaagcgtagccacctgtcactttaaccactcctcaaagaccttcatggtaattcatggctggacggtcaccggcatgtacgagtcttgggtgccgaagctggttgctgctctgtacaagagagaacccgatagtaacgtcatcgtggtggattggctgtccagagcccaggaacattatccggtcagcgcaggatataccaagttggttggtcaagacgtggccagatttataaactggatggaagaagagtttaattatcctctcgacaacgtacaccttttgggatactctctgggagcccatgccgccggtatcgccggctccctcacaaacaaaaaagttaacaggattactggcttggaccctgcgggacccaacttcgaatatgccgaggcgcccagcaggcttagtcccgacgacgctgacttcgttgatgtcctccatacctttacaaggggaagtcctgggcggtccatcggtatacagaaacctgtggggcatgttgacatctatcctaatggcggcacctttcagccaggatgcaacattggtgaggccatacgggtaatcgccgaaaggggcttgggagacgtggatcagctcgtaaagtgctcacacgagcgcagcatccacctattcatagactccctgttaaatgaagagaatccgtcaaaggcatataggtgctcgagtaaggaggctttcgagaaaggactttgcttgagttgtcggaagaatcggtgtaacaacctaggatatgaaattaataaagtgagggccaaacgcagcagtaaaatgtatctgaagacacggagccaaatgccatataaggtgtttcattatcaggtcaaaattcacttttccggcaccgaatcggagacgcatactaatcaggcctttgaaatctccctgtacgggaccgtggcagaaagcgaaaatataccatttactttacctgaggtcagcactaacaagacctactcctttttgatctataccgaagtggatattggcgaactccttatgcttaagctcaagtggaagtccgactcctatttctcctggtctgactggtggagctcccccggattcgccatccagaaaatcagggtgaaagctggagagacgcagaagaaagttatattctgctcccgggagaaagtctctcacctgcagaagggtaaggctcctgctgtgttcgtgaaatgtcacgacaagtctctaaataagaaaagcggg

SEQ ID NO: 15813 - DNA, 1425 bp, synthetic construct
  misc_feature 1..1425: note = source = /note="Description of Artificial Sequence: Synthetic coding sequence"
  source 1..1425: mol_type = other DNA
atggaatccaaagcactcctggtgctcactctcgcggtctggctgcaatcgcttaccgcttcgagaggaggggtggctgccgcagatcagagacgggatttcatagacatagaatcgaagttcgcacttagaacgccagaagataccgcagaagatacctgccacctgattccaggcgtcgcggagagcgtggcaacttgtcatttcaaccattcgagcaagacctttatggtgatccatggttggaccgtcaccggaatgtatgagagctgggtgcccaaacttgtggccgcactgtacaagcgcgaacctgacagcaatgtgatagtggtggactggctttcaagagcacaggaacattacccagtatcagctggatacactaagttggttggacaagatgtggcccgctttatcaactggatggaagaggagtttaactaccctcttgataatgtgcatctgctcggatactctcttggtgcacacgctgcgggcatcgcaggctccctgacgaacaagaaggtgaacagaatcactgggcttgaccccgcagggccaaatttcgagtacgcagaagctccatcaaggctcagcccggacgatgctgacttcgtggacgtgctccatacgtttactaggggttcgccaggaaggagcatcggcattcaaaaaccagtcggacacgtcgacatttaccccaacggaggcacttttcaacctggatgtaacattggggaagccattagagtcatcgctgaaagaggactcggcgatgtggatcagcttgtgaagtgtagccatgaaaggtcaattcacctcttcattgactcccttctcaacgaggaaaatccctccaaggcctacagatgctcatccaaggaggcctttgagaagggcctttgcctgtcatgtcgcaagaaccgttgcaacaaccttgggtacgagatcaacaaggtgcgggccaagcggtcctccaagatgtacctcaaaacccgatctcaaatgccttacaaggtctttcattaccaggttaagattcactttagcggaaccgagagtgaaacgcataccaatcaggcttttgaaataagcctttacggaactgtggcagagtcggagaacattcctttcactctgcctgaagtgtccaccaacaaaacctattccttcctcatctataccgaagtggatattggagaacttctgatgttgaagctcaagtggaagtcggactcatactttagctggagcgattggtggtcatccccggggttcgcaattcagaagattagggtgaaagccggcgaaacccaaaagaaggtcattttctgctcacgggaaaaggtgtcccacctccaaaaagggaaagctccagccgtgtttgtgaagtgtcatgataagtcgctgaataagaagtcaggg

SEQ ID NO: 15814 - DNA, 1425 bp, synthetic construct
  misc_feature 1..1425: note = source = /note="Description of Artificial Sequence: Synthetic coding sequence"
  source 1..1425: mol_type = other DNA
atggaatcgaaggcacttctggtactgacccttgctgtgtggcttcagtccctgactgcctcccgtgggggagtcgcagcagcagatcaaagacgcgactttatcgatattgaatcgaagtttgcactccggacccctgaggacactgccgaggatacgtgccatctgattccaggagtcgccgaatcggttgccacctgtcatttcaaccattcctccaaaacctttatggtgatccacgggtggacggtgactggtatgtacgagtcctgggtgccgaagctcgtcgcagcactttacaagcgggaaccagactccaatgtgattgtggttgattggctgtcgagagcacaagaacattacccagtgagcgccggatataccaagttggtgggccaggatgtggcgcgtttcattaactggatggaggaagagtttaactacccactcgataatgttcacttgctcgggtactcgctgggcgcacacgcggcaggtatcgcgggttcactgactaacaagaaggtgaacagaattaccggccttgatccagccggtcctaacttcgagtacgccgaggcgccttcacgactttcgccagacgatgcagactttgtcgatgtccttcatacttttacgagaggaagccctgggcgatcaatcggtatccagaagcctgtaggacatgtcgacatataccctaatggaggtacgttccaaccaggatgtaatatcggtgaagcaatccgggtgatcgcagaacgtggtcttggagatgtggaccaactcgtgaagtgttcccacgagcgctcgatacatttgtttatagactccttgcttaatgaagagaatccttccaaggcatatcgttgctcctccaaggaagcatttgaaaaaggactctgtctttcgtgtagaaaaaacagatgtaataacctcggctacgagattaacaaagtcagggccaagagatcgagcaagatgtacctcaagacccgctcgcagatgccttacaaggtttttcattaccaggtcaagattcacttcagtggtactgaatcagaaacccacaccaaccaagcgttcgaaatttccctgtacggcactgtcgcagaaagcgaaaacattccatttacgctgcctgaggtgagcactaacaaaacttactccttcctgatttacaccgaggtcgatattggcgaactcctgatgttgaagctcaagtggaagagcgatagctacttttcctggagcgactggtggtcgtcacctgggtttgcaatccagaagatacgtgtgaaggccggggaaacccagaagaaagttatcttctgttcgagggaaaaagtgtcgcacctgcagaaaggcaaagcaccggcggtctttgtgaaatgccatgataagtcgctgaacaagaagagcggc

SEQ ID NO: 15815 - DNA, 1425 bp, synthetic construct
  misc_feature 1..1425: note = source = /note="Description of Artificial Sequence: Synthetic coding sequence"
  source 1..1425: mol_type = other DNA
atggagagcaaagcccttctcgtgttgaccttggcggtgtggttgcagtccctcactgcctcccggggaggagtcgcggcagcagatcaacgtcgcgactttatagatatagaatcaaagttcgcactgcgtactcccgaggacaccgctgaggacacttgtcatcttattccaggagtggcggagtccgtggcaacttgtcatttcaatcattcgagcaagacttttatggttatccatggttggaccgtaaccggtatgtacgaatcatgggtccctaagctggtggcagctctgtacaagagagaacccgacagcaatgtaattgtagtggattggttgtcccgagcacaagaacactaccctgtttcggccggatacaccaaactggtgggtcaagatgtggcacggtttatcaattggatggaagaggagttcaactacccactcgacaacgttcatcttctgggatattctctgggagcacatgcagccggaatagcggggtcgctgaccaacaaaaaggtgaaccggattactggcctcgacccagccggtccaaatttcgaatatgcagaagctcccagccgcttgtcgccggatgatgccgattttgtggacgttctccacacttttaccaggggctcaccaggcagatccattggaattcaaaagccagtggggcatgtggatatctaccctaacgggggcactttccaacctggttgcaatatcggtgaggccatccgggtgatagcagagaggggcctgggggacgtggatcaacttgtcaaatgctcccacgaaagatcgattcacctctttattgatagcctgctgaacgaagaaaacccgtctaaggcatacagatgttcatccaaggaggcatttgagaaggggctttgcctctcctgtaggaagaatcgctgtaacaacctcgggtatgaaatcaataaggtgagagccaagagatcctcgaaaatgtaccttaagacgcgctcgcagatgccttacaaggtgttccactaccaagtcaaaattcatttttccggtaccgaatcggaaacccacaccaaccaggcttttgaaatttccctctacggcactgtcgccgaaagcgaaaacattccttttaccttgccagaagtctcgactaacaagacgtacagctttctgatctataccgaggtcgatatcggagagcttctgatgctgaaacttaaatggaagtcggattcgtactttagctggagcgattggtggtcatcgcctggtttcgcaatccagaaaatacgcgtgaaggcgggagaaacgcagaagaaagtgattttctgttctagggagaaagttagtcacctccagaagggaaaggcaccggccgtgtttgtgaagtgccatgacaagagcctgaacaagaagtcggga

SEQ ID NO: 15816 - DNA, 1425 bp, synthetic construct
  misc_feature 1..1425: note = source = /note="Description of Artificial Sequence: Synthetic coding sequence"
  source 1..1425: mol_type = other DNA
atggaatcaaaggccctgctcgtgctgacactcgctgtctggctccagtcactgaccgccagcagagggggggttgccgctgccgaccagcgccgcgactttatcgatatcgagtccaaatttgctctcagaacccccgaggacacagctgaagatacctgtcacttaatccctggcgttgctgaaagcgttgctacctgtcacttcaaccacagtagtaagacctttatggtgatacatgggtggaccgttactgggatgtacgagagctgggtgcctaaactagtcgctgctctgtataagcgcgaacctgattcaaacgtgatcgtggtggattggttgtcacgtgcacaggaacactaccctgtgagcgccggctacaccaagctggtcggccaggacgtggcacgattcattaattggatggaggaggagttcaactatcccttagacaatgttcatctactgggatactccttgggtgcacacgctgccggcatagctgggagcctgactaacaagaaggtgaaccggatcaccgggttagaccctgcaggcccaaactttgagtacgctgaggccccatcccgcctgagccctgacgacgccgacttcgtggacgtgttgcatacctttacccgaggatctcccggccgttccattggcatacaaaaaccagtggggcacgtggacatttacccaaacggcggcacctttcagcccggctgcaatattggtgaggccattcgtgttatcgctgagcgtggcttaggcgacgtcgaccagctcgtgaaatgtagccacgaacgaagcatacatctgtttatcgatagtctgctcaatgaagagaatccctccaaagcatatcgttgtagtagcaaagaagcttttgagaagggactgtgtctgagttgccggaagaatcggtgcaacaatctgggttacgagatcaacaaggtgcgagcaaaacgcagttctaagatgtacctgaagacccgttcacagatgccatacaaggtattccactatcaggtgaaaatccactttagcggcaccgagagcgagacacacaccaatcaggctttcgagattagcctgtacggcaccgtagctgaatccgagaacatcccattcacactgccagaggtttcaaccaacaagacctactcatttttgatctacacagaggtagacataggggaactgttgatgctgaagttaaaatggaaatccgatagctacttcagttggtcagactggtggagttccccaggatttgcaatccaaaaaataagagtcaaagcaggcgaaacccagaagaaggtcatcttctgctctcgggagaaagtgagtcaccttcagaaaggcaaagcaccagctgtgttcgtgaaatgccacgacaaatccctaaacaaaaagagtggc

SEQ ID NO: 15817 - DNA, 1425 bp, synthetic construct
  misc_feature 1..1425: note = source = /note="Description of Artificial Sequence: Synthetic coding sequence"
  source 1..1425: mol_type = other DNA
atggagagtaaggctctgcttgtgcttacattggcggtgtggctccaatcactcactgctagcagaggcggagtggcagccgctgatcagcgccgggactttatcgacatagagtctaaatttgctctccgaacaccagaggacactgccgaggacacttgtcacctgattcccggagtagctgagtctgtggctacttgccacttcaaccatagtagtaagaccttcatggtcatacacggctggaccgttactggaatgtatgagtcttgggtcccaaagctggtcgctgctctatacaaacgcgaacccgatagtaacgtaatcgtcgtcgattggctgagcagggcccaagagcactaccctgtgagtgcaggctataccaagctcgtggggcaggacgtggcccggttcatcaactggatggaagaggaatttaattatccgttagacaatgtgcatttgctaggctattctttgggtgctcatgccgctggcatcgcagggagtttaactaataaaaaggtcaacagaattactgggttggaccccgcaggcccaaattttgagtatgccgaagccccttcccggctaagtcccgatgacgcagatttcgtcgatgtcctgcacacattcacacgcggcagcccaggccggagtatcggaattcaaaagccagtgggacatgttgacatttacccaaacggaggtacttttcaaccagggtgtaacatcggtgaggccattcgggtcattgcagagcggggacttggcgatgtcgatcaactggtgaaatgttcccacgaaaggtctatacacctgttcattgattccttgctgaacgaagagaatcccagcaaggcttatcggtgcagctccaaggaggccttcgagaagggactttgcttgtcttgccggaaaaatcgctgtaataatctcgggtatgaaataaataaagtgagagcaaagaggagctccaagatgtacctgaaaacccgaagccaaatgccttataaggtctttcactaccaggtgaaaattcatttttcgggtacagagagtgagactcacaccaatcaggctttcgagatctctttgtatggaaccgtggccgagtctgagaatatcccttttactctgccagaggtctcaaccaataaaacgtattccttcctgatctatacagaggttgatataggggagctgcttatgttaaaactgaagtggaagtctgattcctacttttcctggtcagattggtggagcagtcccgggtttgccattcagaaaatccgcgttaaagcaggggagacacagaagaaagtgatcttctgttcaagagagaaggtttcccatctccaaaagggcaaggcgcctgccgtgttcgtaaaatgccacgacaagagcctcaataaaaaaagcgga

SEQ ID NO: 15818 - DNA, 1425 bp, synthetic construct
  misc_feature 1..1425: note = source = /note="Description of Artificial Sequence: Synthetic coding sequence"
  source 1..1425: mol_type = other DNA
atggaatctaaggctctgctagtgcttactctggcagtgtggctacagtctttgacagccagcagaggaggtgtagccgccgcagaccagcggagagactttatcgatatcgaaagcaagtttgcactgcgcacccctgaggacacggcggaagacacctgccaccttattccaggagtagcagaatccgttgcaacttgccattttaaccatagcagcaaaactttcatggtgatacatggctggaccgttacaggcatgtacgaatcctgggtcccaaaattggttgcagcgctgtacaagagagagccagatagcaatgttatcgtagtggactggctctccagggcgcaggaacattaccctgtgtcagcagggtataccaaactagtcgggcaggatgtggccagattcatcaactggatggaagaagagtttaactatcccttggacaatgtccatctgctgggctatagcctgggcgcccacgctgctggcattgccggatccctcacgaataagaaagtcaatagaattaccggtttggatcctgcaggccctaactttgagtacgctgaagccccatcaaggctgtctcccgacgatgctgactttgttgatgtcctgcacacctttactagagggagtccaggccgcagcatcggaatacagaaacctgtggggcacgtggacatttaccctaacggtggtacattccagccaggttgcaatatcggcgaggcaattcgagtaatagctgagcggggcctgggggacgtggatcaactagtcaagtgttcccacgagcgtagcattcacctatttatcgattctcttctgaatgaggaaaacccttcaaaggcatataggtgcagttcaaaggaagccttcgaaaaagggttgtgcctgtcctgccgaaagaaccggtgcaacaacctgggctatgagataaataaggtgagagctaagcggagcagcaagatgtatctgaaaaccaggtcacaaatgccatacaaagtttttcattatcaggtcaaaatacatttcagtgggactgaaagcgagacacacaccaatcaggcctttgagatatctctgtacggcaccgtagccgagtcggaaaacatcccctttactctgcccgaagtcagcaccaataagacctactcttttctcatatacactgaagtggacatcggagagctgctgatgctgaaactgaagtggaaaagcgattcttacttttcctggtctgattggtggtcaagtcctgggttcgccatccagaagatccgcgtgaaggccggggagactcagaagaaagtcattttttgtagcagagagaaggtctctcacctgcagaaagggaaagcccccgcagtcttcgtcaaatgccatgataagagtttgaacaaaaaatccggg

SEQ ID NO: 15819 - DNA, 1425 bp, synthetic construct
  misc_feature 1..1425: note = source = /note="Description of Artificial Sequence: Synthetic coding sequence"
  source 1..1425: mol_type = other DNA
atggagtccaaggcactgttggtgctgaccctcgccgtgtggctgcagtctctcaccgcaagccggggtggggtggctgccgctgaccaaagaagggacttcattgacatcgaaagcaaatttgccctgcggacgccggaggacaccgccgaagatacttgccacctcatcccgggagtagccgagtccgtcgcgacctgccactttaaccacagctcgaaaactttcatggtgatacatggttggaccgtgaccggcatgtacgaatcatgggtcccgaagctggtcgctgcactgtataagcgcgaaccagactcaaacgtcatcgtggtggattggctgtcgcgggcacaggaacattaccccgtgtcggcgggatacacgaaacttgtcggccaagatgtggcaagattcatcaactggatggaagaagagtttaactacccactcgacaacgtccatctgttgggatacagcctgggcgcgcatgccgcgggaatcgctgggtcactcaccaacaagaaggtcaacagaatcactggcctcgaccccgcgggaccaaacttcgagtatgcggaagctccttcaagactgagcccggatgacgcggattttgtggatgtactgcacactttcactcgaggttcgccgggacggtccatcggaatccagaagcccgtggggcacgtggacatttacccaaatggtggaaccttccagcccgggtgcaatataggcgaggccatcagggtgatcgctgagagagggctgggtgatgtggatcagctggtcaagtgctcgcacgagcggtcgattcacctgttcatcgactcgctgttgaatgaagaaaacccgagcaaggcgtaccgctgttcgtccaaagaggcgtttgaaaagggactctgcctctcgtgtaggaaaaacagatgcaataatctcggatacgagatcaacaaagtgcgggcgaagcgctcatctaagatgtaccttaagacccggtcccagatgccgtacaaagtgttccactaccaagtgaagatccatttttcaggaaccgagagcgaaacccatactaaccaggcttttgagatttccctgtacggaactgtggccgagtcggaaaacatcccattcactttgccggaggttagcactaacaagacctactcgttcttgatctatacggaagtggatatcggggagctgcttatgctcaagctgaaatggaagtccgacagctacttctcctggtcagactggtggagcagcccgggcttcgcgatccaaaagatcagagtcaaagcaggagagactcagaagaaggtgatcttctgtagccgcgagaaggtttcgcatctccagaaaggaaaggctccggcggtgttcgtgaagtgccatgacaagagcctgaacaaaaagtccggt

SEQ ID NO: 15820 - DNA, 1425 bp, synthetic construct
  misc_feature 1..1425: note = source = /note="Description of Artificial Sequence: Synthetic coding sequence"
  source 1..1425: mol_type = other DNA
atggagagtaaggcactgttggtactgacacttgccgtgtggcttcagtccctgactgccagcaggggaggcgtggctgccgcagatcagaggcgcgacttcattgacatcgaaagcaagttcgccctgcgcacacctgaagacacagccgaggacacatgtcacctgattccgggagtggctgagtctgtggcaacatgtcacttcaatcattcttccaaaacattcatggtgattcacggctggaccgttactggaatgtacgaaagctgggtgcctaagctcgtggccgctctctacaaacgggagccagactccaatgtgatcgtggttgattggctcagccgagcacaggaacactaccctgtcagcgcaggctatacaaagctcgtggggcaagatgtcgctagatttatcaattggatggaggaggaattcaactatcccctcgataacgtccatctcctcggttatagcctgggagcccatgcagccgggattgccgggtcactgaccaacaaaaaggttaaccgcatcactggtctggacccagcaggccccaactttgagtatgccgaggctccatctagactttcaccggacgacgccgacttcgtcgatgtactgcacacctttaccaggggctcccccggaagatccattgggattcagaagcccgtgggacatgtggatatatatccgaatggcggcacattccagccggggtgcaacattggggaagcaattcgggtgatagcagagcgcgggctgggagatgtggatcagctggttaagtgttcccacgaacggtccattcacctgtttattgatagtttgttgaacgaggaaaatccgtcaaaggcatatcgctgttcctcaaaggaagccttcgagaagggtctctgcctgtcatgtaggaaaaacaggtgtaataatctcggctacgagatcaacaaagtgagagctaagaggagtagcaagatgtacctgaaaacccggtcccagatgccctacaaagtgttccactatcaggtgaaaatccattttagcggaaccgagagcgagactcatacaaaccaagccttcgagattagtctctacgggaccgttgctgaaagtgagaacatcccctttactctgcccgaggtgagcacaaacaagacttacagtttccttatctacactgaggtggacatcggcgagctgcttatgctgaagctgaagtggaagagcgacagctatttcagttggagtgattggtggagttcacctggcttcgcgatccagaaaatcagggtcaaggcaggtgagacgcaaaaaaaagttatattctgctctcgagagaaagtgtcacatctccaaaaggggaaggcgcctgccgtttttgtgaagtgtcatgacaaatcactcaataagaagtctggg

SEQ ID NO: 15821 - DNA, 1425 bp, synthetic construct
  misc_feature 1..1425: note = source = /note="Description of Artificial Sequence: Synthetic coding sequence"
  source 1..1425: mol_type = other DNA
atggagagcaaggcgttgctggtgctcactctcgctgtgtggctccagagtttgacagctagccggggtggggtcgcagcagctgaccagcggcgggatttcatagacatcgaatcaaaattcgccctgaggaccccggaggatacagctgaggatacttgccatctaatcccaggggtggccgagtctgtagcaacctgccacttcaaccactcttctaagacattcatggtgatccacggctggacagtgactggtatgtatgagtcctgggtgcccaagcttgtggcggcactttataaaagagaacccgattccaatgtgatagtggtcgactggctctcgcgtgctcaggagcattatcctgtgtccgccgggtacacaaagctcgtggggcaggacgtggctcggtttatcaattggatggaggaggagttcaattaccctctcgacaacgtccacctgctgggatattccctgggcgcacacgccgctgggatcgcaggctctctcacaaacaagaaagtcaacaggattactggtttggaccccgcgggtcctaactttgagtacgccgaggcaccgtctaggctgtcacccgacgacgcagactttgttgacgtgttgcacacatttacgagaggcagccccgggagaagcatcggaatccagaaacccgtcggacatgtggacatctaccccaatggcggcacgttccagcctgggtgcaacatcggggaagccatacgggtcattgccgaaaggggattgggcgacgtcgatcagttggttaaatgctcccacgaaagatctatacatctttttatcgatagcctgctgaacgaggaaaatccatctaaagcctaccgctgctcctcaaaggaggcgttcgagaaaggtctttgtctgtcgtgcagaaaaaaccgctgcaacaatctggggtatgaaataaacaaagtccgcgcaaagcgatccagtaagatgtacctcaaaacccggagccaaatgccctacaaagtcttccattatcaagttaaaattcacttttccggaactgagtctgaaactcacaccaatcaagcctttgaaatcagtctctatgggactgtcgccgaatctgagaacatccctttcaccctgccagaggtaagtactaataaaacctattccttcctgatttacaccgaggtcgatatcggcgaactgctaatgctgaaactgaagtggaagagtgacagctacttttcatggtccgactggtggtcaagcccagggtttgcaatacagaagataagagttaaggctggggagacccagaaaaaggttattttctgcagccgagaaaaggtgagccatctgcagaagggtaaggcaccagccgtgtttgtgaaatgccacgataaatcccttaacaagaagtccggc

SEQ ID NO: 15822 - DNA, 1425 bp, synthetic construct
  misc_feature 1..1425: note = source = /note="Description of Artificial Sequence: Synthetic coding sequence"
  source 1..1425: mol_type = other DNA
atggaaagcaaagcactcctcgttcttaccctggcagtgtggttgcaaagtcttaccgcgagccgagggggcgttgcagccgcagaccaaaggagggattttatcgatattgagagcaagttcgccttgaggactccggaagacacagcagaagatacatgccatctgattccgggagtggctgaaagcgttgccacctgccacttcaatcatagctctaaaacctttatggtgattcatggatggacagttaccggcatgtacgaaagttgggtgcctaagctggtggctgcactgtacaagagagagccagactctaatgtaatcgtggtcgattggctgtcgagggcacaggagcactaccctgtgagcgctggctacaccaaactcgttgggcaggacgtggcacgctttattaactggatggaagaggagttcaactatcccctggataacgttcacctgctggggtactctctaggagcccacgccgcaggcatcgctggtagtctgaccaacaaaaaagttaacagaatcaccggcctcgacccggccgggccgaattttgagtatgcagaagcaccttcgcggctcagcccagatgacgcagattttgtcgatgtgctgcacacgttcacacgcgggagccctgggcgcagcatcggtatacagaaacctgtaggccacgtggacatataccccaatggaggaaccttccaaccaggatgtaacatcggcgaggccatcagagttatcgctgaacggggactgggtgatgtggaccagttggttaaatgttcccacgaaagatcgatacatctgtttatcgacagccttctgaacgaggagaatccgagtaaggcatataggtgttccagtaaggaagcttttgaaaaaggtttatgcctaagctgcagaaagaaccgctgcaataatttgggctatgagattaataaggtccgggctaaaagaagctctaaaatgtacttgaaaaccagatcacagatgccctacaaggttttccattatcaagttaaaattcacttcagcgggacagagtccgagacccacacgaaccaagcattcgaaatctcactctacgggacagtcgcagagagcgaaaacatccccttcacacttcctgaggtgtcaactaacaaaacctatagttttctgatttacaccgaggtggacattggggagttgctgatgctaaaattgaaatggaaaagcgattcttacttctcttggtctgactggtggagtagcccgggatttgctatacagaaaattagggtgaaagctggagaaactcagaagaaggtgatcttttgttcaagagaaaaagtgtcacatcttcagaaaggcaaagcacctgcggtttttgtgaaatgtcatgataaatccctgaacaaaaagagcgga

SEQ ID NO: 15823 - DNA, 1425 bp, synthetic construct
  misc_feature 1..1425: note = source = /note="Description of Artificial Sequence: Synthetic coding sequence"
  source 1..1425: mol_type = other DNA
atggagtccaaggcgctgttggtcctgactctggccgtgtggctgcagtcgctgactgcatctcgcggaggagtcgcggccgcggatcagcggcgcgatttcattgacatcgaatcaaagtttgctttgagaacccctgaggataccgcagaggacacttgtcacctgatcccaggagttgccgaaagcgtggctacctgccacttcaaccattcaagcaagacttttatggtcatccacggatggaccgtgactggaatgtacgaaagctgggtgccgaagctggtagcggcgctctataagagggaaccggactcaaacgtcatcgtggtggactggctgtcgcgggcccaggaacactaccccgtgtccgcggggtacactaaacttgtcggacaagacgtcgccaggttcattaactggatggaagaagaattcaactacccactggacaatgtgcacctgctcggttactcactgggtgcacacgccgcgggcatcgcgggctcgcttactaacaagaaggtgaatcgcatcaccggccttgatccggcaggaccaaatttcgagtacgccgaagccccatcgcggctttcccctgacgacgccgacttcgtggatgtgcttcacaccttcactcggggatctccaggacgctcgatcgggatccagaagccagtcggccacgtggacatataccctaacggaggaacctttcaaccgggatgcaatatcggagaagcaatccgcgtcatcgccgagcggggactcggcgacgtggaccagctggtgaagtgtagccacgagcgctccatccatttgttcattgactcactgctcaacgaagaaaacccgagcaaagcctacaggtgttcgtcaaaggaagccttcgagaaagggctctgcctctcgtgtcggaagaatcgctgcaacaatcttggatacgagattaacaaggtgcgcgctaagcggtccagcaaaatgtacctgaaaacccggtcccagatgccgtacaaggtgttccattaccaagtgaagatccatttttcgggaaccgagtccgaaactcacacgaaccaagcctttgaaatctcgctgtacggaactgtggcggagtccgagaatattcctttcaccttgcctgaagtctcaactaataagacttactcattccttatctacactgaagtggacatcggtgaactgcttatgttgaagctgaaatggaagtcagactcctacttctcgtggtcggactggtggtcctccccggggtttgccatccaaaagatcagagtgaaggcgggggagactcagaagaaggtcattttctgctccagggagaaggtgtcgcatctgcaaaaaggcaaggcaccggccgtgttcgtcaagtgccatgacaagtcccttaacaagaagtccgga

SEQ ID NO: 15824 - DNA, 1425 bp, synthetic construct
  misc_feature 1..1425: note = source = /note="Description of Artificial Sequence: Synthetic coding sequence"
  source 1..1425: mol_type = other DNA
atggagtcaaaggccctcctcgtgctcaccctggccgtttggctgcagtctcttactgccagtagaggtggtgtagccgctgccgaccagaggcgcgattttatagacatcgagtcaaaattcgccctgcgcacacctgaggatacggccgaggacacctgccatctcatcccaggcgtggctgagagtgttgcaacttgtcattttaaccatagctccaagacatttatggtcatacacgggtggaccgtgacaggtatgtatgaatcatgggtgcccaaactcgttgctgccctgtacaagagggagcccgacagtaacgtgattgtggtggactggctgtccagggcccaggagcattaccctgtctccgccgggtatacaaagctcgtggggcaggacgttgctcgatttattaactggatggaggaggagtttaactacccactggacaacgttcatctcctgggttactctctgggcgcacacgctgcggggatcgccggatctcttactaataagaaagttaatcgaatcaccggtctggatcctgctgggcccaacttcgaatacgccgaggcaccatctcgactttctcccgacgacgctgattttgtggacgtcctgcacacattcaccaggggctcccctggacgatccataggaatccagaaacccgtaggtcatgtggatatctacccgaatgggggtaccttccagcccggatgtaacatcggagaggcaatacgcgtgattgctgagcggggcctcggcgatgtcgaccaactggtgaaatgctctcacgagcgctccattcatctttttatagatagcttgctgaacgaggagaacccctcaaaagcctaccgctgtagcagcaaagaggcctttgagaaggggctgtgcctctcctgtcggaagaacaggtgtaacaacctggggtatgagattaacaaggtgcgggcaaaaaggtcctctaagatgtacctgaagacgcgcagccagatgccgtacaaggtgttccactaccaggtgaagatccatttctctggaactgaaagcgagacccatactaaccaagcttttgagatcagcctctacggcacggttgccgagtccgaaaacataccattcactctcccggaagtgagtacgaacaagacctactctttcctgatttacaccgaagttgatatcggagagcttctgatgctgaaactgaaatggaagtccgattcttacttcagctggtctgattggtggtccagccccggttttgcgatacaaaagataagagtgaaggcaggagagactcagaagaaggttatcttttgttcaagagagaaggttagtcatctccagaagggcaaggcacctgcggtgttcgtgaagtgccatgacaagtcattgaacaaaaaaagtggg

SEQ ID NO: 15825 - DNA, 1425 bp, synthetic construct
  misc_feature 1..1425: note = source = /note="Description of Artificial Sequence: Synthetic coding sequence"
  source 1..1425: mol_type = other DNA
atggagtcaaaggcgctgctggtgctgaccctcgcagtctggcttcaatcactgaccgcatcaagaggtggagtggccgctgcagaccagaggcgggactttatagatatcgaatcgaagtttgcccttagaaccccagaagatactgccgaggatacctgtcacctgatcccaggagtggccgagtcggtggcgacctgccactttaatcactcatccaagaccttcatggtgattcatggctggaccgttactggaatgtacgaatcgtgggttcctaaactcgtcgcggccctctacaagcgagaacctgatagcaacgtcattgttgtggattggctttcccgggcgcaagaacattaccctgtgtcagcaggatacaccaagctcgtcgggcaggatgtcgcacgattcatcaattggatggaggaggagttcaattatccgctcgataacgttcacctgctgggatattccctgggtgcgcatgccgcagggatagcaggatccctgactaacaagaaggtcaatagaatcaccggcctggaccctgccggcccaaactttgagtacgcagaagccccctcacgactctcgccagatgacgccgatttcgtcgatgtgcttcatacttttactagaggttcccctggccggagcattggcatccagaaaccagtgggtcacgtggacatctaccctaatggcggaaccttccaacccggctgtaacattggtgaagcgatacgcgtcattgcggagagagggctcggagacgtggatcagcttgtcaagtgctcacatgaacgttccattcatctctttatagactcactgctcaacgaagagaacccctcgaaagcgtaccggtgttccagcaaagaggcatttgaaaagggactttgcctgtcgtgtcggaagaaccgttgtaataaccttggatacgagatcaataaggtccgtgcaaaaagaagctcgaaaatgtacctcaaaactcgctcccagatgccctacaaggtgttccattaccaagtgaagatccatttctcgggcacggaatcggaaactcataccaaccaggcgttcgaaatttccttgtacggcaccgtggcagaatcggagaacattccattcactcttccggaagtgagcactaacaagacctactcctttctcatttacaccgaggtggatattggcgaactgctgatgctgaaacttaaatggaagagcgatagctacttttcctggagcgactggtggtcctcccctggatttgcaatccagaagatccgggtgaaagctggagaaacccagaagaaggtgattttctgtagcagggagaaggtgtcgcatctccaaaagggtaaggctcctgcagtgtttgtcaagtgccacgacaaatcacttaacaagaagtcagga

SEQ ID NO: 15826 - DNA, 1425 bp, synthetic construct
  misc_feature 1..1425: note = source = /note="Description of Artificial Sequence: Synthetic coding sequence"
  source 1..1425: mol_type = other DNA
atggagtcgaaagcactgctcgtgcttactctcgccgtgtggctgcaatcactgactgccagccgtggtggagtcgccgctgcagaccaaaggcgcgatttcatcgatattgaatcgaaattcgccttgagaacccctgaggatactgcagaggatacttgccatcttatcccgggagtggccgaatctgtggcgacctgccacttcaaccactcgtcaaaaactttcatggtcattcatggctggactgtcactggaatgtacgaatcttgggtcccaaagctcgtggctgccctgtataagagagagccggactcgaacgtgatcgtcgtcgattggctctctcgcgcccaggagcactacccggtgtcagcgggctacacgaagctcgtgggccaggacgtggcaagattcatcaactggatggaggaggagttcaactacccgctcgacaatgtgcacctgctggggtactcgctcggagcccacgcggcaggaatcgcaggaagtctgaccaacaagaaggtgaatagaatcaccggactggatccagccgggccaaactttgagtacgcagaagccccgtcgcgcttgtcgcctgatgacgctgacttcgtggacgtgctgcacactttcaccagaggttcccctggacggagcatcggaattcaaaagccggtgggccacgttgacatttaccctaacggaggtaccttccagcctggatgtaacatcggagaggctatccgggttatcgccgagcgggggttgggagatgtggatcaactggttaaatgcagccacgaaagatcgatccatctgttcatcgactccctcctgaacgaagaaaatccgtccaaagcctatcggtgctcgtccaaagaagccttcgagaagggactctgtttgtcctgccgcaagaaccggtgcaataacctgggatacgagattaacaaagtgcgggcgaagcggagctccaagatgtacttgaaaactaggagccagatgccatataaggtgttccactaccaagtgaagatccacttcagcggtactgaaagcgaaacccacactaaccaggcctttgagatctcactgtacggaacggtggctgagtccgaaaacataccattcactctccccgaagtctcgactaataagacttactcattccttatctacactgaagtggacatcggagaactgctgatgctcaaacttaagtggaagtcggattcgtacttctcgtggtcggactggtggtcgtcgccaggattcgcaatccagaagatccgcgtgaaggccggtgaaactcagaaaaaggtgatcttctgctcgcgggaaaaagtgtcccacctccaaaagggtaaggcgccagccgtgttcgtgaagtgccatgataagagcctgaataagaaaagcggc

SEQ ID NO: 15827 - DNA, 1425 bp, synthetic construct
  misc_feature 1..1425: note = source = /note="Description of Artificial Sequence: Synthetic coding sequence"
  source 1..1425: mol_type = other DNA
atggaaagtaaagcactgctggtcctaactctggccgtgtggctccagagtctcactgcatccagaggaggggtcgccgccgcagatcagcgacgagattttattgatatcgaatcaaaattcgcactacgcacaccagaagatacagcagaagatacatgccatcttatacccggggttgctgaatcggtcgctacttgccatttcaaccactcatctaaaacattcatggtgatccatggatggactgtgacaggaatgtatgaatcctgggtgcctaaactcgtcgcagctctctataagagggaaccagattccaatgtgattgtggtggattggctgtcaagagcccaggaacactatccagtgtcggctgggtatacaaaacttgtagggcaggatgtcgccagattcatcaactggatggaggaagaattcaattatccactagacaatgtccacctgcttggatattcattaggggcacacgctgccggaatcgcgggatcactcactaacaaaaaagtgaatcggattactgggctggatcctgccggaccaaatttcgaatatgcggaggcaccctcccgactctctcccgatgatgctgatttcgtggatgtactacacacatttacaagagggtctcctgggcgcagtattggaatccagaaaccagttggacacgtcgatatctatcctaacggaggaacgtttcagcctgggtgcaacataggagaggctattcgagtgattgccgagcgcgggcttggagatgttgatcagcttgttaagtgctcccacgaaagatctatacaccttttcatcgattctctactcaacgaagaaaacccatctaaagcttatcgctgttcatcaaaagaagcatttgaaaaagggttgtgcctgtcttgtagaaaaaataggtgcaataacctcgggtacgaaataaataaagttcgagctaaaaggtctagtaaaatgtacctgaaaactcgctctcagatgccatacaaagtcttccattatcaggtaaaaatacatttctctgggactgagtcagaaactcatacaaatcaagcatttgaaatatctctttatgggactgtagccgaatctgaaaacataccctttacactgcctgaagtgtccactaataagacatacagtttccttatctatacagaagtagatatcggagagcttctcatgctcaaactaaaatggaagtctgatagttatttcagttggtcagattggtggtcttctcctgggtttgccatacagaaaatccgagtgaaagcgggagagactcagaaaaaggttatcttttgttcccgagaaaaagtgtctcatctgcagaaaggaaaggcaccagctgtttttgtcaagtgtcacgataaatctctcaacaaaaaatcagga

SEQ ID NO: 15828 - DNA, 1425 bp, synthetic construct
  misc_feature 1..1425: note = source = /note="Description of Artificial Sequence: Synthetic coding sequence"
  source 1..1425: mol_type = other DNA
atggagagcaaagcacttcttgtgctgaccctcgccgtgtggcttcaatccctcacggcctccagaggtggagtcgccgcagcagaccagcgccgggactttatcgatatcgaatcgaaatttgcccttcgcacccccgaggataccgcagaagatacttgccatctgatccctggcgtcgcggagtcggtcgccacttgtcactttaaccactcctctaaaacttttatggtgatccatggatggactgtgaccggaatgtatgagtcgtgggtgcctaagttggtggcagcactgtacaaacgggaaccagactcgaacgtgattgtggtggactggctcagcagggcccaggaacattaccccgtctcggcaggttacactaagctggtgggacaggacgtggcccgtttcattaactggatggaggaggagtttaactatccgctggacaacgtgcatcttttgggatattccctgggagcacatgcagcaggcattgccgggagcctgactaacaagaaagtgaataggattaccgggctggatcccgcaggtcctaactttgaatacgcggaagcgccgagccgcctttcacctgacgatgccgattttgtggatgtgctgcataccttcactcgaggatcgcctgggagaagcattggaattcaaaagcctgtgggtcatgtggacatctacccaaacggtggcacctttcaacctggatgtaacatcggagaagcaatcagagtgattgcagagcggggccttggggatgtcgaccaactcgtcaaatgttctcacgagagatcgattcatttgtttattgatagcctgctgaacgaggaaaatccttcaaaggcatacagatgcagctccaaagaagcattcgagaagggactctgtcttagctgtcgaaagaaccgctgtaataacctgggatacgagatcaacaaggttagagcaaaaagatcgtccaaaatgtatcttaagacccgttcccagatgccttacaaggtctttcactaccaggtgaagatacacttctcaggtactgaatcggaaactcacaccaatcaggcctttgaaatctctctgtacggaactgtggccgaaagcgaaaacattccgtttacccttccagaagtgtcgactaacaagacgtactcctttctcatctacaccgaggtggatatcggcgaactcctcatgcttaagctgaaatggaagtccgattcctacttttcctggtcagattggtggtcctcaccagggttcgccatacaaaagatcagagtgaaggcaggggaaactcagaaaaaagtcatattctgtagccgggagaaggtgtcccatctgcaaaaggggaaggcacctgccgtgttcgtgaagtgtcatgacaagtcgctgaataagaagtcagga

SEQ ID NO: 15829 - DNA, 1425 bp, synthetic construct
  misc_feature 1..1425: note = source = /note="Description of Artificial Sequence: Synthetic coding sequence"
  source 1..1425: mol_type = other DNA
atggaatccaaagcgctgctggtcttgacgctggccgtgtggctgcagtcactgactgcctcccggggaggtgtcgcggccgctgaccagagacgggatttcattgacatcgagagcaagttcgccctccgaacgcccgaggacaccgcagaggacacctgccatctgatccctggtgtggcagagtcggttgccacctgtcatttcaaccacagctccaaaaccttcatggtgatccacggctggaccgtcaccggaatgtacgaatcatgggtgccgaaactcgtggcggctctctacaagcgcgaaccggatagcaacgtgattgtggtggactggctgagccgggcgcaggaacattaccccgtctcggctggatacactaagttggtcggacaggacgtcgcgagatttatcaattggatggaagaagagttcaactaccctctggataatgtgcacctgctgggatactcccttggagcccatgctgccggaatcgccggatcactgaccaacaagaaggtcaaccgcatcaccggcctcgatcctgcaggcccgaacttcgaatatgcggaagccccaagccgcctctcgccggatgatgccgacttcgtggacgtcttgcacacctttacccgcggatctccgggtcgctcgatcggtatccaaaagcccgtgggacacgtggatatctacccgaacggagggactttccagcctgggtgtaatatcggcgaggcaattcgtgtcatagcagaaaggggactgggggacgtggaccaactcgtcaagtgctcgcacgaaagatcgatccacctctttatcgactccctgctcaacgaagagaatccatcgaaggcctaccgctgctcatccaaggaggcattcgaaaagggcctctgcctgtcatgccggaagaatcggtgtaacaacctcggctatgaaatcaacaaagtcagagctaagcggtcctcgaaaatgtaccttaagactaggtcgcaaatgccgtacaaggtgttccactaccaggtgaaaatccacttcagtggcactgaaagcgagactcatactaatcaggcctttgagatctctctttacggaaccgtggctgaatcggaaaacatcccatttaccctgccagaagtgtccactaacaagacttacagctttctgatttacacggaggtggacatcggggagctgttgatgctgaaacttaagtggaagtcagatagctacttctcctggtccgattggtggtcatccccgggcttcgcgattcaaaagatcagggttaaggcaggggagactcagaaaaaagtgatcttctgcagccgcgagaaagtgtcgcatctccaaaagggaaaagcgccagccgtgttcgtgaagtgccacgacaagtcactgaataagaagtcggga

SEQ ID NO: 15830 - DNA, 1425 bp, synthetic construct
  misc_feature 1..1425: note = source = /note="Description of Artificial Sequence: Synthetic coding sequence"
  source 1..1425: mol_type = other DNA
atggaatcaaaggcactcctcgtgctcaccctcgcggtgtggctccagtccctcactgcctcaagagggggcgtggcggcagcggatcagcgccgcgacttcatcgacatcgagtcgaagtttgcactcagaaccccggaggacaccgccgaagatacttgccacctgattccgggcgtggctgagtcagtggccacttgtcatttcaaccattcgtcaaagaccttcatggtgatccatggctggaccgtgactggaatgtacgaatcctgggtgccaaagttggtggccgccctgtacaagcgcgaacccgattccaatgtgatcgtcgtggactggctgtccagagcacaagaacactaccctgtgtcagccggatacaccaagttggtcggccaagacgtggcgcgattcattaactggatggaggaagagttcaattaccctctggacaacgtgcatctcctgggatactccctcggagcacacgctgcgggaattgctggttcactgacgaataagaaggtgaaccggatcactggactggatccggctggacccaacttcgagtacgctgaggccccttctcggctgtctccagatgacgccgacttcgtggatgtcctgcacacctttactagaggatcaccggggcgaagcatcggaatccaaaagccggtgggacacgtcgacatctacccgaatggcggaactttccagcctggatgcaacatcggagaagccatcagagtcatcgcggagcgggggctcggagacgtcgatcagctggtgaagtgctcgcacgaaaggtccattcatctgtttatcgattcgctgctgaacgaagaaaatccatcgaaggcatacaggtgtagctccaaggaggcattcgaaaagggactctgcctgtcatgtcgcaagaacagatgtaacaatcttggttacgaaatcaataaggtccgcgcaaaaagaagctcgaagatgtaccttaagactagatcccagatgccgtataaagtgttccactaccaagtgaaaatccacttttcaggaacggagtccgagacgcacaccaaccaggccttcgagatttcgctgtacggaaccgtggccgagtctgagaatatcccgtttaccctgccggaagtgtccactaacaaaacctactcgttcctcatctacacggaagtggacatcggagagctgctcatgctgaaactgaaatggaaatccgatagctactttagttggagcgattggtggtcatccccgggcttcgcaatccagaagatccgggtcaaggccggcgaaactcaaaagaaggtgatcttctgctcccgggagaaggtgagccatctgcagaaggggaaggctccggcggtattcgtgaagtgtcacgataaatcgctcaacaagaaatcagga

SEQ ID NO: 15831 - DNA, 1425 bp, synthetic construct
  misc_feature 1..1425: note = source = /note="Description of Artificial Sequence: Synthetic coding sequence"
  source 1..1425: mol_type = other DNA
atggaatcgaaggcgcttctcgtgcttacccttgctgtgtggctgcaatcactcacggcatcccgtggtggtgtggccgcagcagatcagcgacgggatttcattgatatcgagtcgaaatttgcactgcgaaccccggaggacactgccgaggacacttgccacctgatacctggagtggccgagagcgtggccacttgccactttaaccattcctcgaaaaccttcatggttattcatggatggacggtgactggaatgtacgaatcctgggtgcctaaacttgtggcggcactttacaagcgtgaacccgactcaaacgtgattgtggtcgattggttgtcccgtgcgcaagaacattacccagtctccgccggctacaccaagctggttggccaagatgtcgctagattcataaactggatggaggaagagtttaactacccgctcgacaatgtgcatctgcttggctactcactcggcgcacacgcagctgggatcgcaggctcgctgactaacaagaaagttaaccgaataaccggtctggacccagcaggcccaaactttgaatacgcagaagcgccgtcacgactgtccccagatgatgctgatttcgtggatgtgctgcatacttttactcgcggtagccctggacgatcgatcgggatccaaaagcctgtgggacatgtggatatctacccaaatggtggaactttccaaccaggatgtaacattggggaggcaatccgtgtgatagcggaaagaggcctcggagatgtggatcaactggtgaagtgcagccacgagcgctcaattcacctgttcatcgactcccttcttaacgaagaaaatccgtcaaaggcatacagatgttcatccaaggaggcatttgaaaagggcctttgcctcagctgtcgaaaaaacagatgtaacaatctgggttacgagattaacaaagtccgggcaaaaagaagttcaaagatgtacctcaagacccgctcacaaatgccttacaaggtgttccattatcaggtgaaaatccatttctcgggcactgagtcagaaacccataccaaccaggcgtttgaaatctctctctatgggaccgtggccgaatcggagaatatcccttttactcttccagaagtctcgaccaataagacctacagcttcctgatctacaccgaagtagacatcggggaactgctgatgctgaagttgaagtggaagtcggatagctacttttcgtggtcagactggtggtcctcgccaggatttgccattcagaaaatacgggtgaaagccggcgaaacccagaagaaggtgatcttttgctcgagagaaaaagtctcgcatctgcagaaaggtaaggccccagcagtgtttgtcaagtgtcacgataaaagcctcaataagaaatctggt

SEQ ID NO: 15832 - DNA, 1425 bp, synthetic construct
  misc_feature 1..1425: note = source = /note="Description of Artificial Sequence: Synthetic coding sequence"
  source 1..1425: mol_type = other DNA
atggagtcaaaggcactcctggtcctgaccctggcggtgtggctccagtccctgaccgcgagccgcggcggagtggcagcggccgatcaacgccgggatttcattgacatcgaatcgaagtttgctctgcgaactccagaggacactgctgaagatacttgtcacctcatcccaggcgtggcagagtccgtggccacttgtcatttcaaccactcgagcaagactttcatggtgattcacgggtggaccgtgactggcatgtacgaatcctgggtgcctaagctggtggcagcgttgtacaagagagaaccggacagcaacgtcattgtggtggactggctgtcacgcgcgcaggagcactacccagtctctgcgggttacacgaagctggtggggcaggacgtggcaagatttatcaattggatggaagaagagttcaattacccgctggataatgtgcacctgctgggctactcgctgggagctcacgccgcggggattgccggatcactcactaataagaaggtcaatcggatcactggactcgacccggcaggcccaaacttcgagtacgcggaagcgccaagccggctgtccccggatgatgccgacttcgtggacgtcctgcacacgttcaccaggggatctccaggcaggtcgatcggtatccagaagccagtgggacatgtggatatctacccaaatgggggaacctttcaaccaggctgcaacatcggcgaagctataagagtaatcgccgaacggggcctgggagacgtggatcagctggtgaagtgttcccatgagcgcagcatccatctgtttatcgacagcctcctcaacgaagagaacccatccaaggcgtaccggtgctcaagcaaagaggccttcgagaagggactctgcttgtcctgccgcaagaaccgctgcaacaatttgggttacgagattaacaaggtgcgcgctaagcggagctcaaagatgtacctcaagaccaggtcgcagatgccatacaaagtgttccactaccaggttaagattcacttttccgggaccgagtcggagactcataccaaccaggcattcgagatctccctgtacggaactgtggcggagagcgaaaacattccattcaccctgccggaagtgtcgaccaacaaaacgtacagctttttgatctacaccgaagtggacatcggtgagctgctgatgcttaaactgaagtggaagtccgactcgtacttctcatggtcggattggtggtccagccctggatttgccatccagaagatccgcgtcaaggccggggaaacccagaagaaggtgattttctgcagccgggagaaagtgtcgcacctgcaaaaaggaaaagccccggccgtctttgtcaagtgtcacgacaagtccctgaacaagaaatccggc

SEQ ID NO: 15833 - DNA, 1425 bp, synthetic construct
  misc_feature 1..1425: note = source = /note="Description of Artificial Sequence: Synthetic coding sequence"
  source 1..1425: mol_type = other DNA
atggagtcaaaggcgctcttagtgttgacgctggcggtgtggctgcagtccctgacggcttcccggggcggcgtggctgcggctgaccagcgccgggattttattgacattgagagtaaatttgctctgcggaccccggaggacacggcggaagacacctgccacttgattccaggagtggctgagtcagtggccacttgccattttaaccactctagcaagacatttatggtgattcacggctggactgtgaccggaatgtacgagtcctgggtgcccaagttagttgctgccctatataaaagggagcctgacagtaatgttatagtggttgattggctgtctcgggcccaggagcattaccccgtctccgcgggttataccaaacttgtagggcaggacgtagccagatttatcaactggatggaggaggagttcaactacccgttggataatgttcatctactgggctattccctgggcgcccacgcagcgggtatcgcgggcagtttaaccaacaaaaaagtgaaccgcattacgggtcttgaccccgccggcccgaacttcgagtacgcagaagccccctctcgattgagtcccgacgacgccgatttcgtggatgtcctgcacacctttacaagaggaagtcctggcaggagcataggtatacagaagcccgtgggccacgtggacatctatcccaatggcggtaccttccagccaggatgcaacataggagaggcgatacgcgtgattgcagagaggggactaggcgatgtggatcagttagtgaagtgctctcacgagcgttctattcatctgtttatcgattccctcctcaacgaggaaaatccgagcaaagcctatagatgcagctcaaaagaagcgttcgaaaaggggctctgtctaagttgcagaaagaatcgctgtaataacctagggtacgagatcaacaaagtcagagctaagagatcgagtaagatgtacctgaagactaggtctcagatgccatacaaagtatttcattatcaggtgaagattcacttctccggaaccgagtccgaaactcacactaatcaggcattcgaaatttcactttacgggaccgttgctgagagtgagaacatcccgtttacattaccagaagtgtccacaaacaagacatactcattccttatctatacagaagttgacataggagagctcctgatgttaaaactgaagtggaagagcgacagctacttttcttggtccgattggtggtcttctcctggcttcgccattcagaaaatcagagtgaaggctggggagacgcagaagaaagtcatcttctgttcgcgggaaaaggtgtcacacctccagaagggaaaagcaccagccgtatttgttaaatgccacgacaagtccctgaacaagaagagcggc

SEQ ID NO: 15834 - DNA, 1425 bp, synthetic construct; identical to SEQ ID NO: 15788
  misc_feature 1..1425: note = source = /note="Description of Artificial Sequence: Synthetic coding sequence"
  source 1..1425: mol_type = other DNA

SEQ ID NO: 15835 - DNA, 1425 bp, synthetic construct
  misc_feature 1..1425: note = source = /note="Description of Artificial Sequence: Synthetic coding sequence"
  source 1..1425: mol_type = other DNA
atggagtcaaaagccctgctggtgctgactctggcggtgtggctgcaatcgctgaccgcctcgaggggcggagtggccgcggcggaccagaggagggatttcatcgacatcgaaagcaagttcgctctccgcacgccggaggacactgcggaagatacctgtcatctcatcccaggcgtggcggagtcggtcgctacctgccacttcaaccatagctccaaaactttcatggtgatccacggatggacggtgaccggaatgtacgagtcgtgggtaccaaaactcgtcgcggccctgtacaaacgcgagccggattctaatgtgattgttgtggattggctgagccgcgcccaggaacattacccggtgtcagctggttacaccaaactggtgggtcaagatgtggcgcggttcattaactggatggaagaggaattcaattacccgctggacaacgtgcacctcctgggttattcgctcggagcccacgccgccggaatcgcgggtagcctgaccaataagaaggtcaatcgcatcaccggactcgatcctgcaggacccaactttgaatacgccgaggcaccgtcacgcctctcaccggatgacgctgactttgtggatgtacttcacaccttcactaggggctcccctggtagatcaatcggaattcagaagccagtcgggcacgtcgatatctatcctaatggtgggactttccagccggggtgtaacatcggggaagcaatcagagtgatagcggagaggggactcggagacgtggatcaactggtgaaatgctcccacgaacgaagcatccatctgtttatcgactcgttgcttaacgaagaaaacccatcgaaggcataccgctgctcctcaaaggaggcattcgaaaagggcctttgtctgtcatgccgcaaaaaccggtgcaataacctgggatatgagatcaataaagtccgcgccaagcgctcctctaagatgtacctcaagacgagatcacagatgccgtacaaagtgtttcattaccaagtgaaaatccatttcagcggtactgagtccgaaactcacaccaaccaggctttcgaaattagcctttatggaaccgtggccgaatcggagaatatccctttcactctgcccgaagtcagcactaacaagacctactccttcctcatatacactgaagtggacatcggagagctgctgatgctcaaactgaaatggaagtccgacagctacttctcgtggtcggattggtggagcagcccgggctttgcgatccagaagattcgagttaaagctggcgaaactcaaaagaaggtgatcttctgctcgcgcgagaaggtgagccacctgcagaaaggaaaggccccagcagtgttcgtgaaatgccacgacaagagcttgaacaaaaagtcggga

SEQ ID NO: 15836 - DNA, 1425 bp, synthetic construct
  misc_feature 1..1425: note = source = /note="Description of Artificial Sequence: Synthetic coding sequence"
  source 1..1425: mol_type = other DNA
atggagtctaaagcactcttggtgcttaccctggctgtatggctccagagtctgaccgcatccaggggtggggtggccgctgccgatcagcgccgcgacttcattgacattgagagcaaattcgccctgaggacgcccgaagacactgctgaggacacgtgtcacctcattccaggggtggctgaatccgtcgccacttgtcatttcaaccattcatcaaagacttttatggtgattcacgggtggaccgttactggaatgtacgaatcttgggtgcctaaactggtggccgctttgtataagagagaacccgatagtaatgtcatcgtcgtagattggctcagtagggctcaagaacactatcccgtgagcgccggatacacgaagctggttgggcaggacgtggcacgatttattaattggatggaggaagaattcaattatcccctggacaacgtgcacttgcttggatatagtcttggcgctcatgctgccgggatcgccgggtcactgactaacaaaaaagtaaatcggatcaccgggcttgatcccgcaggacccaacttcgaatatgcggaggcaccctcaagactgagcccggatgatgctgattttgtggacgtgctgcatactttcacccggggttcaccgggacggtctatcggcatccagaaaccagttggacatgtggacatctaccctaacggcgggacctttcagccgggctgcaacataggcgaggctatcagagtgatcgccgagcgaggactgggagatgtggatcaactcgtgaagtgtagccatgagcggagcattcacttgttcatcgactccctcctgaacgaagagaatccaagcaaagcctatcggtgctccagtaaagaagcttttgagaagggcctctgcctctcttgtagaaagaacagatgtaataaccttgggtacgagattaataaggtgagagccaagaggagcagtaagatgtacctcaagacacggagccagatgccctacaaagtgtttcattaccaggtcaaaatacactttagcggcacggagagcgaaactcatacgaaccaggcattcgagatatctctctatgggactgtggctgaaagtgagaatatcccgttcaccttgccagaggtgtcaactaataagacctattcctttctgatctacaccgaggttgatataggcgaattgctcatgttgaaactgaaatggaagtctgattcatacttttcttggagtgactggtggtctagcccggggttcgccatccagaagatccgcgtcaaagctggggaaacccagaagaaagttattttctgttcccgggaaaaggtgtcacacctgcagaaaggaaaagcacccgcagtgtttgtgaagtgtcacgataaaagcctgaacaagaagtccggt

SEQ ID NO: 15837 - DNA, 1425 bp, synthetic construct
  misc_feature 1..1425: note = source = /note="Description of Artificial Sequence: Synthetic coding sequence"
  source 1..1425: mol_type = other DNA
atggagtcgaaggcccttctggtgctcacgctggccgtctggctccagtctctgaccgcatcccgcggcggggtggccgcagccgaccagcggcgagattttatcgacatcgagtctaagtttgccctccggactccagaagataccgcagaggacacctgccaccttatccccggagtggccgaaagcgtggccacctgccactttaatcactcatctaaaacttttatggttattcacggctggacagtgacagggatgtacgaatcctgggtccctaaactggtggccgccctctacaagcgcgagcctgacagcaatgttatcgtggtcgattggttgtcgcgggcccaggaacactaccctgtgtctgcagggtatacgaaactggtgggacaggacgtagcccgcttcattaactggatggaggaggagtttaattaccccttagacaacgtacacctccttggttattcattgggcgcacacgccgccgggattgccggaagcctgacaaacaagaaggtgaatcggattacggggctggaccccgctgggcctaattttgagtacgcagaggccccctctcgcctctctcctgatgacgcagattttgttgatgttttacacactttcactagagggtccccagggaggtctatcgggatccaaaaacccgttggtcacgtagacatttatcccaacggggggactttccagcccggatgcaacattggtgaggccatccgggtgatcgcggagaggggtctcggagatgttgaccagctcgtgaagtgctcccacgagaggtctatccacctgtttatcgacagtctgctaaatgaggaaaacccaagcaaagcttaccggtgtagttccaaggaagcctttgagaaaggattgtgtctgagctgtcgtaagaatagatgcaataatttaggctatgagattaataaagtgagagcgaagcggagcagcaaaatgtacctgaagacccggtctcaaatgccctacaaggtctttcattatcaggtgaaaatccacttctccggcaccgaatcggagacgcatacgaatcaagcctttgagatttccctatatgggacagtagccgaatccgaaaatataccattcacactgccggaggtgtcaactaataaaacctattcatttttgatctacaccgaggttgatattggcgagcttctgatgcttaaactaaaatggaaaagtgactcctacttttcttggtcagactggtggagttctccgggcttcgccatccagaagatccgggtaaaggctggcgagactcagaaaaaggtgatcttttgctcccgcgagaaagtgagtcatctgcaaaaggggaaggcccccgcggtgttcgtgaaatgccacgataagagcttgaataagaagtctggc

SEQ ID NO: 15838 - DNA, 1425 bp, synthetic construct
  misc_feature 1..1425: note = source = /note="Description of Artificial Sequence: Synthetic coding sequence"
  source 1..1425: mol_type = other DNA
atggaatcgaaggcactgttggtgctgaccctggcagtgtggcttcagtcactcacggcctccagaggtggtgtggcagcagccgatcaacggagggatttcatagacatcgaatcgaaattcgccctgagaacccccgaggacaccgcagaagatacgtgtcatcttatacctggtgtggcagaaagcgtcgccacctgtcactttaaccattcgtcgaaaacttttatggtgattcatggctggaccgtgaccgggatgtacgaatcatgggtgcccaaacttgtggctgctctttacaagcgggaacctgattccaacgttatcgtggtcgactggctctcacgcgctcaggaacattaccctgtgtcagcagggtacaccaaacttgtcgggcaggatgtggcacgctttatcaactggatggaagaggagttcaactacccattggataacgttcatctgcttggatacagcttgggtgcacacgcagcgggaattgctgggagtcttactaacaagaaggtcaacagaattaccgggctcgatcccgcaggccctaatttcgaatacgcagaggcaccttcacgactgagtccagatgatgcagactttgtggacgtcctgcacacttttactcgggggtcacctggtagatccatcggcatccaaaagccagtggggcacgtagacatataccccaatggcggaaccttccagcccggctgtaatatcggtgaggcaataagagtgatcgcagagcgtggactgggtgacgtcgaccagctcgtgaaatgcagccatgaaagatccattcatctctttattgattcccttctgaatgaagaaaacccgtccaaagcatatcgatgttcaagcaaagaggcgtttgaaaagggcctctgtctgtcctgccggaagaatagatgtaacaatcttgggtacgagattaacaaggtgagagcaaagagaagctcgaagatgtacctcaagactcgctcccagatgccttacaaggtttttcactaccaagtgaaaatccacttctcaggaaccgagtccgagactcataccaaccaagcctttgagattagcctgtacggaacggtggccgaatccgaaaacattcctttcaccctccccgaggtgtcaactaacaagacgtactccttccttatctacacggaagtggatattggcgaactcctgatgctgaaacttaaatggaagtccgactcgtactttagctggtcggattggtggagctcaccagggtttgccattcaaaagatccgggttaaggcgggagagactcaaaagaaggtcatcttttgctcacgcgaaaaagtgagccatcttcaaaagggaaaagcaccagcagtgttcgtgaagtgtcatgacaagtcacttaacaaaaagtccggg

SEQ ID NO: 15839 - DNA, 1425 bp, synthetic construct
  misc_feature 1..1425: note = source = /note="Description of Artificial Sequence: Synthetic coding sequence"
  source 1..1425: mol_type = other DNA
atggaaagcaaggcgttgctggtccttacccttgcagtgtggctccaaagtctgaccgcatcgcgtggaggagtggccgctgccgatcaacgccgtgatttcatagacattgaaagcaaattcgcgcttcgcacgcctgaagataccgccgaggatacttgtcatcttattccaggagtcgcagaaagtgtggccacctgtcactttaaccactcatcgaaaactttcatggtgatacacggatggactgtgaccggtatgtacgaatcatgggtccctaaacttgttgccgctctctataagcgggagcctgactcgaacgtgattgtcgtcgactggctgagtcgcgcacaggaacattaccccgtgtctgcggggtatactaagttggtgggacaagatgtggcacggtttatcaattggatggaggaagagttcaattacccactggataacgtgcatctcctgggatattcgttgggggcacatgccgcaggcattgctggatccttgactaacaagaaggtgaatagaattaccggtcttgacccagcaggtcccaactttgaatacgctgaggcaccgtccaggttgtcaccggacgatgctgatttcgttgatgtcttgcacaccttcacccgtggctcgcccggacggagcatcggtatacagaagccagtggggcatgtggatatctaccctaatggtggcacttttcaacctggatgcaatatcggggaagctattcgtgtgatcgcagagcgaggacttggggatgttgatcaacttgtgaagtgtagccatgagcgctcgatacacttgtttatcgattcacttctgaacgaagagaacccttccaaggcctacaggtgctcctcaaaggaagcatttgagaagggcctctgtctgtcctgtcgtaagaataggtgtaacaacctgggttacgagatcaataaagttagagcaaaacggtcctcgaagatgtacctgaaaactagatctcagatgccttacaaggtctttcattaccaagttaagattcattttagcggaaccgaatccgaaactcataccaaccaggcatttgaaatttccctttacggtaccgtggcggagagcgaaaacataccatttactcttcccgaagtgtccaccaataagacttacagctttctgatttacactgaagtcgacatcggagaacttctgatgctcaaactcaagtggaagtccgactcgtacttttcgtggtctgattggtggtcgtcgccaggattcgcgatacagaagattagagtgaaagcaggggaaacgcaaaagaaggtaatcttttgctcgagagagaaggtgtcacatctgcagaagggaaaggcgccagccgtgttcgtgaaatgccacgacaagtcgctgaacaaaaagtcaggc

SEQ ID NO: 15840 - DNA, 1425 bp, synthetic construct
  misc_feature 1..1425: note = source = /note="Description of Artificial Sequence: Synthetic coding sequence"
  source 1..1425: mol_type = other DNA
atggaaagtaaagctcttcttgtgctgactctggcagtctggttgcaatctctaacagcttcccgaggaggagttgcggctgctgatcaacggcgggatttcattgacatcgagtcgaaattcgctttacggacgccagaagacaccgctgaagatacttgccaccttataccaggtgttgcagaatcggttgccacctgtcacttcaatcattcctctaagacttttatggtaatacatggatggacagttactgggatgtatgagagctgggtgccgaaattagtcgctgccctatacaaacgtgaaccggactcgaacgttattgttgtggactggctgtcacgagctcaggaacactacccggtttctgcgggatatacaaagttggttggacaggacgtggcacgattcattaattggatggaagaagaattcaattatccgttggataatgtccacctcttgggatattctttgggagcccatgccgctggtatcgcgggatctctcacaaacaaaaaggttaaccgaataactggtctggacccagcaggtccgaactttgaatatgcggaggctccgagtcggttatctccagatgatgccgatttcgtcgatgtgcttcatacttttacccgaggatcaccaggccgaagtatcggaattcagaaacccgtcggacacgtagatatctatccaaacggagggacttttcaaccgggatgtaatattggggaagcgatccgagttattgccgaaaggggactcggcgatgtcgatcaattagtcaagtgttctcatgagcggagcatccatcttttcatcgattctttattgaacgaagagaacccgtcgaaagcttaccgttgttcatccaaagaagctttcgaaaaaggactttgcctttcatgccgcaagaaccgctgcaataatttgggttacgaaatcaacaaagttcgagcaaaacgatcctctaagatgtatcttaagacaagatctcaaatgccatacaaagtgtttcactatcaagtgaaaattcactttagtggtactgaatctgagacccatacaaaccaagcctttgagatttctctgtatggtacagttgcagaatctgagaatattccattcacattgcctgaggtatcgactaataaaacatactcattcctgatatataccgaggtggatataggagaactgctaatgttgaaattgaagtggaagtcagactcgtatttttcatggtcagattggtggtctagtccaggcttcgccatccaaaaaattagagttaaagcgggcgagacacagaaaaaagtcattttctgttctagggaaaaagtctcacacctccaaaaagggaaggctccagctgtgtttgtgaaatgccatgacaaatcactgaataagaaatcgggt

SEQ ID NO: 15841 - DNA, 1425 bp, synthetic construct
  misc_feature 1..1425: note = source = /note="Description of Artificial Sequence: Synthetic coding sequence"
  source 1..1425: mol_type = other DNA
atggagagcaaggctctgctcgtgctcactctggccgtgtggctgcagtcactgaccgcctcgcgtggaggagtggcagctgcggaccaacggcgggacttcattgatatcgagtctaagttcgctctgcgcaccccggaggacactgccgaggacacctgtcacctcatcccgggagtcgcagagtccgtggctacctgccatttcaaccactcatccaagacttttatggtcatccacggctggaccgtgactggaatgtacgaatcctgggtaccaaaactggtggcagccttgtataaacgcgaacctgactccaacgtcatcgtcgtcgactggctttcaagagcacaggagcactacccggtcagtgcgggatacactaaactcgttggacaggacgtcgcccggtttatcaattggatggaggaggagttcaattacccactggataacgtccatctgctcgggtatagcctgggggcccatgcggccggcatcgcgggaagcctgaccaacaagaaggtgaaccgcatcactggactggacccagcaggtccgaactttgagtacgccgaggcgccctctcggctttcgcccgacgacgcagattttgtcgatgtgctgcataccttcaccagaggttcacctggaagatcgatcggaatccaaaaacccgtgggacacgtggacatctacccaaacggtggaactttccagccgggatgcaacattggcgaggcaatccgggtgatcgcggaaagagggctgggagacgtggaccaactggtgaaatgttcacacgaaaggtcaatccatctgttcattgatagcctcctcaatgaagaaaatccgtccaaagcctacagatgctcgtcgaaggaggcctttgagaagggactgtgcctgtcttgccggaaaaaccgatgcaacaatctcgggtacgagattaacaaggtgcgggccaagcggtcgtcaaagatgtacctcaagacgagatcccaaatgccgtacaaggtctttcactaccaggtcaagattcatttcagtggcaccgaaagcgaaacgcacaccaaccaggcgtttgagatctcactgtacgggactgtggccgagtcagaaaacatcccgtttactttgccggaagtctccaccaacaaaacctactccttcctcatttacactgaggtcgacatcggggaactcctcatgctcaagctcaagtggaagtcggattcctacttcagctggagcgactggtggtcctcacctggattcgctatccagaagatccgagtgaaagccggtgaaacccagaagaaggtgatcttctgcagccgcgaaaaggtgtcccatctccaaaagggaaaggccccagctgtgtttgtgaagtgtcacgacaagtcgctgaacaagaaaagtggc

SEQ ID NO: 15842 - DNA, 1425 bp, synthetic construct
  misc_feature 1..1425: note = source = /note="Description of Artificial Sequence: Synthetic coding sequence"
  source 1..1425: mol_type = other DNA
atggaatctaaagcacttttggttcttactcttgctgtttggttacaaagtttaacagcatctagaggaggtgtagcagcagctgatcaaagaagagatttcattgatattgaatctaaatttgctttaagaacaccagaagatactgctgaggatacttgccatttgattccaggagttgctgaaagtgtagcaacttgtcattttaatcattcatctaaaacttttatggttattcatggttggactgtaactggaatgtatgaatcatgggtacctaaattagtagcagctttatataaacgagaacctgattctaacgttattgttgtagattggttatcaagagctcaagaacattatccagtttctgcaggatatacaaaattagttggacaagatgtagcaagatttattaattggatggaagaagaatttaattatccacttgataatgttcatttattaggatattcattgggagctcacgctgctgggattgctggatctcttacgaataaaaaagttaatcgtattactggattagatccagcaggacctaattttgaatatgcagaagctccatcaagactttctccagatgatgctgatttcgttgatgttcttcatactttcactagaggatctccaggacgatctattggaatccaaaagccagttggacatgtagatatttatccaaatggaggaacatttcagccaggttgtaatattggagaagcaattagagtcatagcagaaagaggtttaggtgatgtcgatcaacttgttaaatgttcccatgaaagaagtattcatttattcattgattcacttttaaatgaagaaaatccatcaaaagcatatagatgttcttcaaaagaagctttcgaaaaagggctttgtttatcatgtagaaaaaatagatgtaataatttaggttatgagataaataaagttagagctaaaaggagttcaaaaatgtatttaaagacaagatcacaaatgccatataaagtttttcattatcaagtaaaaattcacttttcaggaacagaatcagaaactcatactaatcaagctttcgaaatttcattgtacggaacagttgcagaatcagaaaatattccttttaccttaccagaagttagtactaacaagacatattcatttttaatttatactgaagttgacattggagaattattgatgttaaaattaaaatggaaatctgattcttacttttcatggtcagattggtggtctagtccaggatttgcaattcaaaaaattagagtgaaggcaggtgagactcaaaaaaaggttattttttgttctagagaaaaggtttcacatcttcaaaaaggaaaagcaccagctgtttttgtaaagtgtcatgataaaagtcttaataaaaaatcagga

SEQ ID NO: 15843 - DNA, 1425 bp, synthetic construct
  misc_feature 1..1425: note = source = /note="Description of Artificial Sequence: Synthetic coding sequence"
  source 1..1425: mol_type = other DNA
atggagagcaaagctctcctcgtcttgacacttgctgtgtggttacagtccctcactgcaagcagaggaggcgtggcagcagctgatcagagacgggatttcattgacattgaaagcaagttcgcactaaggacgcccgaagacactgcagaggatacctgccacctgatcccaggcgtggcagagtccgtggcaacctgccacttcaaccacagtagcaaaaccttcatggtgatccacggttggacagtaacagggatgtatgaatcctgggttcccaagctcgtcgctgccctttataaaagagagccagactctaatgttatcgttgttgactggctttcgcgcgcgcaggagcattaccccgtttcagccgggtatactaagctcgtgggccaagatgtggctcgatttataaactggatggaggaagagttcaattatcccctggacaacgtgcatctactgggctactcactcggggcgcatgctgcagggatcgccggcagtctgacgaataagaaggtcaaccgcattaccggcctcgatccagcaggtcctaattttgaatatgcagaggccccctctcgattgtccccagatgacgctgacttcgtagatgtcctgcatacattcaccagaggttcacctggaagatctattggcattcagaagcctgtaggccacgtggatatataccctaatggcggaacattccagcccgggtgtaacatcggcgaggccatccgcgtgatcgccgaaagggggttaggggacgttgaccaactggttaagtgttcccacgaacggtcaatccacctgtttatcgattcgctgttgaacgaagaaaatccttctaaggcatacagatgctcaagcaaggaagcattcgaaaagggtctatgcctgtcttgccgcaagaatcggtgtaataatctaggatacgagatcaacaaggttcgtgcaaagagaagctcaaagatgtacctgaagacaaggagtcagatgccatacaaggtctttcactatcaggtgaagattcacttctcgggcaccgagtccgagactcataccaaccaagccttcgagataagcttatatgggacagtagctgaaagcgaaaacatcccattcactttgcctgaagtgtctaccaacaagacttattcttttctgatctataccgaggtcgatattggggagctgttgatgctgaagttgaagtggaaatcagactcctacttcagctggtccgactggtggagctcgccagggtttgcaattcaaaagatccgcgttaaggcaggagaaacccaaaagaaggtaatcttttgttctagggaaaaagtttctcatctgcagaaggggaaggcccccgccgtgtttgtgaagtgccatgacaaatcactgaacaagaaaagtggc

SEQ ID NO: 15844 - DNA, 1425 bp, synthetic construct
  misc_feature 1..1425: note = source = /note="Description of Artificial Sequence: Synthetic coding sequence"
  source 1..1425: mol_type = other DNA
atggagagcaaggctttactggttttgacgctggccgtctggttgcagtccctcacagctagccgcggtggcgtcgctgccgccgatcagaggcgcgatttcatagatatcgaatcgaagtttgcattacgaacgccagaagataccgcggaggatacatgtcatctgatcccaggggtggcggagtccgtggccacatgccactttaaccattctagcaaaaccttcatggttatccacggctggacggttaccggaatgtacgagtcatgggtgccgaaattggtggccgctttatacaagcgcgaaccggactcgaatgtgattgtggtggactggttgtcgagagctcaggaacactacccagtttcagcaggctacaccaagttggtgggacaggatgtggcccgctttatcaactggatggaggaagagttcaactatccactggataacgtacacctgctgggttacagcttgggcgcccacgccgccggaattgcgggtagcctgaccaacaagaaagtaaataggattacaggcttggaccccgctggaccgaacttcgagtacgccgaagccccaagcagactttcgcccgacgacgctgattttgtggacgttttgcacactttcactcgcggatcaccgggaaggagcatcggaatacagaagcctgttggccatgtggatatttaccccaacggaggcacctttcaaccaggctgcaatatcggtgaggcaattcgcgtaatagcggaacgaggactgggcgatgtggatcagttggtgaagtgttctcatgagcgtagcatacacctgttcatcgacagccttttgaatgaagagaacccgtcgaaggcctatcgatgctcctcgaaggaggcatttgagaagggactctgcctgagttgccgcaagaacagatgcaataacttaggctacgaaattaacaaggtacgggcgaaacgtagcagcaagatgtaccttaagacgcgcagccagatgccctataaggtgttccattaccaggtgaagatacactttagcggaaccgagtctgagactcatacgaaccaagcctttgagatttccctgtacggaacagtagctgagtccgaaaacatccccttcaccctgccagaggtctcaacgaataaaacatacagttttctgatttatacggaggtggatatcggagagctcttgatgctgaagttgaagtggaagtcagactcctatttctcgtggtccgactggtggagttcaccgggctttgccatccagaagatccgtgtgaaggccggcgagacgcagaagaaggttattttctgcagtcgcgagaaggtatctcacctacagaaaggaaaagccccagcagttttcgttaaatgccatgataagtcccttaacaagaaatccggc

SEQ ID NO: 15845 - DNA, 1425 bp, synthetic construct
  misc_feature 1..1425: note = source = /note="Description of Artificial Sequence: Synthetic coding sequence"
  source 1..1425: mol_type = other DNA
atggaatctaaagccttgctcgtccttaccctagcagtgtggctccagtccctcacggcctctcgcggaggggtggctgcagccgaccagaggcgcgacttcattgacattgaatccaagtttgcgctgaggacaccggaggacacggccgaggacacctgtcacctcattcccggcgtcgctgagagcgtcgccacttgccatttcaaccactcctctaagacattcatggtgattcacgggtggaccgtgaccggcatgtacgagtcttgggtgcccaaactggtggctgccctatacaaacgcgagcccgattccaacgttatcgttgttgactggttatctagagcacaagagcactacccagtatcggcaggttacactaaactggtcggacaggatgtagctagattcatcaattggatggaggaggaattcaattatcccctggataacgtacacctgctgggttatagccttggagctcacgccgctgggatagcaggctctctgacgaataaaaaagtgaatcggattactggtctagatccggcaggacccaatttcgagtacgcagaggctccctctcgcctttctccagacgacgccgactttgtcgacgttctccatacatttacaagggggtcccccgggagaagcataggcatacagaaacccgttgggcatgtcgacatttatcccaacggtggcactttccagcctggctgcaacattggcgaagcaatcagggtcattgccgaaagggggttgggggacgtcgaccagctagtgaaatgcagccatgagaggagcatccacctcttcattgattcactgctgaacgaagagaatccgtcaaaggcttatcgttgttcatcaaaagaagcatttgagaagggcttgtgcttgagctgtcggaagaacagatgcaataacctgggatatgaaattaacaaggtcagggctaaaagaagctccaaaatgtacctcaagaccaggagccagatgccttataaagtatttcactaccaggttaaaattcacttctcaggcactgagagtgagacccacactaatcaggcctttgaaatatccctgtatggaaccgttgctgaatctgagaacatccccttcacactgccagaggtatccacaaataaaacgtatagctttctcatttataccgaagtcgacattggcgaactcctgatgttgaagctgaaatggaaaagcgattcgtacttcagctggtccgactggtggagctcaccaggatttgccattcagaaaatccgtgtgaaggcaggggagacacagaagaaggtaattttctgctcacgggaaaaagtctctcacctccagaaaggtaaggctcctgccgtgttcgtgaaatgccatgataaatcactcaataagaagagcggg

SEQ ID NO: 15846 - DNA, 1425 bp, synthetic construct
  misc_feature 1..1425: note = source = /note="Description of Artificial Sequence: Synthetic coding sequence"
  source 1..1425: mol_type = other DNA
atggaatccaaggccctcctagtgctgacactggcagtgtggctacagtcactgacggcgagcagagggggtgtggccgccgcagatcagcggagagactttatcgacatcgaatctaaattcgctctgcggacacctgaagataccgccgaagacacatgccacttgatacctggggtagctgaatctgtggcaacctgccattttaatcactcctcaaagacgttcatggtcatccacggatggacagtaactggtatgtacgagagctgggtgcctaaactcgtggcagccctgtacaaaagagagccggactccaacgtcatcgtagtagattggctctctagagcccaggagcactacccagtaagcgccggatataccaagctggttgggcaggatgtcgcaagattcattaactggatggaggaggaatttaattacccactcgataatgtgcatctgctagggtatagtctgggggcccatgccgccggtatcgctggctccttgactaacaagaaggtgaataggatcactggcttggatcctgccggacccaatttcgaatacgcggaggcaccaagtcggctatcccccgacgatgcggactttgtggacgtgctccacacctttaccagaggatcccctggcagatccataggcattcaaaaacccgtgggacacgtagatatatatccaaacgggggcactttccagcctggttgcaatattggggaagccatccgcgtcatcgccgagcgcggtttaggagacgtggatcagctggtgaagtgcagccacgaacgctcgatccatctattcatcgatagtctgctgaatgaggagaacccctctaaggcctataggtgctcttccaaggaagcctttgagaaaggcctgtgtctttcctgtagaaagaaccggtgcaataatctgggttatgaaataaacaaggtgagagccaagagatccagcaaaatgtatctcaagactcggagccagatgccatacaaggttttccattatcaggtcaagattcacttttcagggaccgagtccgagacgcatacgaatcaagcttttgagataagtctgtatgggaccgttgccgagtccgaaaacattccttttaccctacccgaagtgtccacgaacaaaacgtactccttcctcatctatacagaagtagacataggggagctgctaatgctgaagctgaagtggaaatccgacagttacttctcatggtccgattggtggtcctctcctgggtttgcgatacaaaaaataagggttaaggccggcgaaactcagaagaaagttatattttgttcgcgcgagaaagtgtcacacttgcagaaagggaaggcaccagcggtttttgttaaatgccatgataaaagcctcaacaaaaagtccggc

SEQ ID NO: 15847 - DNA, 1425 bp, synthetic construct
  misc_feature 1..1425: note = source = /note="Description of Artificial Sequence: Synthetic coding sequence"
  source 1..1425: mol_type = other DNA
atggagagcaaggcgctcctcgtcctgactcttgcggtgtggctgcagagcctgaccgctagcaggggcggtgtggccgcagcggatcaaagaagagactttatcgacattgagtcgaagttcgcgctgcgtaccccggaggacacggccgaggacacttgccatctgatcccaggagttgccgaatcagtcgccacttgccacttcaaccattcgagcaagaccttcatggtcattcacggatggactgtcaccggaatgtacgagtcgtgggtgccaaaacttgtggcagcactgtacaaacgggagccagattcaaacgtgatcgtggtggactggctgtcgagggcccaagaacactacccagtgtccgcgggatacacgaagctggtggggcaagatgtggccaggttcatcaattggatggaggaggaattcaactacccgctcgacaacgtgcatcttttgggatactcgctgggagctcatgcagctggaattgcgggttcgctgaccaacaagaaagtcaacaggatcaccgggctggatccggccggacccaatttcgaatatgcagaagcaccatctcggctctccccagacgatgccgactttgtggacgtgctgcacacgtttactcggggaagtccgggtcggagcatcggaatccagaagccggtgggacatgttgacatctaccctaacggcggaactttccagccgggttgcaatattggagaggcgatcagagtgatcgccgaaagaggactcggagacgtggaccagcttgtgaaatgtagccacgaaaggtccatccacctgttcatcgactcactgctgaatgaggaaaaccctagcaaggcataccgctgctccagcaaggaggccttcgagaagggcctgtgcctgagctgccggaaaaatcgttgtaacaatctgggatacgaaatcaacaaggtccgagctaagagatcgtcaaaaatgtacctcaaaacccggtcgcagatgccttacaaggtctttcactaccaggtcaaaatacatttctcaggtaccgagtcagaaacccacactaaccaggcttttgaaatctccctgtacggtacggtggcggagtcggagaacatccctttcaccctgcccgaagttagcactaacaaaacttattctttcctgatctacactgaggtggacatcggagagctcttgatgctgaaattgaaatggaagagcgactcgtacttttcctggagtgattggtggagctcaccgggattcgcaatccaaaagatcagggtcaaggcaggcgaaacccagaaaaaggtgatcttttgctcccgggaaaaggtgtcgcacctccaaaaggggaaggctcctgcggtgtttgtgaagtgtcatgacaaatccctcaacaagaagagcgga

SEQ ID NO: 15848 - DNA, 1425 bp, synthetic construct
  misc_feature 1..1425: note = source = /note="Description of Artificial Sequence: Synthetic coding sequence"
  source 1..1425: mol_type = other DNA
atggagtcgaaggcgcttctggtgctgactctggcagtgtggctgcagtcactgaccgcatcacgcggcggagtcgccgcagcggaccagcggcgcgacttcattgacatcgagtcgaagtttgccttgaggactccagaggacactgcagaggatacttgtcacctgatcccgggagtggcggagtccgtggccacgtgccactttaaccattcgtccaagacctttatggtgatccacggatggactgtgaccggaatgtacgagagctgggtgccgaagttggtcgcggcgctgtacaagagggaaccagatagcaacgtgatcgtggtggattggctgtcgcgggcccaagagcactacccggtgtcggcggggtacactaaactggtgggacaggacgtcgcaaggttcatcaattggatggaggaagaattcaattaccctctggacaatgttcacctcctgggctactcgcttggagcgcacgcagcgggtatcgccggatcactcactaacaagaaggtcaaccgcatcactggactggatcctgccgggccgaatttcgagtacgccgaagcaccaagcaggctgtcgccagatgacgctgacttcgtggacgtgctgcataccttcacccgcggatcaccggggcggtcgatcgggatccaaaaacctgtcggccacgtggatatctatcctaacggagggacctttcagccaggctgtaatatcggggaggccatccgggtgatcgcggaacgcggactcggagatgtcgaccaactggtgaagtgctcacacgagaggagcatccacctgttcattgacagccttctgaacgaggaaaatccgtcgaaggcgtatcgctgttcttcaaaggaggcgttcgagaaaggactctgcctgtcctgccgcaagaacaggtgcaataacctgggttacgagatcaataaagtcagagccaaacggtcaagcaagatgtacctcaagacccgctcccagatgccttataaggtgttccactatcaggtgaagatccatttctcgggaaccgagtcagaaacgcataccaatcaggcgtttgaaatctcgctgtacggcacggtggctgaatcggagaatatcccattcactctgccggaagtgtcgactaacaaaacctactccttcctgatctacaccgaagtcgatataggagaactgctcatgcttaaactcaaatggaagtccgacagctatttctcctggtcggactggtggtcctccccgggcttcgcaatccaaaagatccgagtgaaggccggagaaacccaaaagaaagtgatcttttgctcccgtgaaaaggtcagccatctccagaaaggcaaagcccccgccgtgtttgtgaagtgccatgataagtccttgaataagaaaagcggt

SEQ ID NO: 15849 - DNA, 1425 bp, synthetic construct
  misc_feature 1..1425: note = source = /note="Description of Artificial Sequence: Synthetic coding sequence"
  source 1..1425: mol_type = other DNA
atggaatctaaggcactgctcgtgctgacgcttgcagtgtggctccagtcactcacggcctcgaggggcggcgttgccgctgcagaccagcggcgcgattttattgatatcgaaagtaaatttgccctgcgaacacccgaggacaccgcagaagacacgtgtcacctgattccgggtgtcgctgaaagtgtagccacctgccacttcaaccattccagcaaaaccttcatggttatccacggttggaccgtgacaggtatgtacgaatcttgggtgcccaaactggtggcggccttgtataagagggagcctgattctaatgtgatcgtggtggattggctttcacgggcacaggagcactaccccgtgagtgccggctacaccaaactggtgggtcaagatgtggcccggttcatcaactggatggaggaggaattcaattaccccctggataatgttcatctgctgggttattccctcggcgcccacgccgccggcatcgccggctccctgaccaacaagaaagttaacaggatcaccggtctggaccctgcaggacctaactttgagtacgctgaagcaccgtcccgattgagtcctgacgacgccgatttcgttgatgtgctgcatacctttacaaggggatccccaggaagaagtattggcatccagaagccagtggggcatgtcgacatttacccaaacggaggcacttttcagcccgggtgcaacataggagaggctatcagagtgattgcagagagaggactcggtgacgttgaccaactcgtcaagtgctctcacgagcgcagcatccacctgttcatcgacagcttgctgaacgaggaaaacccttccaaagcctatcgctgcagcagcaaggaggcgttcgaaaagggattgtgcctctcatgtcggaagaaccgctgtaacaaccttggctacgagatcaacaaggtgcgggcaaaaagatcttccaaaatgtaccttaagacccggagccaaatgccttacaaggtttttcattaccaggtgaaaattcatttcagcggcaccgagtccgagacacacaccaatcaggcgtttgagatcagcctgtatggaaccgtggcagagtctgaaaatatcccctttaccctgcccgaagtgtcaaccaataagacctacagttttctgatttacacggaagtggacatcggggagctgttaatgcttaagctgaagtggaaatccgactcttacttcagttggtccgactggtggagctcacccggcttcgcaatacagaaaattcgggttaaggccggggagacacagaaaaaggtgatcttctgtagccgggaaaaggtgtctcacctccagaagggcaaggctcccgccgtgtttgtgaaatgtcacgataagagcctgaacaagaaatctgga

SEQ ID NO: 15850 - DNA, 1425 bp, synthetic construct
  misc_feature 1..1425: note = source = /note="Description of Artificial Sequence: Synthetic coding sequence"
  source 1..1425: mol_type = other DNA
atggagtctaaggcactgcttgtgcttactctggcagtgtggcttcagtcccttactgcgtccagaggaggggtggcagcagccgaccaaaggagggacttcatcgatatagaaagcaagtttgcccttcggacccccgaagatactgcggaggatacttgccaccttattccaggagtcgcagaatcagtcgcaacttgtcacttcaaccattccagtaagacgtttatggtgatccacgggtggaccgtgaccggaatgtacgaaagctgggtgcctaagctcgtcgcagcactgtacaagcgcgaaccagactcgaacgtcatcgtcgtcgactggctttccagagcacaagagcattaccctgtgtcagcaggttacaccaagctggtcggacaagacgtggcacgtttcattaactggatggaggaagaattcaactacccactggacaacgtccatcttctggggtactcgttgggtgcgcatgcagcaggcattgccgggtcactgaccaacaaaaaggtcaatagaattaccgggttggatccagccggaccgaactttgagtacgcagaggcaccttcaagactctcaccggacgacgctgactttgtggacgtccttcacacctttactaggggctcgcctggtcgctcgatcgggattcaaaagccggtgggacatgtggatatctatcctaatggcggcaccttccaaccaggctgtaatatcggggaagcaattcgagtgatagccgaacggggcctgggggacgtggatcaacttgtgaagtgtagccacgagcgcagcatacatctcttcattgattccctgctcaacgaagagaatccttcaaaggcctaccggtgctcgagcaaggaagcattcgaaaagggactgtgtctctcatgccgcaaaaacaggtgtaataacctgggatacgagatcaataaggtccgtgcgaagagatcgagtaagatgtatcttaaaactagaagccaaatgccatacaaagtgttccattaccaagtgaaaattcatttctcagggaccgagtcagaaacccacacgaatcaagcatttgaaatatcactgtacggcacggtggccgagtcggaaaacattccctttaccctccctgaagtgagcacgaacaagacttattcgtttctcatttacactgaagtggatatcggagagctgctgatgttgaaactcaaatggaagagcgattcgtacttctcatggtcagattggtggtctagccccggcttcgcaatacagaagattcgggtgaaggcaggtgaaacccaaaagaaggtgatcttttgcagccgcgagaaggtgagccatctccaaaagggaaaggctcccgcagtgttcgtgaagtgtcatgataagtccctgaacaagaagtcggga

SEQ ID NO: 15851 - DNA, 1425 bp, synthetic construct
  misc_feature 1..1425: note = source = /note="Description of Artificial Sequence: Synthetic coding sequence"
  source 1..1425: mol_type = other DNA
atggaatccaaggccctgttggttctcacacttgcagtgtggctccagagcctaactgcatccaggggaggcgtggctgcagccgatcagcgacgcgattttatagatatcgagtcaaaattcgccctgcgcactcctgaagacactgctgaggatacatgccacctcatacctggcgtcgccgaatccgtggccacatgccatttcaaccacagttccaaaacctttatggtcatccatggttggaccgtgaccggcatgtacgagtcttgggtgccgaaactggttgccgccttgtataagagagagcccgactccaacgtgatcgtagttgattggcttagtagagcccaggaacactatcctgttagcgccggctacaccaagttggtcggccaggatgttgccagatttatcaactggatggaggaagagttcaactaccctttggacaacgtgcacctcctgggctacagtcttggagcgcacgcggctggaattgccggaagcttgacaaataagaaagttaaccggatcaccgggcttgaccctgccgggcctaacttcgagtacgctgaagctccttccaggctcagtccggacgacgcagacttcgtcgatgtgctccatacttttacgaggggcagcccagggaggtccatcggtatccagaagcctgtgggtcacgtcgacatctaccctaatggagggacatttcaacctggctgcaacatcggcgaagcgatccgggtaatcgctgagcgtggattaggcgacgtagatcagctagttaagtgtagccatgaaaggtcaatccacctatttatagatagtctcctgaacgaggagaacccatcgaaagcctatcggtgtagcagcaaagaggcatttgagaaaggactctgcctttcctgcaggaagaatcgatgtaacaacctcggatatgaaatcaacaaggtgcgcgctaagagaagttcgaaaatgtaccttaagacccgctcacagatgccttacaaggtgtttcactaccaggtgaagattcatttttctgggaccgagagcgaaacacacacgaatcaggcatttgagattagcctgtatgggaccgtggctgagtccgagaacatcccattcacgttgcccgaggtgagtactaacaagacatattcgtttctcatctacaccgaggtcgatatcggagaactgctcatgctaaagctcaagtggaaatctgatagctacttcagctggagtgactggtggagttctccggggtttgccattcaaaaaattcgcgtgaaggcgggtgagacgcagaagaaggtaatcttttgttctcgtgagaaggtgagtcacctccagaagggcaaagcccctgcagtgttcgtgaagtgccatgataaaagtttgaataaaaaatccggc

SEQ ID NO: 15852 - DNA, 1425 bp, synthetic construct
  misc_feature 1..1425: note = source = /note="Description of Artificial Sequence: Synthetic coding sequence"
  source 1..1425: mol_type = other DNA
atggaatctaaggctctgttagtgctgaccttggctgtctggcttcagagcctcacggcgtcccgaggtggcgttgcagctgcagaccaaagacgagatttcattgacattgagtcaaagttcgcactacgtacccctgaggatactgccgaggatacctgtcacctgatccccggggtggccgagtccgtggctacgtgtcactttaatcactctagtaaaacgttcatggtgattcatggctggaccgtcactgggatgtacgaatcatgggtgccaaagttagttgccgcattgtacaagagggagcctgactccaacgttatcgttgtcgattggctcagccgagctcaggaacactatcctgtgagtgctggatacactaaactggttgggcaagatgtggcccgctttatcaactggatggaggaggagttcaattaccctctcgataacgtacacttgcttggatactccctgggcgcccacgctgctggaattgcaggatccttgacaaacaaaaaagtgaataggataactggactggatcccgccgggcccaacttcgaatacgctgaggcaccttctaggctgtctcccgacgatgcagatttcgtggacgttctacacacctttacgcgcgggtccccgggcaggagcattggcatccagaagccggtcgggcatgtcgacatttatcctaatgggggcacattccagcccggctgcaatattggtgaggcgataagggtgatcgctgagcggggcctgggtgatgtggatcagctagtgaaatgctcccatgagagatccattcacctctttatcgattccttgctcaacgaggagaatccttcaaaagcttatcgatgcagctctaaggaagctttcgagaaaggcctctgtctgtcctgtaggaagaacaggtgtaataatctgggttacgaaatcaataaggtacgggcgaagcggagctccaagatgtaccttaagacgcgttcacagatgccttacaaggtgttccactaccaagtcaagatccacttttctggcaccgaaagcgaaactcacaccaaccaagcgtttgaaatttccctctacggcacagttgccgagtctgaaaatattccctttacgctgcccgaagtctccaccaataaaacatacagcttcctgatctataccgaggtggacattggcgaactcctgatgctgaaactgaaatggaagtctgactcctattttagctggtccgattggtggtcctcacccggctttgcgattcaaaaaatcagagtaaaagccggggagacccaaaaaaaagtcatattctgcagtagagagaaggtgagtcatttgcaaaagggcaaggccccggccgtgtttgtcaaatgtcacgacaaaagcctgaataagaagtcgggt

SEQ ID NO: 15853 - DNA, 1425 bp, synthetic construct
  misc_feature 1..1425: note = source = /note="Description of Artificial Sequence: Synthetic coding sequence"
  source 1..1425: mol_type = other DNA
atggaaagtaaagcccttttagtgcttaccttggcggtatggctgcagagccttacagcgtctaggggtggggtcgctgcagctgatcagagaagggactttattgacatagagtccaagtttgcgctgcggacgcctgaggacaccgccgaggatacttgtcacctcatccctggcgtagccgagagcgtcgccacctgccactttaaccactcgtccaagactttcatggtgatccatggctggaccgtcacaggcatgtatgaaagctgggtccctaaactggtcgcggctttgtacaaacgggaaccagactccaacgtaattgtggtagattggctctcccgggcccaagaacattacccagtctcggccggttacaccaagctggtcggccaggatgttgctcgtttcataaattggatggaagaagagtttaactacccgctggataacgtgcacctgttaggttatagcctcggggctcatgccgcgggaatcgccggctctctaaccaataaaaaggtgaaccgcatcactggcctggatccagccgggcccaacttcgagtatgctgaggcacccagtaggctgtctccagatgatgccgactttgtggatgtgctccacacttttactcgtgggagtccagggcggtcaattgggatccagaagccagtggggcacgtagacatttatccaaatggcgggacatttcagcctggatgtaatattggcgaagctatcagagttattgccgagcgggggttgggggacgtggaccaacttgtgaagtgtagtcacgaaagatccatacacctgttcatcgactccttgctaaacgaggaaaacccgtccaaggcctacagatgcagttctaaggaggctttcgagaagggcctgtgtttatcatgcagaaagaaccggtgtaataacctgggatatgaaattaataaagtgcgagccaagagatcaagtaagatgtacttgaaaactcgctctcaaatgccttataaagtcttccactaccaggtcaagatacatttcagtggaactgaaagtgagactcataccaatcaggccttcgagatttctctgtacggaacagtggcagagtctgaaaatattcctttcacccttcccgaagtgagcacaaataagacctatagtttcctgatctacactgaggtcgacatcggcgagctactgatgctaaagctgaagtggaaatcagatagctacttctcttggtctgactggtggtcgagcccggggtttgcgatccaaaagatccgagtgaaggctggagaaactcagaaaaaggttatcttttgttccagggagaaggtgagtcatctgcagaaaggcaaagcccctgccgtgttcgtgaagtgtcatgataaaagcctcaacaaaaagagcggg

SEQ ID NO: 15854 - DNA, 1425 bp, synthetic construct
  misc_feature 1..1425: note = source = /note="Description of Artificial Sequence: Synthetic coding sequence"
  source 1..1425: mol_type = other DNA
atggaatccaaggcgctcctggtgctcactctggctgtttggttgcaaagcctgaccgcaagccgcggcggggtggcggccgccgaccagcgccgcgactttatcgatatcgaatcgaagttcgcactccggaccccggaggacaccgcggaggacacttgccatctgatcccgggagttgcagagtcggtggccacctgccacttcaaccattcctcaaaaactttcatggtcattcatggctggaccgtcaccggaatgtacgaatcatgggtcccgaagctcgtggccgcgctttacaagagagaacctgacagcaacgtgatcgtcgtggactggctgagccgagcccaagaacattacccggtgtcggccggatacaccaagctggtgggccaagacgtggcgcgattcattaactggatggaggaagagttcaactacccccttgacaacgtccacttgctgggatactcgctcggagctcacgcagctggtattgccggatcactgactaacaaaaaggtgaaccggatcactggattggatccggccggcccaaacttcgaatacgccgaagccccgagcagattgtccccagatgacgccgatttcgtggacgtgctgcacacctttaccaggggatccccgggccgctcgatcggaatccagaagcccgtcggacacgtggacatctatcctaatggaggtactttccagccgggatgcaacatcggtgaagcgattagggtgatcgccgagagaggcctcggcgacgtggatcaattggtgaaatgttcccacgaaagaagcatccatctcttcattgactcactgctgaacgaggagaaccccagcaaggcctaccggtgctcatcaaaagaagcattcgaaaagggactctgtctgtcctgccggaaaaatcgctgcaacaacctcggctacgaaatcaacaaggtgcgcgctaagagaagctcaaagatgtaccttaagacccgcagccagatgccgtacaaggtctttcactaccaggtgaagatccacttctcggggaccgagtcagaaacgcatacgaaccaggccttcgagatttcgctgtacggaaccgtcgcagaatccgaaaacatcccgtttactctgcctgaagtttccaccaataagacctactcttttttgatctacactgaggtcgacatcggagagttgcttatgctcaagctcaaatggaagtcggactcatacttctcgtggtccgactggtggtcctcgccagggttcgctatccagaagatccgcgtgaaggcaggggagactcaaaagaaggtcattttctgctcccgcgagaaggtgtcacatctgcagaagggaaaggcgccggcggtgtttgtgaaatgccatgacaagtccttgaacaagaagagcgga

SEQ ID NO: 15855 - DNA, 1425 bp, synthetic construct
  misc_feature 1..1425: note = source = /note="Description of Artificial Sequence: Synthetic coding sequence"
  source 1..1425: mol_type = other DNA
atggagagtaaggcgctgctggtgttgacactggctgtttggcttcagtccctcaccgccagtaggggcggagttgcagccgccgaccagcgcagggacttcatcgatatcgaaagcaagttcgcgctccgcaccccagaggatacggcagaagacacctgtcatctcatccccggtgttgccgagagtgtggccacttgtcatttcaaccactcatctaaaaccttcatggtgatccacggttggacagtcaccggcatgtacgaaagctgggtgcctaagttggtcgcagccctgtataagcgcgaaccagattctaacgtgatcgtcgtggattggctgtctagagcgcaggaacactacccagtgtcagccggctataccaagctcgttggccaggatgttgccaggttcattaattggatggaggaggaatttaactatccacttgataatgtccatctcctcggatactccctgggagctcacgccgccggcatcgccggatctcttactaataaaaaggtgaatagaatcactggacttgaccccgccggccccaacttcgagtatgctgaagcgccatcccgcctctcacctgatgacgctgactttgtggatgtgctgcacaccttcacgagaggcagcccaggtcgctccatcggtatccagaagcccgtaggacacgtcgacatttaccccaacggtggcaccttccaaccaggctgtaacatcggcgaggccatacgcgttatcgccgagaggggtttgggtgatgttgatcaactggttaagtgttctcatgaacgcagtattcatcttttcatcgattccctgctcaacgaagagaacccctcaaaagcgtaccgctgcagcagtaaagaggcgtttgagaagggcctgtgtctctcatgtaggaagaatcgctgcaataacttgggatacgagattaacaaggttagggctaagaggagctctaagatgtatcttaaaacgaggtctcaaatgccgtacaaggttttccactatcaggtcaaaatccatttttctggcacagagagcgagacgcacacaaaccaggcatttgagatcagtctgtacggcactgtcgcagaatccgaaaacatcccgtttacacttccagaggtgtcaaccaataagacatactcatttctgatctatactgaggtggatatcggtgaattgctgatgctcaaattgaagtggaaatccgattcatatttctcctggagcgactggtggtcttcccctggatttgcaatccaaaagatcagggtgaaggccggagagacacagaagaaagttatcttctgtagtagagagaaggtatctcacctgcagaaaggaaaggcccctgcggtgttcgtaaagtgtcacgataagagcctcaacaagaaaagcggt

SEQ ID NO: 15856 - DNA, 1425 bp, synthetic construct
  misc_feature 1..1425: note = source = /note="Description of Artificial Sequence: Synthetic coding sequence"
  source 1..1425: mol_type = other DNA
atggagagtaaggctctactggtgcttacactagctgtctggctccagagcctgaccgcgtccagggggggagtggccgcagctgaccagagaagggattttatcgacatcgaaagcaagtttgcactgcggacccccgaagatactgccgaggatacctgtcacctgattcccggggtggcagaatctgtggcgacctgtcacttcaaccacagctctaaaacctttatggtcatccacggctggacagtgactgggatgtatgagtcctgggtgcccaaactcgtggcggcactttacaagagggaacccgacagcaatgtgatagtggtggattggctgagcagggcacaggaacactatcctgtgagtgctgggtataccaagctcgtgggccaagatgtggccaggttcatcaactggatggaggaggaatttaactatccactggataacgtgcaccttttgggatacagccttggggcgcacgcggccggcattgcgggatctcttacaaataagaaagtgaaccgaattacggggctggacccagctgggcctaacttcgagtatgccgaggcaccctctcggctgtcacctgacgatgcggacttcgttgacgtgctgcacaccttcacccggggctccccaggtcgttccatcggaattcagaaacccgtggggcacgtggatatctaccccaacggaggaaccttccaacccggctgcaacattggggaagcaattcgggtcattgctgagagaggactgggagacgtggatcaattggttaagtgctcccacgaaagatcgatacatctgttcatcgactctttattaaacgaggagaacccctctaaagcgtatcgatgctcttccaaagaggcctttgaaaaggggctatgcctgagctgccgaaagaaccgctgcaacaaccttggatacgaaattaataaagtgagggcaaagcgctccagcaagatgtacctgaagactcgctctcagatgccgtacaaggtgtttcactaccaggtgaagatccacttttccggtaccgagtccgaaacacacaccaaccaagcttttgagatctctctttacgggactgtggccgagtccgagaatattccgttcacgctgcctgaggtttcgacaaataaaacctactcatttctgatttacacggaggtcgatataggtgagctgctgatgctgaagttgaagtggaagagcgactcctacttttcatggtcagattggtggagctcccccggctttgcaatacagaaaatcagagttaaagctggagagactcagaagaaagtgattttctgcagccgagagaaagtgagccacctccagaagggcaaagctcctgctgtgttcgtaaagtgccatgataagagcttaaataagaaatctggc

SEQ ID NO: 15857 - DNA, 1425 bp, synthetic construct
  misc_feature 1..1425: note = source = /note="Description of Artificial Sequence: Synthetic coding sequence"
  source 1..1425: mol_type = other DNA
atggagtcaaaggctctgctagtgctcaccctcgctgtgtggctgcagtcgctaacggcctcacggggcggggtggccgctgcggatcagcggcgggatttcatcgacattgagagtaaatttgccctgagaactcccgaggatactgcagaagacacctgccacctgatccccggagtggccgagagcgttgcgacctgtcattttaatcacagctcaaaaaccttcatggttattcacgggtggaccgttaccgggatgtacgagtcctgggtgcccaaattggttgcagccctgtacaaacgagaacccgacagtaacgttattgtggttgactggctctcacgggctcaggaacactatcccgtgagcgctggctataccaaactcgtgggacaggacgtcgctaggttcattaactggatggaagaagaattcaattaccccctggataacgtacatctgcttggatattcactaggcgcgcatgccgcagggatcgctgggtctctgacaaataaaaaagtcaataggattaccggcctggacccagccggacctaatttcgaatacgccgaagcaccatctcgcctgtcccctgacgacgctgattttgtggatgtcctgcatacattcactcgggggtcaccaggaagaagcataggaatccagaagccagtgggacacgtcgacatctacccgaacggtggcacatttcagcccgggtgcaacataggggaagccatcagggtgatcgcagaacgtggactgggcgatgtggatcagctggttaagtgttctcacgaaagaagcatccatctcttcattgactctctgctcaacgaggagaatcccagtaaagcatacaggtgctcgagcaaggaggcattcgaaaagggcctctgcctcagttgccgaaaaaaccgctgtaacaacctgggctacgaaattaacaaggttcgcgccaaacgatcatctaagatgtacttaaaaacacggagtcagatgccatacaaagtgtttcactaccaggttaaaatccatttctccggcacggagtcagaaacccacactaatcaggcttttgaaattagcctctatggcacagttgccgaaagcgaaaatatcccttttacgttgcccgaggtgagcacgaataaaacctatagtttcttgatttatactgaagttgacataggggagctgcttatgcttaaactgaaatggaagtccgactcctacttcagctggagcgactggtggtccagtccaggatttgctatacagaagattcgggtgaaggctggggaaacccagaagaaggtgattttctgctccagagagaaggtgtcccacctacagaaaggcaaggcccctgccgtgttcgtgaagtgccatgataagtctctgaacaaaaaatccggc

SEQ ID NO: 15858 - DNA, 1425 bp, synthetic construct
  misc_feature 1..1425: note = source = /note="Description of Artificial Sequence: Synthetic coding sequence"
  source 1..1425: mol_type = other DNA
atggaatccaaggctctcttggtgctcaccctggctgtgtggctgcagagcctgaccgcgtcgcgcggtggtgtggccgcggctgaccagcggagagacttcatcgatattgaaagcaagtttgcgctgcggacccccgaggacactgccgaggatacctgtcatttgatccctggagtggctgaaagcgttgccacgtgccacttcaaccattcctctaagactttcatggtgattcacgggtggaccgtgactggtatgtacgaatcgtgggttcctaagctggtcgcggcactctacaagcgcgaaccggattcgaacgtgatcgtcgtggactggctttcgagagcacaggagcattacccagtgtccgcgggatacactaaactggtcggccaggacgtcgcgcgctttatcaattggatggaagaggaattcaactatccgctggataacgtccatctgcttggatactcgctcggagcccacgcggcaggcatcgcaggaagcctgaccaacaagaaagtgaaccgcatcactggcctggacccggcgggacctaatttcgagtacgccgaagcgccgtcacgactgtccccagatgatgcggacttcgtggacgttctgcacactttcactcggggttcaccgggaagatcgatcgggatccagaagccagtcgggcacgtcgacatctacccaaatggaggcaccttccaaccgggttgcaacatcggtgaagctatccgagtcatcgctgagcgtggtcttggcgacgtggaccagctggtgaagtgcagccacgagcggtcgatccacctctttatcgactccctgctcaacgaagaaaatccgtcgaaggcctaccggtgctcatccaaggaggcgtttgagaaagggctctgcctgtcatgtcgcaagaatcggtgtaacaacctgggctacgagatcaacaaagtgcgcgcaaagcggtcgtccaagatgtatctgaaaaccagatcacaaatgccgtacaaagtgttccattaccaggtgaagatccacttctccggaacggagtcggaaacccataccaaccaagcatttgaaatctcgctgtatggaactgttgccgagagcgagaacatccctttcactctccccgaagtctcaaccaataagacctactcgttcctcatctataccgaggtcgatattggggaactgcttatgctcaaactgaaatggaaatcggacagctacttctcatggtcagactggtggtctagccctggcttcgccatccagaaaattcgggtgaaggccggtgaaacgcagaagaaagttatcttctgttcgcgcgaaaaggtcagccatctgcaaaaggggaaggccccagccgtgttcgtgaagtgtcacgacaagtcactgaataagaagtcagga

SEQ ID NO: 15859 - DNA, 1425 bp, synthetic construct
  misc_feature 1..1425: note = source = /note="Description of Artificial Sequence: Synthetic coding sequence"
  source 1..1425: mol_type = other DNA
atggaaagtaaggctctgctcgtgctcactctggctgtttggctgcagtccctgaccgcttcacggggcggggtggccgccgccgaccaaagacgggacttcatcgatatcgagtccaaattcgcgctgcgaactcccgaagataccgcggaggatacctgtcacttgatcccgggcgtcgccgaaagcgtcgcaacgtgtcactttaaccatagctcaaaaactttcatggtcatccacggttggaccgtgactggaatgtacgaatcatgggtcccgaagttggtcgctgcattgtacaagagggaaccggattctaacgtgatcgtggtggactggctgtcgcgcgcccaagagcactatccggtcagcgccggatacaccaagctcgtcggacaggatgtggcccgcttcattaactggatggaggaagagtttaactaccccctggacaatgtccacctgctcggatattcgctgggagcccacgcagctggaatagcaggatccctgactaacaagaaagtgaatcgcattactgggctcgaccctgcaggccctaacttcgagtacgctgaggcaccgtcgcgcctgagcccggacgacgcggacttcgttgatgtcctgcatactttcacgcggggatcccctggccggtcaatcggtatacaaaagcctgtgggccacgtcgacatctacccgaacgggggaactttccagccagggtgtaatatcggagaggcaatccgcgtgatagcggagcggggactgggagatgtggaccagttggtgaagtgctcacatgaacggtcaatccaccttttcatcgattcactgctcaatgaggaaaatccttcaaaggcatacaggtgctcgtcaaaggaggctttcgagaagggtctgtgcctgtcgtgtcgaaaaaaccgctgcaacaacctgggctacgaaatcaataaagtgagagccaagagatcttcaaagatgtacctcaaaaccagatcccagatgccgtacaaggtctttcattaccaggtgaaaatccacttctcgggcacggagagcgagactcataccaaccaggcattcgaaatttcgttgtacgggacggtggcggaatcggagaacatcccttttacgcttccggaggtgtcgaccaataagacttatagctttctgatctacaccgaagtggacatcggagagcttctcatgctgaagctgaagtggaagtcagattcgtacttctcctggagcgactggtggtcctcgccaggctttgccatccaaaagatccgagtgaaggccggagaaactcagaagaaggtgatcttctgctcccgcgagaaagtctcacatctgcaaaaaggaaaagccccggccgtgttcgtgaagtgccacgataagagcttgaacaagaagagcggg

SEQ ID NO: 15860 - DNA, 1425 bp, synthetic construct
  misc_feature 1..1425: note = source = /note="Description of Artificial Sequence: Synthetic coding sequence"
  source 1..1425: mol_type = other DNA
atggaatccaaagctcttctcgtactgactctcgcagtgtggctgcagtccctcaccgcctccaggggtggggtcgctgccgccgaccagaggcgggacttcattgacattgagtcaaaatttgctctgcgtacaccagaagacacagccgaagacacatgtcacctcatacctggagtcgccgagtctgtggctacatgccatttcaaccacagctccaaaacctttatggttatccatggttggacagtgacaggcatgtacgaatcatgggtgcccaaattggttgctgccttatataaacgggagcccgattccaatgtgatcgtcgtcgactggctgtcccgggcccaggagcactatccggttagtgcagggtatactaaactggtgggccaggatgttgccagattcataaactggatggaggaggagttcaattatccactggataacgttcacctgttgggctactcgctgggcgctcatgctgcggggatagccgggagcctcaccaacaagaaggtaaaccgaattaccggactggatcctgcaggacctaactttgaatacgctgaggccccgtcccgcctgtctccggatgacgccgatttcgttgatgtcctgcacacttttacccgcgggagtccgggccgctcgattggtattcagaaacccgtgggccatgtggacatttaccccaacggagggacattccagcccggctgcaacattggagaagccataagagtaatcgccgagagaggcctgggcgatgtcgaccagcttgtgaaatgctctcatgagagatccatccatctattcatcgacagtctgctgaacgaagaaaatccctcaaaggcctatagatgttcgtctaaggaggctttcgagaagggattgtgcctgtcttgcagaaagaacaggtgcaacaatctcggttatgaaattaacaaagtgcgagccaagagatctagcaagatgtatcttaagaccaggtcacagatgccttacaaggtatttcattatcaagtcaaaatccacttctctggcactgaatccgaaacacacaccaatcaggcattcgagatttcactgtatggtaccgttgctgagtctgaaaacatcccatttaccttgccagaggtctcgaccaataaaacatattcattcctcatttacactgaggtagacatcggagaacttctgatgctgaagttgaaatggaagtcagattcgtactttagttggagcgactggtggagcagccccggatttgcgatacaaaagattcgcgttaaagccggagagacgcagaagaaggtgattttctgttctagagaaaaagtgtctcatttacagaaggggaaagcccctgcggtgtttgttaagtgccacgataaatcgctgaataaaaagtccggg

SEQ ID NO: 15861 - DNA, 1425 bp, synthetic construct
  misc_feature 1..1425: note = source = /note="Description of Artificial Sequence: Synthetic coding sequence"
  source 1..1425: mol_type = other DNA
atggagagcaaggcactcctggtgcttaccctggccgtgtggctccaatcccttactgcatcgagagggggcgttgcagcagccgatcagagaagagactttattgacatagagtcaaagtttgcactgcgaaccccagaagataccgcggaagatacttgccatttgatcccgggcgtcgcggagtccgtggccacctgtcacttcaaccattccagtaagacctttatggtgattcatggatggaccgtcaccggtatgtacgaatcatgggtgcccaaactggtggcggccctgtacaaacgagaacctgattctaacgttattgttgtcgattggctctcaagggcacaggaacattaccctgtatccgccggctacaccaaacttgtgggacaggacgtggccagattcataaactggatggaggaggagtttaactaccccctggataatgtgcacctgctgggttactcacttggcgcacatgccgcgggaatcgctggttcgctgactaataagaaagtgaatcgcattacgggattggatcctgcaggtccaaatttcgagtacgccgaggcgccttcacgcctgtcccctgacgatgccgactttgtggacgtgcttcacacctttacgagaggatcacctggacgcagtattgggatacaaaagccagtgggccacgtcgacatttatccaaatggagggacgtttcagccagggtgcaacattggtgaagcaattcgcgtgatcgccgaacgcggtttgggcgatgtggaccagcttgtcaaatgttcgcatgaacggtcgatccacttgttcattgattccctgctgaacgaagaaaatccgtcgaaagcataccggtgctcgagcaaggaagcattcgagaaaggactctgccttagttgtaggaagaacagatgtaataacttgggttacgagatcaacaaagtgcgtgctaagcggtcatcaaagatgtaccttaagacccggtcgcagatgccctacaaggtgtttcactaccaagtgaaaatccattttagcggaactgaatctgaaactcatactaaccaagcatttgagatcagtctttatggaacggtcgcagaaagcgaaaacattcctttcactcttcccgaagtgtccaccaacaagacctactcgtttcttatctacactgaagtcgatattggagaacttttgatgctgaagctgaaatggaagtcggattcatactttagctggtcggattggtggagttccccaggatttgcaatccaaaagataagggtcaaggcgggggaaactcagaagaaggtcattttctgtagcagagaaaaggtgtcgcatctgcaaaaagggaaggccccagcagttttcgtcaagtgtcatgacaaatcccttaacaagaagtccgga

SEQ ID NO: 15862 - DNA, 1425 bp, synthetic construct
  misc_feature 1..1425: note = source = /note="Description of Artificial Sequence: Synthetic coding sequence"
  source 1..1425: mol_type = other DNA
atggaatcaaaggctttgctcgtgctcaccctcgctgtgtggctccagtcgttgactgcctcccgcggaggagtggctgctgcagaccagcgccgcgactttattgatatcgaaagcaagttcgcactgcggacgccggaggacactgccgaggacacctgtcacctgattccaggcgttgcggaatcggttgccacctgccatttcaaccactcgagcaaaactttcatggtgattcatggttggaccgtgactgggatgtacgaatcatgggtgccaaagctggtggcggccctgtacaagcgggagcccgatagcaacgtgatcgtggtggactggcttagccgggcccaggagcattacccggtgtctgcgggatacaccaagctcgtcggacaagatgtggcgcggttcatcaactggatggaggaagaattcaattacccactggataatgtgcatctgcttggatattcactgggagcccacgcagcgggcatcgcaggatccctgaccaataagaaggtgaacaggatcaccggcctggatccagcgggtcctaacttcgaatacgcagaagctccttcgcggctctccccggacgacgctgacttcgtcgatgtgcttcacacgttcactaggggatcgcctggacgctcgatcggcattcagaagccggtgggccatgtggatatctacccaaatggaggaacttttcagccgggatgtaacatcggggaagcaatccgcgtcatcgccgagagaggccttggggacgtggatcagttggtgaagtgctcacatgagcgttcgatccaccttttcatcgatagcctgctgaatgaggaaaacccttcaaaggcctaccgctgctccagcaaggaagccttcgagaaggggctgtgcctctcgtgccgcaagaaccgctgtaacaaccttggatacgagatcaacaaggtgcgcgcaaagcgttcctctaaaatgtacttgaaaacgcggagccaaatgccatacaaggtgttccactaccaggtgaaaatccatttctctggaaccgaatcggaaacccacactaatcaggcattcgaaatctccctctacggaaccgtggctgaatctgagaatatcccctttactttgccggaagtgtccaccaacaaaacttattccttccttatctacaccgaggtggacatcggtgagctgcttatgctcaaactgaagtggaagtcggactcctacttcagttggagcgactggtggagctctcccggctttgctatccagaagatcagagtaaaagctggagaaactcagaaaaaggtgatcttttgcagccgggaaaaggtcagtcacctgcaaaaaggtaaggcgccggctgtgttcgtcaagtgccacgataagtcactgaacaaaaagtccggc

SEQ ID NO: 15863 - DNA, 1425 bp, synthetic construct
  misc_feature 1..1425: note = source = /note="Description of Artificial Sequence: Synthetic coding sequence"
  source 1..1425: mol_type = other DNA
atggagtctaaagcgctgctggtgctcacgcttgcggtctggctccagtcactgaccgcaagccggggaggggtggccgcagccgatcagcgccgggatttcatcgatatcgagagcaaattcgccctccgcaccccggaggacaccgctgaggacacttgccacctgatcccaggagtggcagagtcggtggctacttgtcatttcaatcactcctcgaaaaccttcatggtgatccacggatggaccgtgaccggcatgtacgagtcgtgggtccctaagctggtcgcagcattgtacaagcgagaaccggattcaaatgtgatcgtggtggactggctctcccgcgcacaggaacattacccggtgagcgcaggatacactaagctggtgggacaggatgtcgctcgcttcatcaactggatggaagaggaattcaattaccccctcgacaacgtccatctgctgggatactccctcggcgcacacgccgctgggatcgctggctcactgaccaacaaaaaggtgaacagaattactgggctggacccggctggaccgaacttcgagtacgcggaggccccgtcacggttgtcgcctgatgacgcggatttcgtcgatgtgctgcacaccttcaccagaggatcacccggtcgctcgatcggcatccagaagcccgtcggccatgtcgacatctatccgaacggaggaactttccaaccgggctgcaatattggagaagccattcgggtgattgcagaacgtggcttgggcgacgtagatcagctggtgaagtgctcgcatgagcgatccatccatctgttcatcgacagcctgctcaacgaagagaatccgtccaaggcctaccggtgttcctctaaggaggccttcgaaaaaggactgtgcctgagctgcagaaagaatagatgcaacaatcttggttacgagataaacaaggtccgggccaaaagatcatctaagatgtacctcaagactagatcacagatgccttacaaagtctttcattaccaggtgaagatccacttttctggaactgagtcggaaacccatacgaatcaagcgttcgaaatctctctgtacggcactgtggcggagagcgagaacatcccttttactctgccagaagtctcgacgaacaagacctactccttcttgatctacaccgaagtcgatatcggtgagctcctgatgctgaaacttaagtggaagtcggactcctacttcagctggtcagattggtggagctccccggggtttgccatccagaaaatccgcgtgaaggctggggaaactcagaagaaggtgatcttctgctcacgcgaaaaggtgtcccacttgcagaaaggaaaggctccggcggttttcgtgaagtgtcacgataaatccctgaacaaaaagagcgga

SEQ ID NO: 15864 - DNA, 1425 bp, synthetic construct
  misc_feature 1..1425: note = source = /note="Description of Artificial Sequence: Synthetic coding sequence"
  source 1..1425: mol_type = other DNA
atggagtccaaggccctcctcgtgctcaccctggccgtgtggctgcagagtctgacagcctcacgcggcggggttgcagcagctgatcagcgtcgcgacttcatcgatattgagtctaagttcgccctccgcacaccggaggacaccgccgaagatacgtgtcatctgatccctggagttgccgagtccgtcgcgacatgccactttaaccactcctcgaagaccttcatggtcatccacgggtggaccgtcactggaatgtacgagtcttgggtgccaaagctggtagcggccctgtacaagagggaaccggattcgaatgtcatcgtggtggattggttgtcccgcgctcaggagcactaccccgtttctgcgggctatactaagctggtgggtcaagacgtcgcccgtttcatcaactggatggaagaagagttcaattaccccctcgacaacgtccacctgctaggctactcactcggggcccatgctgcgggcattgctggaagcctgacgaacaaaaaggtcaatcgaatcaccggcttggacccagctgggcccaacttcgagtacgctgaagcccctagcaggctcagtccggatgacgctgattttgtcgatgttctccacaccttcactagaggctccccgggccgctccatcggcattcaaaaaccggtgggacacgtcgatatctaccccaacggaggcacttttcagcccgggtgcaacatcggggaggcaatccgggtgatcgctgagcgcggccttggtgacgtcgatcagctagttaagtgctcccacgaacgcagtatccacctgttcattgactccctgcttaacgaagagaaccccagcaaagcgtatcggtgttcctcgaaggaggctttcgagaagggcctctgcctgtcttgcaggaagaaccgctgtaataacctgggatacgagatcaacaaagttcgtgccaaacgatccagtaagatgtacctgaaaactcgcagccaaatgccttataaggttttccactatcaggttaagatccacttctcgggaaccgagtctgagactcacacaaatcaggccttcgagatctccttgtatggaaccgtggcagagtctgagaacatcccatttactctgcctgaggtatcgaccaataagacatattccttcctgatctacacagaggtagatatcggtgagctgctaatgctgaagctgaagtggaagtcggattcctacttctcctggagtgactggtggtcttctccgggtttcgcgatccaaaagatccgcgttaaagccggcgagacccagaagaaggtcattttttgctctcgcgagaaagtgtcccacttgcagaaagggaaagcccccgcggtgtttgtcaagtgccacgacaagtcgttgaacaagaagtccggc

SEQ ID NO: 15865 - DNA, 1425 bp, synthetic construct
  misc_feature 1..1425: note = source = /note="Description of Artificial Sequence: Synthetic coding sequence"
  source 1..1425: mol_type = other DNA
atggagtcgaaagctctcctggtcttgaccctcgctgtttggctgcagagtctcacagccagtcgaggcggagtggcagccgccgaccaaagacgggattttattgacatcgaatccaagttcgccttacgcactcccgaggacactgccgaggacacttgccacctgatcccgggcgtcgctgagtcagtggctacatgtcattttaatcattccagtaagacattcatggtgatccacggatggacagtgacaggtatgtatgagagctgggtccctaaactagtagccgccctttacaagcgcgaacctgacagtaacgtgattgtcgttgactggctctcaagggcacaggagcactacccagtgtcggcaggctacaccaaactcgtgggccaggacgtcgctcggttcatcaattggatggaggaggagttcaattacccactggataatgtgcacctcctgggatacagcctgggcgcccacgctgctggaattgctgggagcctgacaaataagaaggtgaatcgtataaccgggttggatcccgccggccccaatttcgaatacgcagaagcaccctcacgtttgagtccagatgacgcagactttgtggatgttcttcacacatttactagaggtagccccggcagaagcataggcattcaaaaaccagtcgggcatgtggacatttaccctaacggcggaaccttccagcccggatgcaacataggtgaggcaatcagagtgatcgcagagcgcgggctgggagatgtcgaccagctggtaaagtgttcgcacgaacgctccatccacctctttatagacagcctgctaaatgaggagaatccgtctaaagcgtatagatgctcttcgaaggaagcgttcgagaagggtctttgcctgagctgccgcaagaatagatgcaataatctcggatatgaaatcaataaagtcagggcaaaacggagctctaaaatgtatcttaaaacacgtagccagatgccttacaaggttttccattatcaggtgaagattcacttttcaggcaccgagtccgaaacccacacaaaccaagcctttgaaatctcactctacgggaccgtcgcagaatccgagaatataccgtttactcttccagaagttagcaccaacaagacctatagtttcctgatttacacagaagtagacatcggggagctgctaatgctgaagctgaaatggaaatcagatagttatttttcatggagcgactggtggagtagccccgggtttgctatccagaagattagggtaaaagctggggagacgcagaagaaagtgattttttgctctcgcgaaaaagtgtcacacctgcagaaaggcaaggcaccagccgtgtttgtcaaatgccatgataaatccctgaacaaaaagtctggg

SEQ ID NO: 15866 - DNA, 1425 bp, synthetic construct
  misc_feature 1..1425: note = source = /note="Description of Artificial Sequence: Synthetic coding sequence"
  source 1..1425: mol_type = other DNA
atggagagtaaggctcttctagtgctcactctagctgtctggctccaaagtttgacagcatcaagagggggagtagcggctgctgaccaaagaagagattttatagatatagaatcaaagtttgcattgagaactccagaggataccgcagaggacacatgtcatttgattccaggagttgcagagtctgtcgctacttgccattttaatcactcttctaaaacttttatggttattcatggctggaccgtgaccggaatgtatgaaagttgggtcccaaaactagtggcagcactgtataagcgcgagccagactctaatgttattgtggtcgattggctatccagggcacaggagcactatcctgtgagcgccggatacaccaagttagtgggacaagatgttgctagatttattaattggatggaagaagaattcaactatcccctggataatgtgcaccttttggggtacagcttgggggcccatgctgccggaatcgccggtagtttgaccaataaaaaggttaatcgtatcaccggtttggatcccgcaggaccaaacttcgaatatgcagaggccccttcgcgtttgtcgcctgacgatgctgattttgtcgatgtcttgcacacctttactagagggagccctggcaggtctatcggaattcagaagccagttggccatgtggacatatacccaaatggaggaacttttcaacctggttgtaatattggtgaggctatcagagtcattgccgaaaggggcctaggagacgtggatcaactggtaaaatgctctcatgaaagatctattcacctatttattgactctttattaaacgaggagaacccaagcaaggcctatcgttgttcctccaaggaagcttttgaaaaaggtctctgccttagctgtagaaaaaatcgttgcaacaatcttgggtatgaaattaacaaagttagagcgaagagatctagcaaaatgtacttgaaaactaggagccaaatgccctataaggtcttccattatcaagtgaaaatccatttcagtggcacagagagtgagactcatactaaccaggcttttgaaatttcgttatatggaacagtggcagagagcgaaaatattccgtttacccttccagaagtgtcaactaacaagacatatagctttttaatttatacagaggttgatatcggtgaacttttaatgctgaagttgaagtggaaatcagatagttacttctcctggtccgactggtggtcgtcaccaggatttgctatacaaaaaattcgagtcaaggcaggagaaactcagaaaaaggttatattttgttcaagagagaaggtttcccacttgcagaaggggaaggcgcccgccgtgtttgtgaagtgtcacgataaatcacttaacaagaaaagcggt

SEQ ID NO: 15867 - DNA, 1425 bp, synthetic construct
  misc_feature 1..1425: note = source = /note="Description of Artificial Sequence: Synthetic coding sequence"
  source 1..1425: mol_type = other DNA
atggaatccaaggctctgctggtgctgactctcgcagtgtggctgcaaagcttgacggccagccgtggcggtgtggctgctgctgatcagcgtcgcgactttattgatatcgagagcaaattcgcactgcgcactccagaggataccgctgaggatacgtgccatctgattccgggggtcgcagagtcagtcgcgacctgccactttaatcactcgtccaagaccttcatggtgatccacggttggacggtgacgggcatgtacgagtcttgggtgccaaagcttgttgccgctctgtataagcgtgaacctgactccaatgtaattgtggtggattggctgagccgtgcgcaggagcactacccagtgtctgcgggctatactaaattggttggtcaggacgtagcacgctttatcaactggatggaggaggagtttaactaccctctcgataacgtccatctgctgggctacagtttgggtgcccatgccgcggggattgcgggatcactaaccaacaagaaggtgaaccgcataactggtctcgatccggcgggtcctaacttcgagtacgcagaagccccatctaggctctctcctgacgacgccgactttgtggacgtgctgcacacctttacgaggggtagccctggtcgcagcattggtatccagaaacccgtcgggcacgttgacatctatcccaatggaggcacattccaaccgggctgtaatatcggtgaggcgattcgagtcatcgcggagcgcggtctgggcgatgtagatcagcttgtgaagtgcagccacgagcgcagcattcatttattcattgatagcctgttgaatgaggaaaatcctagtaaggcctaccgctgctcttccaaggaagctttcgaaaagggtctgtgcttgagctgccgcaaaaatcgctgcaacaatctggggtatgaaattaataaagtgagggctaaacgttccagcaagatgtatctcaagacgcgcagccagatgccttacaaagttttccactatcaggttaagatccatttctccggtacagagtctgagacccacaccaaccaggcgttcgagattagcctttatggtaccgttgccgagagcgagaacattccgttcaccctgcctgaggtctcgactaataagacctatagcttcttgatctacacggaggttgatatcggggaactgctgatgttgaagctgaagtggaaatctgactcctatttcagctggagcgactggtggagcagccctggtttcgccatccagaagatacgcgttaaggctggcgaaacccagaaaaaagttatcttctgtagccgtgagaaggtttcacatctgcagaagggcaaagcgccggccgttttcgtgaagtgccacgacaagtctttgaataagaagtccgga

SEQ ID NO: 15868 - DNA, 1425 bp, synthetic construct
  misc_feature 1..1425: note = source = /note="Description of Artificial Sequence: Synthetic coding sequence"
  source 1..1425: mol_type = other DNA
atggagtctaaggcccttctggtgctgaccctagccgtgtggctgcagtctctaacagcgagtagagggggtgtggctgccgctgaccagcgcagggattttattgatatcgaaagtaagtttgcccttcgaacacccgaagataccgctgaagatacctgccacctgatccccggcgtagctgaaagtgtggcaacctgccactttaaccacagttccaagacattcatggtcatccacggatggactgtcacagggatgtacgagagttgggtgcccaagctggtggcagctctatataagcgcgagccagacagcaacgtgatcgttgtggactggctcagccgagcgcaggaacactaccccgtgtccgctggttatactaagttagtcggccaagatgttgctagattcatcaactggatggaggaggagttcaactacccccttgataatgtgcatctccttgggtactccctaggagctcatgctgccggtattgccggcagtctgaccaataaaaaagttaatcgcatcacggggctagacccggccggaccgaattttgagtacgccgaagcaccttcgcggcttagccccgacgacgctgactttgtggatgtgctccacactttcacccgaggttctccaggtaggtcaatcgggatccagaagcccgtaggtcacgtcgacatttatcctaacggtggtacctttcagcctggctgtaacatcggagaggcaatcagagtcatagctgagcggggactgggtgatgtggaccagctcgtgaagtgctcacacgagaggtccattcacctgtttatcgacagtttgctgaacgaggaaaaccctagtaaggcctatcgatgtagcagcaaagaagccttcgagaaaggcctctgcctgagctgtcgaaagaataggtgtaataatcttgggtacgagatcaataaagtgagagccaaaagatcctctaaaatgtacctgaagacaagatctcaaatgccatataaggtcttccactaccaagttaagatccacttttcaggaacagaatccgagacgcacacaaaccaagctttcgaaatctccctgtacggaaccgtcgctgagagtgagaatatccccttcaccctgccagaggttagtaccaataagacttattctttcctgatttacacagaggtcgacatcggcgagctgttgatgcttaaattgaagtggaagtcggactcctatttctcatggtcagattggtggtccagccccggcttcgcgatccagaaaattcgagtcaaagcaggagaaacccagaaaaaggtgatattctgtagccgcgaaaaagtcagccaccttcaaaaggggaaggcaccagcggtctttgtcaagtgtcacgataaaagcttaaataaaaaatctggc

SEQ ID NO: 15869 - DNA, 1425 bp, synthetic construct
  misc_feature 1..1425: note = source = /note="Description of Artificial Sequence: Synthetic coding sequence"
  source 1..1425: mol_type = other DNA
atggagtctaaggcacttctcgtgctgaccctcgctgtctggctgcagagtctgaccgcgtcacgcggcggggtggcggcagcagatcaacgacgagactttattgacattgagtcaaaatttgccctgagaactccagaggacaccgccgaagacacgtgtcatctaatccccggcgtggccgagtcagttgccacctgtcacttcaaccactccagcaaaacattcatggtaattcatggatggaccgtgacaggaatgtacgaaagttgggttcctaagttagtcgctgccctatataagcgggagcccgacagtaacgttatcgtggtcgattggctgagcagggcgcaggagcattatcctgtgagtgctggatataccaagttagttgggcaagacgtggcccgcttcataaattggatggaggaggaatttaattaccctctggacaacgtgcaccttttgggttactccttgggtgcacacgctgctggtatagcagggtccctcaccaataagaaggttaatcgaatcaccggactagaccctgctggaccaaacttcgaatatgctgaggcaccgtcccgcctgtcccccgatgatgccgatttcgttgacgtgctgcacacctttaccaggggaagtccgggaagaagcattggcatccaaaaaccggtcggtcacgtggacatctatcccaatggaggcaccttccagcccggatgtaacatcggggaggcaattcgcgttatcgccgagagaggcctcggcgacgtcgaccagctggtcaagtgtagtcatgagcgctccattcacctgttcattgactccctcctcaatgaggagaatccgagtaaagcttacagatgttcatcgaaggaggcattcgagaagggcctttgcctgtcctgtcggaagaataggtgtaataatcttggttacgagataaataaggtccgggccaagcgctcttccaagatgtacctcaaaactcggtcccagatgccatataaagtgtttcactatcaagtgaaaattcatttctccggtactgaatctgagactcacaccaaccaggccttcgagatcagcctgtatggcactgttgcagaaagtgaaaacattcccttcacactccccgaggtgtctaccaacaagacctacagttttctaatctacacggaggtggatattggcgaactgttgatgcttaagctgaagtggaaaagcgacagctattttagttggagcgactggtggagttccccggggtttgccattcagaaaattagagtcaaggcgggggaaactcagaagaaggtgatcttctgcagtagggaaaaggtgagccatctgcagaaggggaaggcccctgcagtattcgtaaagtgccacgacaaaagtttgaacaaaaagtcaggt

SEQ ID NO: 15870 - DNA, 2580 bp, synthetic construct
  misc_feature 1..2580: note = source = /note="Description of Artificial Sequence: Synthetic coding sequence"
  source 1..2580: mol_type = other DNA
atgggaccatggggctggaagctgcgatggacggtcgccctgctcctcgctgctgccggaactgcggtgggcgacaggtgcgagagaaacgagtttcaatgccaggatggcaagtgcatatcttacaaatgggtgtgcgacggttctgctgagtgtcaggacggtagtgatgagtctcaggagacatgtctaagcgtcacctgtaagtctggggatttttcgtgtgggggaagggttaatcgatgtattcctcagttctggaggtgcgacggtcaggtggactgtgataacggatctgacgagcaggggtgtcctcctaagacttgcagccaggacgagttccgctgtcacgacgggaagtgcattagcaggcagtttgtgtgtgatagtgatcgtgattgcctggacgggtccgacgaggcgagttgcccggtgttgacatgcggacccgctagttttcagtgtaactcgtctacgtgcataccacagctctgggcatgtgataatgacccagattgcgaagacgggagtgacgaatggcctcaaagatgtcggggattgtatgtttttcaaggggatagctcaccgtgctctgcattcgaatttcattgcctgtcaggcgagtgtatccattcctcctggcgttgtgacggtgggcctgactgcaaggataagtctgacgaggagaattgtgctgttgccacctgccgacccgatgaatttcaatgctctgatggcaattgtatccatggcagcaggcagtgcgatcgggagtacgactgtaaggatatgagtgatgaggtggggtgtgttaatgtgactctttgcgaaggccccaataagttcaagtgtcattccggcgagtgtataactcttgataaagtttgtaacatggctagggattgtcgtgactggtctgacgaaccaatcaaagaatgtggaacgaatgagtgcctggacaacaatggcggctgctctcacgtctgcaacgatctcaaaatcgggtatgagtgtttgtgtccagatggctttcagctggtcgctcagaggcggtgtgaagatatagacgagtgtcaagaccctgatacctgcagtcagctctgtgtgaatctggaggggggttacaagtgtcaatgtgaagagggattccaactggatcctcacaccaaagcctgcaaagccgtgggatcaatagcctacttgttcttcactaaccgtcacgaagtgcgcaagatgaccctcgacaggtcagaatatacatccctgataccgaacctgaggaatgttgtcgccttagataccgaggtcgcatccaatcggatttattggagcgacctgagtcagaggatgatctgcagcacccagcttgatagagcccacggcgtcagctcatatgataccgtgatcagtagagatattcaagccccggatggactcgcagtggattggattcattcaaacatctattggacagactcagtactggggacggtgtccgtcgccgacacaaaaggcgtgaagcggaagacactgttcagggagaacggatctaagccccgcgccatcgttgttgatcctgtacatgggtttatgtactggacggattggggaacgcccgccaagattaagaaaggaggacttaacggggtggatatatattcccttgtaactgagaatatacagtggccgaatggcatcaccctggatctgttgagtggccgactgtactgggttgattccaagctgcactcaatcagtagcatcgacgttaacgggggaaataggaagaccatcttggaagacgaaaagcgactggcccatcccttcagcctcgctgtgtttgaggataaagtgttttggacagacatcatcaacgaagcaattttttcagcaaacaggctcacaggttcagatgttaatctactggccgaaaatctcttgagtcctgaggacatggttcttttccacaatcttacacagccacgtggcgtgaactggtgtgaaaggacaactctgagcaatggtggatgtcagtatctgtgtttaccagccccacagattaatccccactcccctaagtttacttgcgcgtgtcccgacgggatgctccttgcccgcgatatgcgctcctgcctcacggaagcagaagccgcagtggctacccaagagactagcactgtcaggctcaaggtgagttcaacagcggtgcgaacgcaacacacgactaccaggcctgttccggacacatcgcggttgcctggagcaacaccgggtctgactacagtggaaattgtaaccatgtcccaccaggcactaggtgacgtggcaggtaggggcaatgagaaaaaaccctcctctgttcgcgccctatctatcgttttaccaattgtgttactcgtgttcctgtgtctcggagtgtttctgctatggaagaattggagactcaagaacattaatagtattaattttgacaaccccgtttatcagaaaacaacagaggatgaggtgcacatatgccacaatcaggatgggtattcatacccttctcgacagatggtgtccttagaagacgacgtggca

SEQ ID NO: 15871 - DNA, 2580 bp, synthetic construct
  misc_feature 1..2580: note = source = /note="Description of Artificial Sequence: Synthetic coding sequence"
  source 1..2580: mol_type = other DNA
atgggaccgtggggatggaagctgaggtggactgtggccctgctgctcgcagcagccgggaccgcggtgggcgatcggtgcgaacggaacgaattccagtgtcaagacggaaaatgcatcagctacaagtgggtttgcgatggatcggccgaatgccaggacggatctgatgagtcccaagagacgtgtttgtcggtgacctgcaagagcggggatttctcatgcggaggacgcgtcaataggtgcatcccgcagttttggcggtgtgatggacaggtggattgcgataatgggtcagatgagcagggatgcccgccgaaaacctgctcccaggacgaattcagatgccatgacggtaagtgcatttcgcgccaattcgtctgcgactcggaccgcgactgcctggatggctcagacgaagcctcgtgcccggtgctgacttgcgggcctgcgagcttccaatgtaactccagcacgtgtatcccgcagctgtgggcttgtgacaatgacccagactgcgaggatggatcggacgaatggccgcagcgctgccggggcctttacgtgttccaaggagactctagcccatgctccgcgttcgaattccactgcctgtccggagaatgtatccactcatcttggcggtgcgacggtggaccagattgcaaggacaaatcggacgaggaaaattgcgcggttgccacttgtagaccagatgaatttcaatgctccgacggaaactgcattcatgggagcaggcaatgcgacagggagtacgactgtaaagatatgtcggatgaagtgggctgtgtgaacgtcaccctgtgcgaaggcccgaacaagttcaagtgccactcgggggaatgcatcactctggacaaggtgtgtaacatggcgcgcgactgtcgggattggtcggatgaaccgatcaaggaatgcggtactaacgaatgcctggacaataacggcggatgttcgcacgtgtgtaatgacctgaagatcgggtacgaatgcctgtgcccggacggattccagctggtggcgcagcggcgctgtgaggacatcgatgaatgtcaggacccggacacctgctcgcagctgtgcgtgaatctggagggtggatacaaatgtcagtgcgaggaaggattccaattggatccccatactaaggcctgtaaggccgtggggtctatcgcgtacctctttttcactaatagacatgaagtgcgcaaaatgaccctcgaccgttccgagtatacctcgctcatccctaacctccggaatgtagtggcgctcgacactgaggtggcgtctaaccgaatctattggtccgacctttcccagagaatgatctgttcgacgcaactggacagggcccatggtgtgtcgtcttacgatacggtcatcagccgggacatccaagcgcctgatggattggcagtggattggatccactcgaatatctactggactgattcagtgttgggaaccgtttccgtcgctgacactaaaggcgtgaagagaaagaccctgttccgggagaatggatccaagccacgcgccatcgtcgtggatccggtccatgggttcatgtactggaccgattggggaaccccggccaagatcaaaaagggaggtctgaacggagtggacatctactcgctcgtcaccgagaatattcagtggcctaatgggatcacccttgatctgctctcgggccggctgtactgggtggacagcaagctgcattccatctcgagtatcgatgtgaatggaggcaaccggaaaacgatactggaagatgagaaaagactcgcccacccattctcgctggcggtgttcgaggacaaggtgttttggaccgacatcattaacgaagccattttctccgcaaaccgcctcaccggctccgacgtgaacttgctggcggagaatctgctgtccccggaggatatggtgctgttccacaacctgactcagcctagaggggtgaactggtgcgaacgcaccaccttgtcgaatggcggatgtcaatacctgtgcctcccggccccccaaatcaatcctcattcccctaaattcacgtgcgcgtgcccagatggcatgctgctggcacgcgatatgcgcagctgcctcacggaagcggaggctgctgtggcaactcaagaaacctcaaccgtccggctgaaggtgtctagcacggcagtgcgcactcagcacactactacccgcccggtgccggacacgagccgccttccgggagctaccccgggacttactactgtggaaatcgtgactatgtcgcaccaggcgctgggagacgtggcgggacgcggcaacgagaaaaagccatcctcggtcagagctctctcaatcgtgctgccgatcgtgctgcttgtctttctctgcctcggagtgttcctcctctggaagaattggcgcctgaagaatatcaatagcatcaattttgataatccagtgtaccaaaagactaccgaggacgaagtccatatatgtcacaatcaagacggatactcgtacccgtccagacagatggtgtcactcgaggacgacgtggcc

SEQ ID NO: 15872 - DNA, 2580 bp, synthetic construct
  misc_feature 1..2580: note = source = /note="Description of Artificial Sequence: Synthetic coding sequence"
  source 1..2580: mol_type = other DNA
atgggcccctggggctggaaactgagatggacagtggctctgctgctcgctgccgctgggacagctgtgggagaccgatgtgaaaggaacgagttccagtgtcaggacggtaaatgcattagctataaatgggtgtgtgacggcagtgcagaatgccaagatggtagtgacgagagccaagaaacatgcctctctgtgacttgtaagagtggcgatttttcttgtggagggcgggttaacaggtgcatcccccaattttggaggtgtgatgggcaggtcgactgcgataatggaagcgacgagcaggggtgcccacccaaaacctgctcacaggatgagttccggtgccatgacggcaagtgcatttcccgacagttcgtctgcgacagtgatagagactgtctagatggtagtgatgaagcctcctgtccggtgctcacctgcgggccagctagttttcagtgcaattctagcacatgcatcccacagctatgggcctgcgataatgatcccgattgcgaagatggctcagatgagtggccacaacgctgcagagggctgtatgtattccagggagatagttctccatgttccgcctttgaattccactgcctgtcgggcgagtgtatacactccagctggcggtgtgatggaggccctgactgtaaggataagtctgatgaggagaactgtgctgtcgctacatgcaggcccgatgaatttcagtgctccgacggcaattgtattcacgggtccaggcaatgtgatcgcgaatatgattgcaaagacatgagcgacgaagttggctgtgtaaacgtgacattgtgtgaggggcccaacaaattcaagtgccatagcggcgaatgcattacactggataaggtgtgcaatatggcgcgcgattgccgggattggagcgacgaacctatcaaggagtgtggcacaaatgagtgcctggacaacaacggtgggtgctcccacgtgtgtaacgacttaaagattggttacgagtgtctttgcccggacggattccagttagtggcacagcgacggtgtgaggacatcgacgagtgccaagaccccgacacctgtagtcagctgtgcgtaaatctggaaggtgggtataaatgccaatgtgaagagggctttcagctcgacccacacaccaaagcttgcaaggccgttgggagtatcgcatatctcttttttacaaatagacatgaagtccggaagatgacccttgaccgttccgagtacaccagtctgattcccaacttgcgcaacgtggttgcactggacaccgaggtggctagcaacagaatttactggtctgaccttagtcaaaggatgatctgctccacgcagctggacagggcacacggtgtgagttcatatgacacagtcatctccagggacatccaggcaccagatggactcgccgtcgattggatccatagcaacatctactggactgacagtgttctggggacggtgtccgttgccgatactaagggggtgaaacggaaaactctatttagagagaatggtagtaagccgagagccatcgtcgttgatccagttcatgggtttatgtattggacagattggggaacacctgcaaaaataaagaaaggggggctgaatggggtggacatatactcactggttaccgagaacatccagtggcctaatggcatcaccctggatctactcagtgggcggctctattgggtggattctaagttgcattctataagctcaattgatgtaaacgggggcaaccgcaaaactattctggaagacgagaagcggttggctcatcctttttccctggcagtcttcgaggataaggttttttggacggatatcatcaacgaagcgattttcagcgccaaccgattgactggatctgacgttaacctgctggcggagaaccttctttcccctgaagacatggtgctgtttcataatcttacacaaccccggggggtgaactggtgcgagcgtaccaccctgtctaacggcggctgtcagtacctgtgcttgcccgctccccagataaacccccactccccgaagttcacatgcgcgtgtcctgacgggatgctgctagcccgagacatgcggagctgcctcacagaagcagaggcagcggttgccactcaagagacatctaccgtgagattgaaggtctccagcacggctgtaagaactcagcataccacgactcggcctgtgcccgacacgtctaggctcccaggggcaaccccaggcctgacaaccgtagaaattgtcactatgtcccatcaggccctgggcgacgtggccgggcgcggaaacgaaaagaagccaagctctgtccgggctttgtctatcgtgctccctatcgtgctgctggtcttcctttgtttgggagtattcttgttgtggaaaaattggcggctcaaaaatatcaactctatcaatttcgacaaccctgtgtaccagaaaacaactgaggatgaggtccacatttgtcacaatcaggacggctattcttaccctagtcgacagatggtttccctggaggatgacgtcgcc

SEQ ID NO: 15873 - DNA, 2580 bp, synthetic construct
  misc_feature 1..2580: note = source = /note="Description of Artificial Sequence: Synthetic coding sequence"
  source 1..2580: mol_type = other DNA
atgggaccgtggggttggaagctgagatggaccgtggcgctcttgctggccgccgctggaaccgccgtcggggaccgttgtgaacggaatgaattccaatgtcaagatggtaagtgcatctcatacaagtgggtgtgcgatggttcggccgaatgccaagacggcagcgatgagtcccaggagacttgcctgtcagttacctgtaagtcaggcgacttctcgtgtggaggcagggtgaaccgctgcattccacagttctggcggtgtgacggacaagtggattgcgacaatggatcagacgagcaaggatgcccgccaaagacttgcagccaggacgaatttagatgtcacgacggaaagtgcattagccggcaatttgtctgcgattccgacagagattgcttggatggctccgacgaagcctcatgtcccgtgctcacgtgtgggccagctagcttccagtgcaattcctctacctgtatcccacagctctgggcttgtgataacgacccggattgcgaggatggatccgacgagtggccccaacgctgcagggggctttacgtgttccaaggagactcaagcccatgcagcgctttcgagttccattgcctgtcgggagaatgcatccatagctcatggaggtgcgacggagggccggactgcaaggacaaatctgacgaggaaaactgtgctgtcgccacctgcagacccgacgagttccagtgttccgatggcaactgcatccacggctcgcgccaatgtgatagggaatacgattgtaaggacatgagcgatgaggtcggctgtgtgaacgttaccctgtgcgaaggccctaacaagttcaagtgccactcgggagagtgcatcactctcgacaaggtgtgcaatatggctagagattgtagagactggtctgacgagccgatcaaggaatgcggaaccaacgaatgcctcgataacaatggaggttgttctcacgtctgcaatgacctgaaaatcggttacgaatgcctctgcccagacggattccagctcgtggcccaacgccgttgcgaggatatcgacgaatgtcaagaccctgacacttgctcccagctctgcgtgaaccttgaagggggatacaagtgccagtgcgaagaaggcttccagcttgatcctcataccaaggcttgtaaggccgtaggaagcatcgcgtatctgttcttcactaataggcacgaggtgaggaaaatgactttggaccgatccgagtacacctcgctgattccgaatctccgcaacgtggtcgcgctcgatactgaggtcgcgtcgaaccgcatttactggtcggacctgtcccagcgcatgatctgttcgacccagctggaccgggcccatggtgtgtctagctacgacactgtcattagccgcgacatacaggcgccggacggcctggccgtggactggatccattcaaacatctattggacggatagcgtcctgggtacggtgtcggtcgcagacaccaagggcgtgaaacggaaaacgctgttccgcgagaatggatcaaagccaagagccatcgttgtggacccggttcatgggtttatgtactggaccgactggggaaccccagcgaagatcaagaaaggtggactgaatggagtcgacatctactcgctggtcactgaaaacatccagtggcccaatggcatcaccctggatctcctgtccggacggctgtactgggtcgatagcaaactccactcgatctcatccatagacgtcaatggaggtaatagaaaaaccattcttgaggacgaaaagcggttggctcacccttttagtctggccgtgtttgaagataaagtgttttggactgatatcatcaacgaagcgatcttttcggcaaacaggctgactggttcagacgtaaacctcctcgcggagaacctcctgtcgccggaggacatggtgctgttccacaacctgactcagccgaggggagttaattggtgtgagcgcactaccctgtcgaacggagggtgtcagtacctttgcctcccagcaccacaaatcaacccccactcaccaaagttcacgtgcgcgtgtccggacgggatgttgttggcacgggatatgcgctcgtgtctgactgaagcagaagccgctgtggcaacccaagaaacttcgactgtgcgcttgaaggtcagctccacggcagttcgtacccagcacacgaccacccgcccggtccctgatacttcgaggctgccgggagcaaccccgggactgaccactgtggaaatcgtgaccatgagtcatcaggcgctgggcgatgtggcgggccggggaaacgaaaagaagccgtcgtccgtgagggccctgtccatcgtcttgcccatcgtgctgctcgtgtttttgtgtctcggtgtctttcttctgtggaaaaactggcgcctcaaaaacataaactccattaacttcgacaaccctgtgtatcagaaaactacggaggacgaggtgcacatctgccacaaccaagatggctacagctacccgtcccgccagatggtgtccctggaggacgatgtggcc

SEQ ID NO: 15874 - DNA, 2580 bp, synthetic construct
  misc_feature 1..2580: note = source = /note="Description of Artificial Sequence: Synthetic coding sequence"
  source 1..2580: mol_type = other DNA
atgggaccttgggggtggaaacttcgttggaccgtggccctcctgctcgcggccgccggtaccgccgtcggggatagatgtgaacgcaatgaattccagtgccaggacggtaaatgtatttcgtacaagtgggtctgtgatgggtccgcagaatgtcaggatggttcagacgaaagccaagagacttgcctttcggtcacctgtaaatccggtgatttctcatgtggaggacgtgtgaacagatgcattcctcaattctggcgctgtgatggacaagtggattgtgataacggttccgacgaacaaggttgtcctcctaagacgtgttcgcaggatgagtttaggtgccatgatggaaagtgcatttcgaggcagttcgtgtgtgactcggatagagattgcttggacggatcagatgaggcgtcctgtccagtcctgacttgtggtcccgcatcatttcagtgtaactcctcgacttgtatcccccagctttgggcctgtgacaacgacccagactgcgaagatggttcagatgaatggccacaaaggtgtagaggattgtacgtgttccaaggcgattcctccccgtgctccgcttttgaatttcattgcctttcaggggaatgtattcactcatcatggagatgtgatggagggccggattgtaaggacaagtcagatgaagaaaattgcgctgtcgcgacttgtcgtccagatgaatttcagtgctcggatggaaactgtatacacggatcccgtcaatgtgatagagaatacgattgtaaggatatgtcagatgaagtcggttgtgtcaacgtgaccctttgtgaaggtcctaacaagttcaagtgccacagcggagaatgtattacgctggacaaggtgtgtaacatggcaagagattgtcgcgactggagcgacgaacctattaaggaatgcggtactaatgagtgtcttgacaacaacggaggttgctcgcacgtgtgtaacgatctcaaaatcggttacgaatgtctgtgcccggacggatttcagctcgtggcccaacgccggtgtgaagatattgatgagtgccaggatcctgatacgtgctcccagctttgcgtgaatctggagggcggatacaagtgccaatgtgaggaagggttccaacttgacccccacacgaaggcatgtaaggccgtgggatccatagcatacctgttctttactaatcggcacgaagtgcgtaagatgactttggatcgatcagaatacaccagccttataccaaacctgcgcaacgtggtggcactggacaccgaagttgcctccaaccgtatttactggtccgacctcagccaacgaatgatttgttcaacccaacttgacagggcacatggtgtgtcgtcctatgacacggtgatttcacgcgatattcaggcacccgatgggctcgcagtcgactggatccattcgaatatctattggaccgatagcgtccttgggaccgtgtcggtggctgatactaaaggggtgaagagaaagactctgtttcgagaaaatggatctaagccacgggcaattgtggtcgatccagtgcatgggtttatgtactggaccgactgggggacgccagcgaagatcaaaaaaggcgggctgaacggcgtggatatctactccctggttacggaaaacatccagtggcctaacggtatcaccctggatctgctgagtggacggctttactgggtcgactccaagttgcattcaatttcaagcattgacgtgaacggtgggaatcggaaaaccattcttgaagatgaaaagagacttgcacatccgtttagcttggcagtgtttgaggataaggtgttttggaccgacatcataaacgaagccattttcagtgccaatagattgaccggtagcgacgtcaatctgctggcggaaaatctgctgtccccagaggacatggtgctgtttcataatctcacgcaaccccgaggcgtgaattggtgtgaacgcactacgcttagcaatggaggatgccagtacctgtgtttgcccgctcctcaaatcaaccctcattcgccgaaattcacctgtgcctgtccagacggaatgctccttgccagagatatgcgcagctgcctcaccgaggctgaggctgcagtggcaactcaagaaacttcgaccgttcgactgaaagtttcctccacggctgtgcggactcagcataccactaccaggccagtcccagatacctcaagacttccaggagcaaccccaggactgactactgtggagattgtcacgatgtcacaccaggcacttggtgatgtggctggtagaggcaatgagaagaagccatcttcagtgcgagcactttccattgtcctcccaattgtgttgcttgtttttctttgtctcggagtgtttctgctctggaaaaactggcggctgaagaacatcaatagcataaactttgacaacccagtctaccagaaaactaccgaggatgaggtgcatatttgccacaatcaagatggctattcctacccgtcccgccagatggtcagtctggaagatgacgtcgca

SEQ ID NO: 15875 - DNA, 2580 bp, synthetic construct
  misc_feature 1..2580: note = source = /note="Description of Artificial Sequence: Synthetic coding sequence"
  source 1..2580: mol_type = other DNA
atgggtccctggggctggaaactgcggtggaccgttgccctgctgctagctgcggcaggtacagcagtgggcgaccggtgcgagcgaaatgagtttcaatgtcaagatgggaagtgcatcagctataagtgggtgtgcgatggctccgccgagtgccaggatggcagtgatgagtcacaagaaacatgcctctccgtgacatgtaagtcgggcgattttagctgtggcggtagagtgaacaggtgcatcccccagttttggaggtgcgatggccaggtcgactgcgacaatggcagcgacgaacagggatgtcccccgaagacatgttcccaagacgagtttcggtgccatgacggaaagtgtatctcccggcagttcgtttgtgactccgaccgagattgcctggacggcagtgatgaagcatcttgtcctgtcctgacttgcggcccagccagctttcaatgcaactcatctacatgtatccctcagctctgggcatgcgataatgatccagattgcgaggatgggtccgacgagtggccgcagcgctgccgggggctttacgtgttccagggcgattccagcccgtgctccgcatttgaattccactgtctgtctggggaatgtatacactcatcctggcgctgtgacggcggccctgattgcaaggataagagtgacgaggaaaactgcgcagttgccacttgccgtcctgatgagtttcagtgttctgatggaaactgtattcacggatctaggcagtgcgacagagaatatgattgcaaggatatgagtgacgaagttggctgcgtcaacgtaacactgtgcgaaggtccgaataaattcaagtgccactcaggggaatgcatcaccctggataaggtctgcaacatggcacgcgactgcagggattggagcgatgagcccatcaaggagtgtggcacaaatgaatgtcttgataataatggtggctgcagccacgtctgtaacgatctgaagatcggttacgagtgtctgtgcccagatgggtttcagctggtcgcacagcgaaggtgtgaggacatagatgagtgtcaggatccggacacctgttctcaactctgcgtaaatctggagggtggatacaagtgccagtgcgaggaaggctttcagttggatccacatactaaggcgtgcaaggccgtcggatcgattgcttacctctttttcactaacaggcatgaggttaggaaaatgacgctcgatcgcagtgaatacactagcctgatcccaaacctgaggaacgtcgtagctttggatactgaggttgctagcaatcggatatattggagcgatctctctcagagaatgatttgctctacccagctggacagggcacacggggtctctagctatgacaccgtcataagcagggacatccaagcacctgacgggctcgcagtcgattggatccactctaatatatactggaccgatagcgtgcttgggactgtgagcgtggctgataccaaaggcgtcaagcggaaaactctcttccgagagaatgggtctaagccaagagctattgttgtggatcctgtccacggcttcatgtattggaccgattgggggacgcctgctaagatcaagaagggcgggttaaatggggtggatatctacagtctggtaaccgagaatatccaatggccaaacggcatcaccctggacctgctgtccggaaggttgtactgggttgattcgaaactgcatagtattagtagtatcgacgtaaatggcggtaatcggaagaccatacttgaggacgagaagaggctggcccaccctttctctttggctgtgttcgaggataaggttttttggaccgatattattaacgaagcaattttttccgcaaatcgtttgacaggatccgatgtgaacctgctggcagagaacctgttaagccccgaagatatggtgctattccacaatctgacgcagcccagaggagtgaactggtgcgaaaggacaaccctctccaacgggggatgtcagtatctgtgtctcccagccccgcaaatcaaccctcactccccaaagtttacatgtgcctgccctgacggaatgctcctcgcacgagacatgcgatcttgtctaacagaggcagaagccgctgtggccacacaagaaacatctacagttcgcctgaaggtgagttcaactgctgtccgaactcagcacaccactacaagacctgttccagacacgtctagactcccaggagctactcccgggctaaccactgtcgaaatcgtgaccatgtcccaccaagccctcggggatgtggccgggcgtggaaacgaaaaaaagccttcctccgtgcgggcgctgtctatagtgctgcccattgtgcttctcgttttcctttgcctaggggtgttcttactgtggaagaactggaggcttaaaaatattaacagcatcaacttcgacaatcccgtgtaccagaagactaccgaggatgaggtgcacatctgtcataatcaggatggttacagctaccctagccggcagatggtgtcactggaggacgacgtggcg

SEQ ID NO: 15876 - DNA, 2580 bp, synthetic construct
  misc_feature 1..2580: note = source = /note="Description of Artificial Sequence: Synthetic coding sequence"
  source 1..2580: mol_type = other DNA
atgggaccatggggatggaaactgcgatggactgtcgccctcttgctcgccgcggccggaactgctgtcggggaccggtgtgagcggaacgagtttcagtgtcaggacggcaagtgtataagttataaatgggtatgcgatgggtccgcagaatgccaggacggaagcgacgaatctcaagaaacgtgtctgtccgtaacctgcaagtccggtgacttctcatgcggggggcgcgtgaaccgctgtattccccaattctggagatgcgacggccaggtcgactgcgacaacggctcagatgaacagggatgcccgccgaagacttgctcccaggacgagtttcggtgccacgatggtaaatgcataagccgacagtttgtgtgcgactccgacagagactgcctcgacggatcagatgaggcatcttgtcctgtccttacctgcggtcccgcatcttttcagtgcaactcaagtacatgtatcccccaactgtgggcatgcgacaatgatcctgattgcgaggacggctccgatgagtggccacagcgatgcaggggtctgtacgtttttcaaggcgattcctcaccttgtagcgcatttgagtttcactgcttgagtggagagtgcatacacagctcttggaggtgtgatggcggccctgattgtaaggacaaatctgacgaggaaaattgcgctgttgcaacttgcaggccagacgagttccaatgtagcgacgggaactgtatccacggctctaggcagtgtgaccgagaatacgactgcaaggacatgagtgacgaagttggttgcgtgaacgtaacactctgcgagggccctaacaagttcaagtgccactcaggagaatgcatcacactggacaaagtctgcaatatggcacgggattgtcgggactggagcgatgagcctattaaggagtgtggtacaaatgagtgcctggataacaacggcggttgttctcatgtttgcaatgatctgaaaatcggatatgaatgcctgtgcccagacggctttcagctggtcgcacagcgccggtgtgaggacattgacgaatgtcaggatcccgatacatgctctcagttgtgtgttaatttggaaggcggctacaaatgtcagtgcgaggaaggattccagctcgaccctcatacaaaggcatgcaaagctgtcggatccatcgcatatctgtttttcactaataggcatgaggtccggaagatgactttggaccggagtgagtacacttccctgatccccaatcttcggaatgtggtggctttggacacagaagtcgcctccaatcgcatctattggagcgatcttagtcaacgaatgatatgttctacgcagctcgaccgagcccacggcgtgtcttcctatgataccgtaattagcagagacatccaggcgccagatggcctggcagtggactggattcacagcaatatttattggaccgattctgtactgggaacggtgtctgtggctgacactaagggcgtgaagaggaagaccctgtttcgcgagaatggctctaaacctcgcgccatcgtcgtggacccagtgcacggctttatgtattggacagattgggggaccccagcaaagattaagaagggcgggctgaatggagtggacatctacagcttggtcaccgagaacatacagtggcccaatggaataacattggatttgctgtccggaagactctattgggtggattctaagctccatagcatttctagcattgatgtaaatggcggaaatcgaaagaccatactggaagatgaaaaaaggctggcacacccgttttccctggctgtgttcgaggataaagtgttctggacagacattattaacgaggccatcttcagcgctaacagactgactgggtcagacgttaatctgctcgcagagaatttgctgagcccggaagatatggtcctttttcataatttgacgcagcctagaggtgttaattggtgtgaaagaacaaccctcagtaacggaggctgccaatacttgtgtctgcccgccccccagataaatccccactcaccgaagtttacctgcgcctgcccagacggtatgctcctggcacgcgatatgcgatcctgtcttactgaggccgaagcagccgtagctacccaagaaacatccacagttcggttgaaggtgtccagtacggctgtcagaacccagcataccacaacgaggcctgttcctgacacttcccgcctgccaggagctacgcctggtttgactaccgtcgaaattgtgaccatgagtcaccaagcactgggcgatgttgccggaaggggaaatgaaaagaaaccatcctctgttagggccctgagcatagtgctgccgattgtgctcctcgttttcctgtgcctgggtgtgtttcttctctggaaaaactggcgcctgaaaaatatcaactctatcaacttcgacaaccccgtatatcagaagactacagaagacgaggtgcatatctgtcataaccaagacgggtatagttacccatctagacaaatggtgtctctggaagatgacgtagcc

SEQ ID NO: 15877 - DNA, 2580 bp, synthetic construct
  misc_feature 1..2580: note = source = /note="Description of Artificial Sequence: Synthetic coding sequence"
  source 1..2580: mol_type = other DNA
atgggtccatggggctggaaacttcggtggactgtggccttgctgcttgcagccgcaggaaccgccgtgggagacagatgcgaacgtaatgagtttcagtgccaagatggcaaatgcatctcctataagtgggtgtgtgacggctcggcagagtgtcaggatggcagcgatgagtcacaagaaacgtgtctgtccgtgacctgcaagagcggtgatttttcatgtggaggacgagtcaacagatgtatcccgcaattttggagatgcgatggccaggtagattgtgacaacggctctgatgagcagggttgtccacccaagacctgctcccaggatgagtttagatgtcatgacgggaagtgcatctccaggcaattcgtgtgtgacagcgatcgtgactgcttggacgggtccgacgaggcatcgtgtcctgtgcttacctgtggcccagcttcctttcaatgcaacagcagcacctgcataccgcagctctgggcctgcgataatgatccagattgcgaggacgggtcagatgaatggcctcaacggtgtcgagggctctacgtctttcagggagattcctcgccatgttcggcatttgaatttcattgcctgagcggtgagtgcatacactcgtcatggcgttgcgatggcggaccagattgtaaggataagtcggacgaggaaaactgcgcagtggccacctgccggcccgatgaatttcagtgttcggatggaaactgcatacatggatcgcgccaatgcgatcgtgagtacgactgtaaggacatgtcggacgaggtcggttgtgtgaacgtgaccctttgtgaagggccaaacaagttcaagtgtcactccggagaatgtattactctggataaggtctgcaacatggctagagattgccgcgattggtcagacgaacccattaaagagtgtggcaccaatgagtgcttggacaacaatggcggatgctcccacgtgtgtaatgacctcaagattggctacgagtgcctgtgtccagacggatttcagctcgtggcacagcggagatgtgaggacattgatgaatgtcaagatccagatacttgttctcaattgtgtgtcaatcttgaaggtgggtacaagtgtcaatgtgaagaaggatttcaacttgatcctcacaccaaagcatgcaaggcagtgggttcgatagcctacctgttctttactaacagacacgaggtgcgaaagatgactctggaccgaagcgaatacacctccctcatccctaacctccggaacgtggtcgcgctcgatactgaagtggcatcaaacagaatatactggtctgatcttagccaaaggatgatctgctccacccaactggatcgagctcacggagtgtcatcgtacgatactgtgatttcgcgcgatattcaagcacccgatgggctggcggtggactggatccattcgaatatctactggaccgattccgttctgggaacggtgtcagtggcagacactaagggtgtcaagagaaaaaccctgtttagagagaacggctcgaaacctcgggcaattgtggtggatccagttcatggatttatgtactggactgactggggaactcctgcaaagataaagaagggaggtctgaatggagtggatatctactcactcgtgactgaaaacatccaatggccaaatgggattaccctggatttgctctcaggacgactgtactgggtggactccaagctgcattccatttccagcatcgacgtcaacggaggtaataggaaaaccatactcgaggatgaaaagcggctcgctcatcctttttcgctggctgtctttgaagataaggtgttctggaccgatatcattaatgaagcgatctttagcgccaaccggctgactggatcggacgtgaaccttctggcagaaaacctgctttcgccggaggacatggtgctgttccataatctgacccagccccggggagtgaattggtgcgagcgcactaccctgtcgaatggtggttgtcaatacctgtgcctccctgcacctcaaatcaatccccactcgcctaagtttacctgtgcatgtccagatggaatgctgctggcacgagacatgcgatcgtgtttgacggaagcagaagcagccgtcgcaacgcaggaaaccagcacggtccgactgaaagtctcctctaccgcagtcaggactcaacatactaccactagaccggtgccggacacttcgagacttcccggagcgactcctggtcttaccacggtggaaatcgtgaccatgagccatcaggcactcggagatgttgcaggaaggggtaacgaaaagaagcctagctccgtcagagcgctttcgatcgtgctccctattgtgctgctcgtgttcctttgtcttggggtgtttctgctttggaagaattggcgcctgaaaaacattaacagcataaactttgacaaccctgtgtaccagaaaactactgaggatgaagtccacatatgtcacaatcaggatggttactcctacccttcgcggcagatggtttcactcgaagatgatgtggcg

SEQ ID NO: 15878 - DNA, 2580 bp, synthetic construct
  misc_feature 1..2580: note = source = /note="Description of Artificial Sequence: Synthetic coding sequence"
  source 1..2580: mol_type = other DNA
atgggaccgtggggatggaagctgagatggaccgtcgccctcctgcttgcagcagctggaactgcggtgggtgacagatgtgaacggaatgaattccagtgccaagatggtaagtgcatttcctacaaatgggtgtgcgatggatcggccgagtgtcaagacggatccgatgaatcgcaggaaacttgtcttagcgtcacctgtaagtccggtgacttttcgtgtgggggtcgcgtgaaccggtgtattccacagttctggcggtgtgatggacaagtcgattgcgataacggttcagatgaacagggatgtcctccaaagacctgttcgcaagacgaattccgatgtcacgacggaaaatgcatttcccgccaattcgtgtgtgacagcgatcgggactgtctggacggaagcgatgaggcttcctgtcctgtgctcacctgtggaccagcttccttccagtgtaactcgtcgacctgtatccctcaactgtgggcctgcgataacgatccagactgtgaggatggtagcgatgaatggccacaaaggtgcagaggattgtacgtgtttcaaggcgattcaagtccatgtagcgcgtttgaattccactgcctgtcgggtgaatgtatccattcatcctggcgttgtgatggaggtccagattgtaaggataaatccgatgaggaaaactgcgcggtcgcaacttgcaggccagacgagtttcagtgctcggatggtaactgtatacatggatcaaggcaatgtgatagggaatacgactgtaaggatatgagcgatgaagtgggttgcgtcaatgtaactctgtgtgaagggccaaacaagtttaagtgccactcaggcgaatgcattactctggataaggtctgcaacatggcaagagactgccgggattggtccgacgaacctataaaggaatgtggaactaacgaatgtctggacaataacggaggatgttcccatgtgtgtaacgatctgaagatcggctacgaatgtttgtgtccagacggattccagcttgtggcacaacgccgctgtgaagatatagatgagtgccaggaccccgatacttgttcccaactgtgcgtgaaccttgaaggaggttacaagtgccaatgtgaagaaggtttccaattggaccctcataccaaagcatgcaaggcagttggatcgatcgcatacctcttctttaccaaccgtcatgaagtcaggaaaatgaccttggatcggtccgagtacacctccctgattccgaacctgagaaacgtcgtggcattggataccgaggtggcctcgaaccgcatatactggtcagacctgtcccaacggatgatttgcagcactcaactggaccgggcgcatggggtttcatcctacgatactgtcatttcaagggatatccaagcccccgatggacttgctgtcgattggattcattcgaacatctactggactgactcggtgcttggaaccgtgtcggtcgcagacaccaagggtgtcaaaagaaagaccctttttagggaaaacggatcaaagccacgtgcaatcgtggtggacccggtccatggttttatgtactggaccgactggggaactcctgcaaagattaagaaggggggcctgaacggtgtcgacatttactcgctggtgaccgaaaacatacagtggcctaatggaattacccttgatttgctgtccggtcgcctgtactgggtggatagcaagctccattcgatatcatccatcgacgttaacggtggaaaccgcaagactattctggaggatgaaaaacggcttgctcatccttttagcctggccgtgtttgaagataaagtcttttggactgatatcatcaacgaagcaatcttttcggccaatagacttacggggtcggacgtcaatcttcttgcagaaaacctgctgagcccggaggatatggtgctgtttcataatctcactcaacctagaggggtcaactggtgcgaacgcaccactcttagtaatggtggatgtcagtacctctgcttgccggcaccacaaatcaacccacattcacctaagttcacttgtgcatgtcctgatgggatgctgctggcacgagatatgcgttcctgtctcactgaggcagaggcagctgtggcaacccaggaaacctcgactgtgagacttaaggtttcatccacggcggttcggacccaacataccactactcggccagtgcccgacacttcgcgcctccccggggcaacccctgggctgaccactgtcgaaattgtgactatgtcccatcaggcacttggtgacgtggccggcaggggaaatgaaaagaaaccttcgagcgtgcgtgccctgtccatcgtgctcccaatagtgcttctcgtgtttctttgtctgggagtctttcttctctggaaaaactggagactcaaaaacatcaattcaattaactttgacaaccctgtgtaccaaaagacgactgaagatgaagtgcacatttgtcataaccaagacggatacagctacccatcacgccagatggtcagccttgaagatgatgtggca

SEQ ID NO: 15879 - DNA, 2580 bp, synthetic construct
  misc_feature 1..2580: note = source = /note="Description of Artificial Sequence: Synthetic coding sequence"
  source 1..2580: mol_type = other DNA
atgggaccctgggggtggaagctgcgctggacggtcgcacttctgcttgccgcagcaggcaccgcagtcggcgaccggtgtgaacgtaacgaattccaatgtcaagacgggaagtgcatctcatacaagtgggtgtgtgacggctcggcagagtgccaggacggatcagacgagtcccaggagacttgtctgagcgtgacctgcaaatccggagatttttcatgtggagggcgtgtcaaccgttgtattcctcaattttggagatgcgatggacaagtggattgtgacaatggctcagatgagcaggggtgcccacctaagacgtgcagccaggacgaattcagatgccatgacggaaagtgtatctcgaggcaattcgtctgcgactcggacagagattgtttggatggatcggatgaggccagctgccctgtcttgacttgtggtcccgctagcttccaatgtaactcgtcgacttgcatcccgcagctctgggcgtgtgataacgatcccgattgtgaagatgggagcgacgaatggccacaacgctgtcgtggcctgtacgtctttcagggagacagctcgccatgttccgcctttgaattccattgtctttcgggtgagtgtattcatagctcctggcgatgcgacggagggcctgattgcaaagataaaagcgacgaagagaactgcgccgtggcgacctgtcggccagatgagtttcagtgttcggatggtaattgcatccatggatcacgtcaatgtgaccgggaatacgattgcaaggatatgtccgatgaagtgggatgcgtgaatgtgactctgtgtgaaggccctaacaaattcaaatgtcattcaggagagtgtatcaccttggacaaggtgtgtaatatggctagagattgtcgagattggagcgatgagcccatcaaggaatgtgggactaatgagtgcctcgataacaacggcggctgttcccacgtgtgtaacgatctgaagattggatatgaatgtctttgtcctgacggatttcaactggtggcccaaagacgctgtgaagatattgatgaatgccaagatcccgacacttgttcgcagctgtgtgtgaacctcgaaggtggatacaaatgtcagtgtgaggagggattccaactcgaccctcatactaaggcttgtaaggcagtgggttcaatagcgtatctgtttttcaccaaccggcacgaagtgcggaaaatgactttggatcggagcgaatacactagcctcatcccaaacttgaggaacgtcgtggcattggatacggaggtcgcatccaacagaatttactggagcgatctgtcccagcggatgatctgttcgacccaactggatcgggcacatggagtgtcgtcctacgataccgtgattagcagagatatacaggcaccagacggtctggcagtcgactggattcattccaacatttactggaccgattcggttctgggtactgtgtcggtggcggataccaagggggttaaacgcaagaccctttttagagaaaacggtagcaaacctcgcgcaattgtcgtggaccctgtgcatgggttcatgtattggactgattggggcactccggctaagatcaaaaagggcggtcttaatggagtggacatctactccttggtgactgagaatatacagtggcctaacggtataaccctggatcttctctccggtagactgtactgggtcgactccaagctgcactctatctccagcattgatgttaatggtgggaacaggaaaaccattcttgaagatgaaaagagacttgcccatccattttcactcgcagtatttgaagataaagtcttttggaccgacatcattaacgaagctatcttctccgcaaacaggctgaccgggtccgatgtcaaccttcttgcggaaaacctgctgtccccagaagatatggtgcttttccataaccttacgcaaccaagaggcgtgaactggtgcgaacgaaccaccttgtcaaacggtgggtgccaatacctgtgcctgcctgcgccccaaatcaatccccattcgcctaaattcacttgtgcctgtccagatggaatgcttctggcccgcgatatgagatcatgtctcacggaagctgaagcagctgtcgcaactcaagaaacgtcgactgtgaggctgaaggtcagctcgaccgctgtgaggacgcaacataccaccacccgtccagtgccagatacctcccgactgccaggagcaacgccaggcctcactaccgtcgagattgtgaccatgtctcatcaggcattgggcgacgtggccgggcggggaaatgagaaaaagccctcgtcagtgcgcgctctgtccatcgtgctgcccatagtgcttctggtgtttctttgcctgggagtctttctgctgtggaagaactggagacttaagaacattaactctatcaattttgataaccccgtttatcaaaagacgactgaggacgaagtccacatctgtcataaccaagatggttactcctatccatcacggcaaatggtgtccctggaagatgacgtggca

SEQ ID NO: 15880 - DNA, 2580 bp, synthetic construct
  misc_feature 1..2580: note = source = /note="Description of Artificial Sequence: Synthetic coding sequence"
  source 1..2580: mol_type = other DNA
atgggtccttggggctggaagctgaggtggaccgtggcgctgcttcttgccgctgcaggcaccgcagtgggtgataggtgtgagcggaacgagtttcagtgtcaggatggtaaatgcatttcatacaagtgggtgtgtgacggctcggcagagtgtcaagatggttctgatgaatcgcaggaaacctgtctgtcagtcacctgtaaaagcggagatttttcctgcggaggcagagtcaacagatgtattccgcagttttggcggtgtgacggtcaggtcgattgcgataacggatcggatgagcaaggatgcccacccaaaacgtgtagtcaagatgagttccgttgtcatgatggaaaatgtattagccggcaatttgtctgcgacagtgaccgggattgtctcgatggatccgatgaggcctcgtgccctgtccttacctgcgggccagccagcttccaatgtaactcctcaacttgcattccacaactctgggcttgtgataatgatcccgattgtgaggatggaagtgacgaatggccccaacgctgtagagggctctacgtgttccaaggggatagctccccttgctcggcgtttgaatttcattgtcttagcggagaatgtattcattcgtcctggcgatgtgatgggggtcccgactgtaaggacaaatcggacgaagaaaattgtgcggtggcgacttgtcgcccagatgaattccagtgttcggacggcaactgtatccacggaagccggcagtgtgacagagagtacgactgtaaagatatgtcggacgaagtgggatgcgtcaatgtgaccctttgcgaagggccaaacaaattcaagtgtcattcgggtgaatgtatcactcttgacaaggtgtgtaatatggctcgtgactgcagagactggtccgatgaacctattaaggagtgtggtacgaacgagtgcctcgacaacaatggtggatgctcgcatgtctgtaacgatctcaagataggttacgaatgtctctgtccggacggctttcagttggtcgcacaacgcaggtgtgaggacatcgatgaatgccaagacccagatacctgtagtcagctttgcgtgaatctggaaggtggttacaaatgccagtgcgaggagggatttcaactggacccgcataccaaggcttgtaaggcagtgggatcgattgcatacctgtttttcaccaatcgccatgaagtcaggaaaatgaccctggatcgcagtgaatacacctcccttatccctaacctgcgcaacgtggtggcattggataccgaagtggcaagcaaccgaatctattggtccgacctttcgcaaagaatgatttgctctacccagcttgaccgggcacacggggtgtcaagctacgataccgtgatctcccgtgacatccaggcaccagatggcttggcagtcgactggatacacagcaatatctattggacggattccgtgctcggtaccgtgtcggtggctgatactaagggcgtaaagcgcaagaccctgtttagagaaaacggctccaagcctagagccattgtggtggatcctgtgcacggatttatgtactggaccgattggggtactccggcaaagattaagaaggggggcctgaacggagtggacatttactcccttgtaactgagaacattcagtggcccaatgggataaccctggatctgctgagcggaaggctgtactgggtcgattcgaagctccactcaatttcgagcattgatgtgaacggaggtaataggaaaactatattggaagatgagaagagattggcccatccattttccctggcagtctttgaagataaggttttctggacggacattatcaacgaagcaatcttctcagccaaccggttgactggaagcgatgttaatcttctcgccgaaaaccttttgtcacctgaagatatggtgctgttccataatcttactcaaccaagaggagttaactggtgtgaacgtaccacgttgtccaacggtggctgccaatacctctgccttcctgcgccccagatcaacccacactctccaaagtttacttgcgcttgtcctgatggcatgctgctggccagagatatgcggtcctgtctcactgaagcagaagccgcagtggcaacccaggaaacttctactgttagattgaaggtgtcatcaactgcagtgaggacccagcatactaccacccgccccgtgcctgacacttcacgactgcccggggcgactccaggactgacgaccgtggagatagttaccatgagccaccaagcccttggtgatgtggcaggtagaggaaacgagaagaaaccttcgtcagtacgagcacttagcattgtcctgccaatcgtgcttctcgtgttcctttgcctgggcgtctttctgctctggaagaattggcgtctcaagaacatcaattccattaactttgacaaccctgtctaccaaaaaactactgaggatgaagtgcatatttgccataatcaagatggctactcgtacccttcacgacaaatggttagtcttgaagatgacgtcgca

SEQ ID NO: 15881 - DNA, 2580 bp, synthetic construct
  misc_feature 1..2580: note = source = /note="Description of Artificial Sequence: Synthetic coding sequence"
  source 1..2580: mol_type = other DNA
atgggaccttggggctggaaacttcggtggactgttgccctgctgctggcagccgccggaactgcggtgggggatcgttgtgaacgaaatgagtttcagtgccaggatggcaaatgtatctcatacaagtgggtctgcgacggaagcgcagaatgccaagacggatcagatgaatcccaggaaacgtgcctgtccgtaacctgcaagagcggggacttctcgtgcggaggacgggtaaatcggtgtatcccgcaattctggcgttgtgatggacaggtcgactgcgataacggctccgacgagcagggatgtccgccaaagacttgctcccaggatgagttcagatgccatgacggaaaatgcatctcacgacaatttgtgtgtgactcagacagagattgcctcgacggttccgatgaagcgagctgcccagtcctcacctgtggaccagcatcttttcaatgcaactcgtccacctgcattccacagctttgggcatgcgataatgacccggattgtgaggacggatcggacgaatggccccaacggtgccggggtctgtacgtctttcagggcgattcatcgccctgctccgcgttcgagttccactgcctgtcgggtgagtgcatccactcatcgtggcgctgcgacggaggtccagattgcaaagataagagcgatgaggaaaattgcgcggtcgctacgtgccgccctgacgaattccaatgttccgatggaaactgcattcacggctcccgccagtgcgacagagagtacgattgcaaggatatgtccgatgaggtgggttgcgtgaacgtgactctgtgtgaaggacccaacaaattcaaatgccattccggggaatgcatcaccctggacaaagtttgcaacatggcacgcgattgtagagactggagtgacgaacccattaaagagtgcggtaccaatgaatgcttggataacaacggaggctgctcgcacgtgtgtaatgacctgaaaataggttacgaatgcttgtgccccgacggcttccaactcgtggcccagagacgctgcgaagatatcgacgagtgccaggatccagacacctgttcccagctctgcgtgaacctggaaggaggatacaagtgtcagtgtgaggagggattccagctggatccacacactaaggcgtgcaaggccgtcgggtccatcgcttacctgttcttcaccaacaggcacgaagtgcggaagatgactctcgaccggtccgagtatacgtcgctgatccccaacttgcggaacgtggtggcattggataccgaagtggcaagcaatcggatctactggtcagacctttcccaacgcatgatctgcagcacccagcttgatagggctcacggagtctcatcatacgatactgtgatctccagagacattcaagcaccggacgggctggccgtggactggattcactctaacatctactggactgatagcgtgctggggacggtgtcagtcgcagacaccaaaggggtgaagagaaaaaccctgttccgcgagaatggaagcaagccgcgggcgatcgtggtcgacccggtgcatggcttcatgtactggaccgactggggaactcccgcgaagatcaagaagggaggactgaatggagtcgacatttactcactcgtgaccgagaatattcagtggccaaacggcattaccctggacctgctgtctggccggctttattgggtggatagtaaacttcatagcatcagctccatcgacgtgaatggaggaaataggaaaaccatccttgaggacgagaaacgcctcgcgcatcccttcagccttgcagtgttcgaggataaggtgttttggactgatatcatcaacgaagcgatcttctcggcaaatagattgaccggttccgatgtcaacttgcttgccgagaacctgctgtccccggaagatatggtgctgttccataacctgacccaaccgcggggagtgaattggtgcgagagaaccactctctcgaatgggggctgccagtacttgtgcctcccggccccgcagatcaacccgcactctccaaagttcacttgcgcatgcccagatgggatgctgctcgccagagacatgaggtcgtgccttactgaagccgaagctgcggtggccacccaggaaaccagcactgtgagactcaaggtgtcctcaactgcagtgcgcacccagcatacgaccactcgcccagtcccggacacttcgcggctcccaggcgctaccccgggccttactaccgtggaaatcgtcaccatgtcgcatcaggcgttgggggacgtggcggggcgggggaacgaaaagaagccgtcatcggtgcgcgccctgtccatcgttctgccaatcgtgctgctcgtgtttctgtgtctgggagtgttcctgctctggaagaattggcggctgaagaacatcaattccatcaatttcgataaccccgtgtaccaaaagaccactgaggatgaggtgcacatttgtcacaaccaggacggctactcgtacccttccagacagatggtgtcgctggaggatgacgtggcc

SEQ ID NO: 15882 - DNA, 2580 bp, synthetic construct
  misc_feature 1..2580: note = source = /note="Description of Artificial Sequence: Synthetic coding sequence"
  source 1..2580: mol_type = other DNA
atgggaccttggggatggaagctcaggtggactgtggccctgcttctggcagctgcgggtactgccgtgggcgaccggtgtgaacgcaacgagtttcaatgtcaggatggaaagtgcatctcgtacaagtgggtgtgcgatggatccgcggagtgccaggacgggtcggatgaatcgcaagaaacttgcttgtccgtcacttgtaagtcgggagacttctcctgcggagggagggtcaataggtgcatcccacagttctggcggtgtgacggacaggtggactgcgacaacggatcggatgagcagggctgtcctccaaaaacgtgcagccaagatgagttcagatgtcacgatggaaaatgtatctcccgccagttcgtctgcgactccgaccgggactgtctggatggatctgatgaggcatcttgcccagtgctgacttgcggacctgcctcgtttcagtgcaactcctcgacttgcatcccgcaattgtgggcctgcgataatgatccagactgcgaagatgggagcgacgagtggccgcaaagatgccgggggctctatgttttccaaggagactcatccccgtgcagcgccttcgagttccactgcctgtctggcgaatgcatccattcctcctggcggtgcgatggaggcccggactgcaaagataaatcagacgaagaaaactgcgccgtggccacctgcagaccggacgagttccagtgctcggacggcaactgcatccacggctcgcgccagtgtgaccgtgaatacgactgcaaggacatgagcgacgaggtcggatgcgtgaacgtgactctgtgcgaaggtcccaacaagttcaaatgccattcgggtgagtgtattactctggacaaagtgtgcaatatggcacgcgactgccgagactggagcgacgagccgatcaaggaatgcggcactaacgagtgtctggacaacaacggaggctgctcgcatgtgtgtaacgacttgaaaattggctacgaatgcctgtgtccggatggcttccagctggtggcccaaaggcggtgcgaagatatcgatgaatgtcaggatccggacacgtgtagccagctgtgcgtgaatctggaaggcggatacaaatgccagtgcgaagagggattccaactcgacccacataccaaggcatgcaaagcagtcggatcgatcgcttacctcttcttcactaatcgccatgaggttcggaagatgactctggaccgctcggaatacacttccctgatcccgaacctcaggaacgttgtcgcactggacaccgaagtcgcgtccaaccggatttactggtcagatctgtcacaacggatgatctgcagcactcaactggatagagcacacggagtctcctcgtatgataccgttatcagccgagacatccaagcccctgacggactggccgtggactggatccacagcaacatatactggaccgactcggtgctgggaactgtctcagtcgccgacactaagggagtgaaacgcaagaccttgtttcgcgaaaacggaagcaagccacgcgccatcgtggtggaccctgtccatggtttcatgtactggactgattgggggactccggctaaaatcaaaaaggggggactgaacggagttgatatctattccctcgtgactgaaaacatccagtggccaaacggcattaccctcgatttgctcagcggaaggctgtactgggtcgactcgaaacttcactctatttcctccatcgatgtgaacggaggcaatcgaaagacgatcctggaggacgaaaaacgcctggcccacccattttcacttgctgttttcgaagataaggtgttttggaccgatatcattaacgaggcaatcttttccgctaacagactgactgggtccgatgtgaatctgctcgcggagaacctgctgtcgcctgaggacatggtgctgttccacaacctgacccaacctcgcggcgtgaactggtgcgagagaactactctgtccaacgggggttgtcaatacctgtgtttgccagctcctcagatcaacccacactcacctaagttcacttgtgcatgcccggacgggatgctgctcgcgcgcgatatgagaagctgcctcaccgaggccgaggccgcagtggccactcaggagacttcaaccgtccggctgaaggtgtcaagcactgccgtcaggactcagcacactactacgaggcctgtccctgacacttcccgccttccaggtgctactccgggactcaccaccgtggaaatcgtgacgatgtcgcaccaggctctcggagatgtggctggacgcgggaacgagaagaagccctcgtcagtgcgcgccctgagcatcgtcctgccaatcgtgctgctggtgttcctctgcctgggagtctttctgctctggaagaactggcggctcaaaaacatcaatagcatcaatttcgataatccagtgtaccaaaagaccaccgaggatgaggtgcacatttgccacaaccaggatggatactcctacccgtcccggcagatggtatctctcgaggatgatgtggcc

SEQ ID NO: 15883 - DNA, 2580 bp, synthetic construct
  misc_feature 1..2580: note = source = /note="Description of Artificial Sequence: Synthetic coding sequence"
  source 1..2580: mol_type = other DNA
atggggccgtggggctggaagctgagatggacagttgcccttctgctggccgcagccgggacagcagtcggtgatcgatgtgaacgaaacgagttccagtgtcaagatggtaaatgcatttcctataagtgggtatgcgatggaagtgcggaatgtcaggatgggtctgacgagtcacaggagacctgcctgtcagtaacctgcaagtcaggggactttagttgtggaggaagagtgaaccggtgcatccctcagttttggcgttgtgatggccaggtggattgcgacaacgggtcagacgaacaggggtgcccaccaaagacatgttctcaggatgaattccgttgccacgacggaaaatgtatttcgagacagttcgtttgtgattctgatcgcgattgtttagacggcagtgatgaagcctcatgcccggttcttacttgcgggcctgctagcttccagtgcaacagctcgacatgcatcccccagctctgggcctgtgataatgacccggactgcgaggatggatccgacgaatggccacaaagatgccgtgggctctatgtctttcagggtgattccagcccttgcagtgccttcgagtttcattgtttgtcgggcgagtgcattcacagctcatggcggtgtgacggaggcccagattgtaaggacaaatccgatgaggaaaactgcgctgtcgctacctgcaggcccgacgagtttcaatgctccgatggcaattgcattcatggttcaagacagtgcgacagggaatacgattgtaaggacatgagcgatgaagtgggatgtgttaacgtgaccctgtgtgagggaccaaacaagttcaaatgccattctggagagtgtattacactggataaggtctgtaatatggctagagactgtcgcgactggtctgatgagccaatcaaagagtgtggtacaaatgaatgcctggacaataatggcgggtgcagtcacgtctgcaatgatctcaagattggctatgaatgcctttgtcccgacggatttcaactggtagcacagcgtcggtgtgaagacatcgatgaatgccaggatcctgatacttgtagccagctttgcgtcaaccttgagggaggctataagtgccagtgtgaagaagggttccagttggatccacacaccaaggcatgcaaggcagtggggtcaattgcttacctgttctttactaacaggcatgaagtgcgtaagatgaccctcgatagatctgagtatactagtcttatccctaatttgagaaatgtcgtagccttggacactgaggtcgcgagcaatagaatctattggtccgacttatctcagcggatgatctgctccacacagctggatcgagcccacggcgtgagcagctacgacacagttatcagtcgggacatccaggcccccgatggtttggctgtggactggatccactctaatatctattggacagactccgtactcgggactgtgagtgtggccgacacaaagggagtgaagaggaagaccctgttcagggagaatggctcaaagccaagagccattgtggtggatccagtgcacgggttcatgtactggacagactggggtacgcctgcaaagatcaaaaagggtgggttaaatggggtggatatctactccttagtgacagagaacattcaatggccgaacggcatcactcttgatctcctgagcggccggctctattgggttgattctaagttgcatagtatcagctcgattgatgttaacggtggaaaccggaaaaccatcctggaggacgagaagagactggcgcatccattctccctagcagtattcgaggataaggtgttttggaccgacattataaatgaagctatcttcagtgccaacagactcaccggcagcgatgtgaacctactggcagagaatctcctctctcctgaggacatggtcttatttcataatctcactcagccgagaggcgtgaactggtgcgagaggacaactcttagcaatggcggctgccagtatctatgtttgccagcacctcagattaaccctcattctcctaaattcacgtgcgcttgcccagacggaatgcttctggcccgggatatgcgctcttgtctcacggaggccgaggccgccgtggctacccaggagacgagcactgtaaggctgaaagtgagtagcacggccgttcgaacccagcacacaaccacaagacctgtgcccgataccagccgtttgccgggagcaacacccggactgactaccgtggagatcgtgaccatgagtcaccaggctctgggcgacgtggcaggaaggggaaatgagaagaagccatcttctgtgagagccctctccatagttttacccatcgttctgctggtgtttctgtgtctgggagtgttcttactgtggaagaattggcgacttaaaaatatcaatagcatcaactttgataaccctgtctatcaaaagacgaccgaggacgaggtgcacatctgtcacaatcaggatggatatagctaccctagtagacagatggtgtcactggaggacgacgtcgca

SEQ ID NO: 15884 - DNA, 2580 bp, synthetic construct
  misc_feature 1..2580: note = source = /note="Description of Artificial Sequence: Synthetic coding sequence"
  source 1..2580: mol_type = other DNA
atgggaccatggggatggaaactgcgatggaccgtggcactcctgctggctgcagctggcaccgctgtaggagatcggtgcgaacgcaacgagttccagtgccaggacggaaaatgcatctcgtacaagtgggtgtgcgatggatcagccgaatgtcaagatggttccgatgaatcccaggaaacctgcctgtccgtcacttgcaagtcgggagacttctcctgcggaggcagagtcaaccgctgcatcccgcagttctggaggtgcgacggacaggtcgattgcgacaacgggtccgacgaacagggctgcccacctaagacgtgcagccaagatgagttcagatgccatgatgggaagtgcatctcgcgccagttcgtgtgcgactcggaccgggactgcctggatggctcagatgaggcctcgtgcccagtcctcacctgtggcccagccagctttcagtgcaactcatcgacttgcatcccgcaactgtgggcctgcgataacgacccagactgcgaagatgggtcggacgaatggccccaacgttgcaggggactttacgttttccagggagactcaagcccatgcagcgcgtttgaattccactgtcttagcggtgaatgcatccactcatcgtggagatgcgacggaggtcctgactgcaaagacaagtccgatgaggaaaactgcgccgtggccacgtgtcgcccggacgaattccagtgctcggacggtaattgcattcacggaagccggcaatgcgatcgcgagtacgactgtaaggacatgtcggacgaagttggatgcgtgaacgtcactctgtgtgagggaccaaacaagtttaagtgtcattccggggaatgcatcactctggataaggtgtgcaacatggcacgcgactgcagggactggtccgacgagccgatcaaggaatgcggtactaatgaatgtctcgataacaatggaggttgcagccatgtgtgtaacgacctgaaaatcgggtatgagtgtctgtgccccgacggcttccaactggtggcacagaggcgctgcgaggacatcgatgaatgccaagacccggacacttgctcccaactgtgtgtcaaccttgaaggagggtacaagtgtcagtgcgaagagggatttcagcttgatccgcacactaaggcctgtaaagctgtgggatcaattgcctacctgttctttaccaaccggcacgaggtccgcaaaatgaccttggatcgctcggaatacacctcactgatccctaatctccggaacgtggtcgccctggacactgaggtggcgtcaaaccgcatctactggtctgatttgtcacagaggatgatttgttccacccaactcgatagagcccacggagtctcctcgtacgataccgtgatcagcagagatattcaggccccagatggattggccgtcgactggattcattcgaatatctactggacggactcggtgctgggcactgtgtcagtggcggacaccaagggggtgaagcgcaaaactctcttccgcgagaatggcagcaagccccgggcaattgtcgtggacccggtgcacggcttcatgtactggaccgactggggaactccggcgaaaatcaaaaaggggggcctcaacggagtggacatctactcacttgtgaccgagaacatccaatggcctaatggaattaccctggatctgctttcggggcgcctttactgggtggattcaaagctgcactccatcagctccatcgatgtgaacggcggaaacagaaagaccatcctggaagatgaaaagcggctggcccacccattttcactggctgtctttgaagataaagttttctggaccgacatcatcaacgaggcgatcttctcggcgaacagactgactgggtccgatgtcaatctccttgcagaaaatctgctgtcaccggaggacatggtgctgttccacaatctcacccagccaaggggggtcaattggtgcgagagaactaccctctcaaacggaggatgccagtatttgtgcctgccagccccacagatcaatcctcactcgcccaagttcacctgcgcctgtccagacggcatgctgctcgcccgcgatatgcgcagctgcctcactgaggctgaagccgcggtggcgacgcaagaaacctcgaccgtccggcttaaggtgagctcgaccgccgtgagaactcagcacaccactacccgcccagtgccggacaccagccgcctgccaggcgcgactccgggattgactaccgtggagatcgtgacgatgagccaccaggccctgggagacgtggctgggcgcggaaacgagaagaagccatcgagcgtcagggcgctgtcgatcgtcctgccgatagttctgctggtgttcctttgccttggagtgttcctgctgtggaagaattggagattgaagaatatcaactcaatcaacttcgataacccggtgtatcagaaaactaccgaggacgaagtgcacatttgccacaatcaagacggatactcatacccgtccagacagatggtgtccttggaagatgacgttgcc

SEQ ID NO: 15885 - DNA, 2580 bp, synthetic construct
  misc_feature 1..2580: note = source = /note="Description of Artificial Sequence: Synthetic coding sequence"
  source 1..2580: mol_type = other DNA
atgggcccctggggatggaagttacgatggacggtcgctttacttttggcggctgcaggcacagcagttggcgatcgctgtgaacgtaacgagtttcagtgtcaggatggaaagtgtataagttataaatgggtctgcgatggatccgcggagtgccaggatggatcagacgaatcgcaagagacctgcctgtccgtaacatgtaagagcggcgacttcagttgtgggggacgcgtgaatagatgcatccctcaattctggcggtgtgacggccaggtcgattgcgataatggatccgatgaacaaggatgcccacctaagacatgctcgcaggatgagttccggtgccacgacggcaagtgcataagtcggcagtttgtgtgtgatagtgatagagactgtctggacggcagtgacgaggcatcttgtcctgtacttacttgtgggcccgcgagtttccagtgcaatagcagcacttgcataccccagctctgggcttgcgacaacgatcccgactgcgaggacggcagtgatgagtggccgcagcgatgtcgaggtctttacgtgtttcaaggcgatagtagcccctgttctgcattcgaatttcactgtctgtctggggaatgtatccacagttcctggcggtgcgatggaggacctgactgcaaagacaagtctgacgaggagaactgtgcagtggcgacctgtaggcccgatgagtttcagtgtagcgatggcaactgtattcatggtagcaggcaatgcgatcgggagtacgattgtaaggatatgtctgacgaagtaggctgcgtcaatgtcacgctctgcgagggcccgaataagtttaaatgtcactcaggagaatgcatcactctagacaaagtgtgcaatatggccagggattgccgtgactggtccgatgagcccattaaggagtgcggaacgaatgagtgcctcgacaacaatggcggctgttcacacgtctgcaatgatcttaaaatcggttatgaatgtctctgtccagacggctttcagctagtggcccaaaggcgatgcgaggacatcgatgaatgtcaggatccagatacatgctcccagttatgcgtgaatcttgagggcggctacaaatgtcagtgcgaggaaggcttccagttggatccgcacacaaaggcgtgtaaggccgtgggcagtatcgcttatctctttttcacaaacagacacgaggtgagaaaaatgactctcgatcggagcgaatacactagcctgatcccaaacttgcggaatgtggtggccctggacactgaagtcgcttccaacaggatatactggagcgatctttcacagagaatgatctgttcgacacaactggaccgggctcatggcgtgtcatcatacgacaccgtaatttcccgtgacatccaggccccagacggcttggctgtggactggatccattccaatatttactggacagattctgttctgggcaccgtatcagttgccgacaccaagggcgtgaagcgtaagactctctttcgcgagaacggttctaagccgagggcgatagtagtggacccagtacatggatttatgtactggaccgattggggtactcctgcgaagatcaagaagggcgggctcaacggtgtggacatctactcgctagtgaccgagaacatacagtggcctaatggaatcactctggatttacttagcgggagactctactgggtggactccaagctgcactcaatctcgtctatcgacgtcaatggcgggaatcgcaaaactatcctggaagacgagaaaagactcgcacacccctttagtctggcggtattcgaggacaaggtgttctggaccgacatcatcaacgaggctatcttctcagccaatagactgactggttcagatgttaatctgttggccgagaacctgctgagtcccgaagatatggtgctgttccataatcttactcagcccaggggggtgaactggtgcgaacgcacaaccctttcaaacggcggctgccagtatctgtgcctccctgcacctcagatcaatccccactcccccaaatttacctgcgcctgccctgatgggatgctcctggcacgcgacatgcggtcttgcttgacagaggcagaagctgctgtggccacccaagaaaccagtaccgtacggctcaaggtgagctctacagccgtccgaacccagcacacaactacccgacctgtgccagacacgtccagattgcctggggctaccccaggcttaacaacagtggagattgtgacaatgagccatcaagcactgggcgacgtcgcaggacgtggcaacgaaaagaagcctagtagcgtccgcgctctgtctatagtcttgcctattgtgcttttggtgttcctttgtcttggagtgttcttattgtggaagaactggaggctgaagaatataaattctattaacttcgataacccagtctaccagaagactacagaggatgaggtgcacatctgccataaccaagacgggtacagttatcccagccgtcagatggtgtccctagaggacgacgttgct

SEQ ID NO: 15886 - DNA, 2580 bp, synthetic construct
  misc_feature 1..2580: note = source = /note="Description of Artificial Sequence: Synthetic coding sequence"
  source 1..2580: mol_type = other DNA
atgggaccttggggttggaaactgaggtggactgtggcactgctgctggcagcggctggaacggccgtgggggaccgatgtgagaggaacgaatttcaatgtcaggacggcaaatgcatttcgtacaaatgggtctgtgatggctctgccgagtgtcaagatgggtcagatgagtcgcaggaaacttgtctttcggtcacttgcaagagcggggatttctcatgtggagggcgcgtgaacaggtgtataccacagttctggcgctgtgatggtcaagtggattgtgacaatggttccgatgaacaaggatgccctcctaagacttgcagccaggacgaattccgctgtcatgacggtaagtgtatttcccgacaattcgtgtgcgattccgatcgagactgccttgatggctcagatgaggcctcgtgtcccgtgcttacttgcggacctgcatcatttcagtgcaattcctcaacttgtattccccaactttgggcatgtgataatgaccccgattgtgaggatggatcggacgaatggcctcaacgttgtagaggtttgtacgtgtttcagggagattcatcgccatgctcggcctttgaattccattgtctcagcggagaatgtattcattcttcatggcgatgcgatggggggcctgattgcaaagataagagcgatgaagagaactgtgcagtcgcgacctgtagaccagatgagtttcagtgttccgatggaaattgtatccatgggtcgaggcaatgtgacagagaatacgactgtaaggacatgagcgatgaagtgggttgcgtgaatgtcactctgtgcgaaggtcctaacaagttcaagtgtcattcgggagagtgtattacccttgataaggtctgtaacatggcaagagactgccgagactggtccgatgagcctattaaggaatgcggcacgaatgagtgtcttgataacaatggtggctgttctcacgtctgtaatgacctcaagatcggatacgaatgtctgtgcccagacggatttcagctggtggcacaacgacgctgcgaagatatagatgaatgtcaggatccagatacctgttcgcaactttgcgtgaatcttgaaggaggctacaaatgtcaatgtgaggaaggcttccagctggacccacacactaaggcatgtaaagcagtgggttcaatcgcctacctgttctttaccaaccggcatgaagtgaggaaaatgactcttgacagatctgagtacactagcctgattcctaatctgcgaaacgtggtggcattggataccgaagtggcatcgaatcggatctattggtcggatctcagccaaagaatgatctgtagcacccagcttgacagagcgcatggggtttcgtcgtacgacaccgtcattagccgggacattcaggcacctgatgggctcgcagtggattggatccactccaacatttactggaccgacagcgtcctgggaaccgtctcggtcgccgatactaaaggggtgaagcgtaagactctgtttcgcgagaacggcagcaagccacgcgcaatcgtggtcgacccagtgcatggatttatgtactggactgactggggaacgcctgcaaagattaagaagggcggactcaacggcgtggatatctactccctggtcaccgaaaacatccaatggcctaacggtataactctggaccttctctcaggacggctttactgggtggactccaaactgcattccataagctcaattgatgttaatgggggaaataggaaaaccattctggaggatgaaaaaaggctggcccacccattcagtctcgcagttttcgaagataaggtgttttggactgacataatcaatgaggctatcttttcagctaacaggctgaccgggtctgatgtgaacctgctggcagaaaaccttctgtcaccagaggatatggttctttttcacaacctgactcaaccccgtggcgtcaactggtgtgaaaggactaccctctcaaatggaggttgtcagtacctctgtttgcctgcacctcagattaaccctcatagccctaaattcacctgcgcatgtccagatggaatgctgctcgcgagagatatgagatcatgtctgacggaggccgaggcagccgtcgccacccaggaaacctcaaccgtgcgactgaaagtgtccagcacggccgtgagaacgcagcacactaccactcggcccgtgccagatacctcgagacttcccggcgcaaccccgggtctgaccaccgtggaaatagtcactatgtcgcatcaggctctcggtgacgtcgcgggaagagggaacgaaaagaagccaagctccgtgagagctctttccatcgtgcttcctattgttcttcttgtgtttctgtgtcttggagtgtttttgctttggaagaattggcgcctgaagaacataaacagcattaactttgataatcccgtctaccaaaagaccactgaggacgaggtccacatctgtcacaaccaggatggatacagctatccttcgaggcaaatggtgtcgctggaggacgatgtggca

SEQ ID NO: 15887 - DNA, 2580 bp, synthetic construct
  misc_feature 1..2580: note = source = /note="Description of Artificial Sequence: Synthetic coding sequence"
  source 1..2580: mol_type = other DNA
atgggaccatgggggtggaagcttcgctggaccgtagctctgctcttggccgccgccggcactgctgtgggggatcggtgtgagcgcaacgaattccagtgccaggatgggaaatgtattagctacaaatgggtatgcgatggttcagctgagtgccaagatggctcagacgagtctcaagaaacatgtctgagcgtgacttgtaagtctggtgattttagttgcggggggcgggtaaacagatgtataccacagttctggcggtgtgatggacaggtggactgcgacaacgggagtgacgagcagggctgtcccccgaaaacatgcagtcaggacgagtttcgctgtcacgacgggaagtgtatctcaagacagttcgtatgtgattctgatcgcgattgccttgatggaagtgatgaggcaagctgtcctgtcctgacgtgcgggcctgcaagtttccagtgcaacagttccacatgtattcctcagctctgggcttgtgacaatgaccctgactgtgaagatgggtcagacgagtggcctcagcggtgtcgcggcctgtatgttttccagggcgattcttcaccatgctcagccttcgaattccactgtctgagtggggaatgcatccatagctcttggcggtgtgacggcggcccagactgcaaggataagagcgatgaggagaattgtgcagtcgccacctgcaggcctgacgaatttcagtgtagtgatgggaattgcatccatgggagccgccaatgtgaccgcgaatatgactgcaaagacatgagtgatgaagtaggttgtgtgaatgtgaccctttgtgaggggccgaacaagttcaagtgccattccggggaatgtattacactcgacaaggtctgtaacatggcccgggattgtagagattggtctgatgaaccaatcaaagagtgcggaaccaacgagtgtctggataataacggagggtgtagtcatgtctgcaacgatcttaaaatcgggtacgagtgcctgtgccctgacggcttccagctcgtcgctcagcggcgctgcgaagacatcgatgagtgccaggatcccgacacatgtagccaactctgcgtcaacctggaaggaggatataagtgccagtgtgaggagggcttccagctcgacccccacactaaggcgtgcaaggcagtgggctctatagcatacctgttcttcaccaaccgccatgaggtgcgcaagatgactctggacaggtctgaatatacatctttgattcctaatttgcgaaatgttgtggcccttgacactgaagttgcttccaatcgaatctattggtccgacctgtctcagcggatgatctgctcaactcagcttgacagagctcatggcgtgagcagctacgacactgtgataagtagggatatccaggctccagatggactggccgttgattggatccactcaaatatttactggaccgatagtgtccttgggaccgtcagtgtcgccgataccaaaggcgtgaaaagaaagacactgtttagggagaacgggagtaagccaagggcgatcgttgtggaccccgtgcacgggttcatgtactggacagattggggcactccagctaagatcaaaaagggagggctgaacggagtggacatctacagtctggtgaccgagaatattcagtggcctaatggcattacactggatttgttgtctggacgcttgtattgggtggattcaaaactgcattccatctctagcattgacgtcaacggtgggaataggaagacgattctggaggatgagaaacggctcgcccatcctttctcattggcagtatttgaggataaagtcttctggacagatatcataaatgaggcaatattctccgctaaccgactgactggctctgatgtgaatttgctggccgaaaatttgctgtcaccggaagacatggtcctgttccacaacttgactcaacctcgcggagtgaactggtgtgaacgcactacactcagtaatggcggttgccagtatctttgtctgcccgctccccaaataaatccacatagcccgaagttcacctgcgcatgcccagatgggatgctgctggcacgcgacatgaggtcctgccttacggaggctgaggcagctgtggcaactcaggaaacttctaccgtccgcctgaaggtgtcctccactgctgtacgcacccaacacacaacaacacgcccggtgccggatactagccgcctgccaggcgccactcctggtctcactaccgtcgaaatcgtgactatgtctcaccaggctcttggggacgtggccgggagaggcaacgaaaaaaagccttcaagcgttcgggccttgtccatagtcttgcctatcgtgctcttggtcttcctttgcctgggggtgttcctgctttggaaaaattggcgcctgaagaacattaacagcatcaattttgacaaccccgtataccagaaaaccaccgaagatgaggtgcacatctgccacaatcaggacggctattcatatccgtcccgacagatggtgagtctcgaggatgatgtggcc

SEQ ID NO: 15888 - DNA, 2580 bp, synthetic construct
  misc_feature 1..2580: note = source = /note="Description of Artificial Sequence: Synthetic coding sequence"
  source 1..2580: mol_type = other DNA
atgggaccttggggatggaagctgagatggactgtggcgttgctgctggctgcggcgggcaccgccgtcggggaccgctgcgaacggaacgaattccaatgccaggatgggaagtgcatctcatacaagtgggtctgcgacggctcggcggagtgccaggatggttcggatgaaagccaagagacttgcctctcggtcacttgcaaatccggcgatttctcctgtggcggtcgagtgaaccggtgcatcccccagttctggaggtgtgatggccaagtggattgcgataatgggtcagacgaacaagggtgcccaccgaaaacctgttcgcaggacgaattccggtgccatgacggaaagtgcatctcccggcagttcgtgtgcgatagtgaccgcgattgtctcgacggcagcgatgaagcatcgtgccccgtgctcacttgcgggccagccagcttccagtgcaactcctccacctgcataccgcaactctgggcttgtgacaacgacccggactgcgaagatggatccgacgagtggccgcaaagatgtagaggcctgtacgtgttccaaggagattcatccccgtgctcggcattcgagttccactgtctgtccggagagtgcatccacagcagctggcgctgtgatggaggccctgattgtaaggacaagtctgatgaggagaactgtgcggtcgcgacctgtcgcccggatgaatttcagtgctctgacggcaactgcatccatggatcgcgccaatgcgaccgcgagtacgattgcaaagacatgagcgacgaagtcggatgcgtgaacgtcaccctctgcgaaggtcctaacaaattcaagtgccactcgggagagtgcattactcttgacaaagtctgcaacatggcacgcgactgccgcgactggtccgacgaacccatcaaggagtgcggcacgaatgaatgccttgacaacaacggaggctgttcacatgtgtgcaatgatctcaaaatcgggtatgagtgcttgtgcccggatggattccaactcgtggcccaaaggcggtgtgaggacatcgacgaatgccaggatcccgacacctgtagccagctgtgcgtgaatctcgaaggaggctacaaatgccagtgcgaagagggcttccaacttgatccgcatactaaggcctgcaaagccgtgggctcgatagcctacctgttctttaccaatcggcacgaagtgagaaagatgaccctggacagatccgaatacacttcgctgatcccgaacttgagaaatgtggtggccctggataccgaggtggcctcgaacagaatctactggtcggacctctcccagcggatgatctgctccactcaactggatcgcgcccacggagtcagctcctacgacactgtcatctcccgcgacatccaggcgccagacggactcgccgtcgactggatccattcgaacatctactggaccgattcggtgctgggcactgtgtcggtggcagacaccaagggagtgaaaaggaaaacgctgttcagagaaaatggctcgaagcctcgggccatcgtggtggatccggtgcacggcttcatgtactggactgattggggcactccggcaaaaatcaagaagggcggcctgaacggggtcgatatctacagcctcgtgactgaaaacattcagtggccgaatggaattactctcgatctcctgtcggggcgcctttactgggtggactctaaactgcatagcatctcttctatcgacgtgaacggaggaaatcgcaagactatcctggaagatgagaagaggctcgcccacccgtttagcctcgccgtgtttgaggacaaagtcttttggactgacattatcaacgaggctatcttctcggcaaacaggctgactggtagcgacgtgaatttgctggcagagaatttgctctcgccagaagatatggtgctgttccacaatctcacccagcccagaggagtaaactggtgtgagcggactactctgagcaatggtggatgccaatacctctgcctgccggctcctcagattaatccgcacagcccgaagtttacgtgtgcttgcccagatggaatgctcctggctagagacatgcgctcctgcctcacggaggcagaggccgccgtggcgacccaggaaacctccaccgtgcggctgaaagtgtcctcgaccgcggtgcgcacccagcacactactactcgcccagtgccggatacctcccggctccccggagcgacgccgggcttgaccaccgtcgagattgtgaccatgtcgcaccaagccctcggcgacgtcgcgggtcgcggaaatgaaaagaagccttcatcggtccgggccttgtcaatcgtcctgcctatcgtgcttctcgtgttcttgtgccttggcgtgttcctgctgtggaagaattggcgcctcaaaaacatcaactccatcaacttcgacaacccggtgtaccaaaaaaccactgaggacgaagtccacatctgccataaccaggatggatactcataccccagccgtcaaatggtgtccctggaggacgacgtggca

SEQ ID NO: 15889 - DNA, 2580 bp, synthetic construct
  misc_feature 1..2580: note = source = /note="Description of Artificial Sequence: Synthetic coding sequence"
  source 1..2580: mol_type = other DNA
atgggtccatgggggtggaagctcaggtggacggttgcacttcttctcgcggccgcaggtaccgccgtgggggatagatgtgagcgcaacgaattccagtgccaagacggtaagtgtatctcatacaaatgggtgtgcgacgggagcgcagaatgccaggatggttccgatgaatcccaagaaacttgcctttcggtgacctgcaagagcggagatttttcatgcggaggcagggtgaaccgatgtatcccacaattctggagatgcgatggacaggtggattgtgataacggaagcgacgagcagggttgcccgcccaagacctgctctcaggacgagtttagatgtcatgacggaaagtgcatctcccgacaatttgtgtgcgattcggatagagactgcttggacggctcggatgaagcgtcatgcccagtgctcacctgtggccctgcatccttccagtgtaatagctccacctgcatccctcagctttgggcatgtgacaatgaccccgactgtgaagatggatcggacgaatggccacagagatgtaggggtctttacgtgtttcagggcgatagctccccgtgcagcgccttcgaattccattgcctgtcaggggaatgcatccactcctcctggaggtgtgatggggggcctgattgcaaagacaagtcagatgaggagaactgtgcagtggcaacttgtcggcctgatgagttccagtgcagcgatggcaactgtatccatggctcgagacagtgtgatcgcgaatacgactgcaaagacatgtccgatgaagtgggatgcgtgaatgtgaccctgtgtgaaggaccaaacaagttcaaatgccacagcggtgagtgcataactctggacaaggtctgtaacatggcacgagattgtcgcgattggtcggacgagcccattaaagaatgtggcactaacgagtgtctcgataacaatggaggatgctctcacgtctgtaacgatctgaaaattgggtacgaatgcctctgccccgatggctttcaacttgtggcacagcgccgctgtgaagatatcgatgaatgtcaagatcctgatacctgctcgcaactgtgtgtgaatcttgaagggggttacaagtgtcagtgtgaagagggtttccaacttgatccccatactaaggcctgcaaagcagtgggttccattgcgtatctctttttcactaatcgacatgaagtgcgaaagatgaccttggacagatcagaatacacttccctcatccctaatctgcgtaatgtggtggcactcgatactgaagttgcttcgaacaggatatactggtcggatcttagccaacgaatgatctgctccacccagctcgatcgtgcacacggagtgtcatcctacgacactgtcatttcgagagacattcaggctcccgatggtttggcagtagattggatccatagcaacatttactggactgacagcgtccttggtactgtgtctgttgcagataccaagggagtgaagcggaaaactctgtttagagaaaacggatcaaaacctcgagcaattgtggtggacccagtgcacgggtttatgtactggaccgactggggaactccggccaagattaagaaaggaggcctgaacggcgtcgacatttactcgctcgttacggagaacatccaatggcctaatggaattaccctggatttgttgtcgggacggctgtactgggtggatagtaagctgcactcgatttcgtcaattgatgttaatggcggcaatcgcaagaccattctggaagatgagaagagactggcccatcctttttcactggcagtttttgaggacaaggtcttttggactgatatcataaatgaggcaattttcagcgcaaatcgccttaccggctccgatgttaaccttcttgcagaaaaccttctgtcccctgaggatatggtgctttttcataacttgacccaacctcgcggcgtgaactggtgtgagcgcaccactctgtccaatggcggctgccaatacctttgtctgcccgcgccccagattaaccctcactctcctaagtttacttgcgcatgcccagatgggatgctgcttgcacgcgatatgcgtagctgtcttacggaagctgaggcagctgtggctacgcaagaaacgagcactgtgaggctcaaggtgtcgtcgacggcggtccgcactcagcatactacgacgcgacctgtgcccgacaccagccggcttccgggggcaactccagggctcaccactgtggaaatagtgactatgtcccaccaagccctgggggatgtggcagggcgcggaaacgagaagaagccttcgtcagtgagggcgcttagcatagtgctccccatagtcctgctggtctttctttgtctcggagtctttctcctgtggaaaaactggaggcttaagaatatcaactccataaactttgataatccagtctatcaaaagactaccgaagatgaggtgcatatatgtcataaccaggatggctactcttacccatcccgtcagatggtgtcgctggaggacgacgtggcc

SEQ ID NO: 15890 - DNA, 2580 bp, synthetic construct
  misc_feature 1..2580: note = source = /note="Description of Artificial Sequence: Synthetic coding sequence"
  source 1..2580: mol_type = other DNA
atgggtccgtgggggtggaagctcaggtggaccgttgcattgctgctcgctgcagcagggactgcagtgggagatcgatgtgagcggaacgaattccagtgtcaagatgggaagtgcatatcctacaagtgggtctgcgatggttccgcagaatgtcaagatggttctgacgaaagccaggagacttgtctttctgtgacgtgtaaatctggtgatttctcttgcggtggtagggtcaataggtgtatcccccaattttggaggtgtgacggtcaggttgattgcgataacggcagtgatgagcaaggctgccctcctaaaacatgctcacaagatgaattcaggtgtcacgatggtaaatgtatttctagacagtttgtatgcgattcagaccgtgattgcttggatggcagtgatgaggcgtcatgcccagtgctcacatgtggtcctgcctcttttcagtgtaattcatcaacttgcatccctcaactctgggcatgtgataacgatccagattgcgaagatgggtctgatgagtggcctcagagatgtcgcggcctctacgtgttccagggtgattcctccccctgttccgcttttgaattccattgcctgtctggcgaatgtatccacagcagttggcggtgcgatgggggacccgattgtaaggataagtccgacgaggaaaactgcgcagtggctacctgtagacctgatgagttccaatgctcagatggtaactgtattcacggatcacgccagtgcgatcgagagtacgattgcaaggacatgtccgatgaagtcggttgtgtgaatgtcacactatgtgaaggtcccaacaaatttaagtgtcactcaggtgaatgtatcacattggataaggtctgtaatatggcacgggattgccgtgattggagcgacgagcccatcaaggaatgcggaacgaatgaatgcctcgataataatggtggatgttctcacgtttgtaacgacttgaagatagggtacgaatgtttatgtcccgatggtttccagctggttgctcaaagacgatgtgaagatattgatgagtgtcaagatccagacacttgttctcaattatgtgtcaacctcgagggagggtataaatgtcaatgtgaagagggctttcagctcgatccgcatactaaggcttgtaaggccgtggggagcattgcttatcttttctttaccaaccgtcacgaggttaggaagatgactcttgataggtctgagtatacatcgttaattcctaatcttcgtaatgtcgtggctttggataccgaggtggctagcaatagaatctattggtcagatctctctcagagaatgatttgttccacccaattggatagagcccatggcgtatctagctacgacacagtcatttcaagagatattcaagctccagatggcttagccgtagattggatacattcgaatatttattggactgattcagtactggggactgttagtgtggctgacacaaagggggtaaagcgtaagacattgttccgagagaatggttcaaagccacgcgccatagttgttgaccccgtgcacggttttatgtattggactgactggggtacccctgctaagataaaaaaaggtggtctgaacggagtagatatatactccttggtgactgaaaacatacagtggcctaatggaattactcttgatcttctaagtgggcgtctttattgggtggattcaaagctgcactcgatttcatctatcgatgtgaacggaggaaacaggaagaccattctggaagatgaaaaacggctggcacatcctttttctctggccgtctttgaggataaggtcttttggaccgatataatcaacgaagctatcttttcggcaaatcgacttacaggttcagacgtcaatcttctagctgaaaacctcttgagcccagaggatatggttttgtttcataacctaactcaacctcgcggagtcaattggtgtgagagaacaactctcagcaacgggggttgccaatatctttgtctgccagcacctcaaattaatccacattcaccaaagtttacctgtgcgtgcccggatgggatgcttctggcccgcgatatgaggtcttgtctgaccgaggctgaagcagctgttgctacgcaggagacatcaactgtgcgtctcaaagtgagttcaacagcggttaggactcagcatactacaaccagacccgttcctgatacaagccgactgcctggtgccactccgggactcacaacagtcgaaatagttaccatgagccatcaggccttgggtgatgttgctggtcgtggaaatgaaaaaaagccatcatccgttagagctctgtctatagttttgccgatagtgctccttgtttttttatgtcttggggtgttcctgctgtggaagaactggcgattgaagaacatcaactctataaactttgataaccctgtttatcaaaaaactactgaggatgaggtacatatttgccacaatcaggacggttactcgtatccgtcaaggcaaatggtgagcttggaagacgatgtggcc

SEQ ID NO: 15891 - DNA, 2580 bp, synthetic construct
  misc_feature 1..2580: note = source = /note="Description of Artificial Sequence: Synthetic coding sequence"
  source 1..2580: mol_type = other DNA
atgggtccgtgggggtggaaattgcgttggaccgtcgcgttgctgctggcagcggccggaacggccgtgggagatcgctgcgaacggaacgaattccagtgtcaagacggaaagtgcatcagctacaaatgggtctgcgacgggtcagcagagtgccaggacggaagcgatgagtcccaggaaacctgcctgtcagtgacttgtaagtccggcgatttctcctgcggaggacgcgtgaatagatgcatccctcagttctggagatgcgacggtcaggttgactgcgataacggatccgacgagcagggatgcccccctaagacttgctcacaagatgagttcagatgtcatgatgggaagtgtatctcgcgccaattcgtgtgcgactccgaccgagattgtctggatggatcggacgaggccagctgccccgtgctcacttgtggcccggccagcttccagtgtaattcgagtacctgtatcccgcagctgtgggcatgtgataacgacccggattgtgaagatggaagcgacgaatggcctcaaagatgcagaggactgtacgtgttccagggcgattcctccccttgttcggctttcgagttccactgcctttcgggcgaatgtatccactcctcctggcgctgtgatggggggccggattgcaaagataagtcagacgaggagaactgtgctgtggctacttgccggccagatgaatttcagtgcagcgacggcaattgcatccacggaagccgccaatgcgatagagaatacgactgtaaggacatgagcgacgaggtcggttgcgtgaatgtgactctttgcgaaggaccgaataagtttaagtgtcattcgggtgaatgcattaccctggacaaagtgtgcaatatggctagggattgccgcgactggtccgatgagccgattaaggaatgcggaactaacgaatgcctggataacaacggaggatgctcgcacgtgtgcaacgacctgaagatcggatacgaatgtctgtgcccggatggattccagctcgtggcccagcgccgctgcgaggacatcgacgaatgccaagaccccgatacgtgttcacaactctgcgttaatctggaaggtggatacaagtgccagtgcgaagaaggtttccaactggatcctcacaccaaggcctgtaaagcagtgggatccatcgcctacttgttcttcacgaatcggcacgaagtcaggaagatgaccctggatcgcagcgagtacacttcgctgatccctaacctgcgtaacgtggtggccctcgacactgaggtggcatcgaaccgcatctactggtccgatctgtcacagcggatgatctgtagcactcagctcgaccgcgctcacggggtgtcgagctatgacactgtgatctcgcgcgacatccaggctcctgacggtctggctgtggattggatccattccaacatctactggacggattccgtgctgggcaccgtctccgtcgcagacaccaagggtgtgaaacggaaaaccttgttcagggagaatggatcaaagccgcgcgcgatcgtggttgacccagtgcatgggtttatgtactggactgattggggaactccagccaagatcaagaagggagggctgaacggagtggacatctactcgctggtgacggaaaacatccagtggccgaatgggatcactctcgacctgctgtctggccgattgtactgggtcgactccaagctgcattcgatcagcagcattgatgtaaacggcggaaatcgcaagaccatcctcgaggacgaaaagcgcctggcccatccattctctctcgcagtctttgaagataaagtattctggactgatatcattaacgaggcgatcttttcagctaaccgcctgaccggaagcgatgttaatctgctggcggaaaacctgctgtcgccggaggacatggtgctctttcataacctgactcagccacggggcgtgaattggtgcgaaagaactacgctgagcaacggagggtgccagtacctgtgcttgcccgctccccaaatcaacccacactcaccaaagttcacttgcgcctgcccggacggaatgttgctggcgcgcgatatgaggtcgtgcctgaccgaagcggaggcagccgtggcgacgcaggaaacctccactgtcagactcaaagtctcctcgactgcggtgagaactcagcacaccaccacccgcccagtgccggacacttccaggttgccgggcgccactccaggcttgaccaccgttgagatcgtgaccatgtcccatcaagccttgggagatgttgcgggcaggggaaatgaaaagaagccgtcgtcggtaagagccctctccatcgtgctgccaatcgtgctcctggtgttcctctgcctgggggtgttcctcctgtggaaaaactggcgcctgaagaacatcaacagtatcaacttcgacaacccagtctaccaaaagaccaccgaggacgaggtgcacatttgccacaaccaagacggttactcgtacccgagccggcaaatggtgtcattggaggatgatgtggcg

SEQ ID NO: 15892 - DNA, 2580 bp, synthetic construct
  misc_feature 1..2580: note = source = /note="Description of Artificial Sequence: Synthetic coding sequence"
  source 1..2580: mol_type = other DNA
atgggtccgtggggctggaaattgcggtggacggtcgcattgctccttgctgccgccggaactgccgtgggagataggtgtgagcgcaacgagttccagtgccaggatggaaagtgcatctcgtacaagtgggtctgcgacggttccgcggagtgccaggacgggtcggacgagtctcaggaaacgtgcctctcagtgacgtgcaaatcgggggacttctcgtgcgggggtcgcgtgaaccggtgcatcccgcaattctggcgctgtgatggtcaggtcgactgcgacaatggttccgatgaacaaggctgcccgcctaagacctgctcgcaagatgagttccggtgtcacgatgggaagtgcatcagcagacagttcgtctgcgacagcgacagagactgcctcgacggtagcgatgaagccagctgtcctgtgctgacctgtggaccggcctccttccagtgcaactcgtccacctgtatccctcagctgtgggcgtgcgataatgaccctgattgcgaggacggctccgatgagtggccgcagcggtgccgcgggctgtacgtgttccaaggcgactcgtcgccatgttccgcctttgaattccattgcctgtctggcgaatgcattcatagcagctggcgctgcgacggcggaccggattgcaaggataaatccgacgaagaaaactgcgcggtggccacttgccggccggatgagtttcagtgttcggacggcaactgcatccacggatcgaggcagtgcgacagagaatacgactgcaaggatatgtcagacgaagtgggatgcgtgaacgtgactctctgtgaggggccgaataagtttaagtgccactcgggagaatgtatcaccctggataaagtgtgtaacatggctcgggactgcagagattggtccgacgagccgatcaaggagtgtgggaccaacgagtgcttggacaacaacggagggtgtagccacgtctgcaacgacctgaagattgggtacgagtgtctgtgtccggacggtttccagctggtggcacagcggcggtgcgaagatatagacgaatgtcaggacccggacacgtgctcccaactgtgtgtgaatctggagggaggatacaagtgtcagtgtgaggaaggattccagctggatccccataccaaggcctgtaaggcggtgggatccattgcgtacctgttcttcactaaccgtcatgaggtgcggaagatgaccctcgaccggtcggaatatacctccttgattccgaacttgcggaacgtggtcgccctggatactgaggtcgcctccaaccgcatctattggtcggatctctcacaaagaatgatctgttcgacccagctcgatagagcacacggagtatcgtcttacgacactgtgatcagccgcgacattcaggccccggatggactcgccgtggactggattcatagcaacatctactggaccgactccgtccttggaactgtgtccgtcgccgatactaaaggtgtgaaaagaaagacgttgttccgcgagaatgggagcaagccgcgggctattgtcgtggaccctgtgcacggattcatgtactggactgactggggcaccccagcgaagatcaagaagggaggactgaacggggtggacatatactctctggtgaccgaaaacatccagtggccgaatggaatcactctggacctgctttcgggccggctgtattgggtggatagcaaactgcactctatcagcagcatcgacgtgaacggcggaaacagaaaaacgatccttgaggacgaaaagcggctcgctcaccctttctcgctcgctgtgttcgaggacaaggtgttttggactgacattatcaatgaggcgatctttagcgcgaatcgcctgaccggttccgacgtgaatctgctcgctgaaaatctcctgtccccggaggacatggtgctgtttcataatctcacccaaccccggggagtgaactggtgtgaacgcacgactctctccaacggtggttgccagtacctgtgtctgcctgctcctcagatcaacccgcactcccctaaattcacttgtgcgtgcccagacggaatgctgctcgcgcgggacatgcgctcatgtctcactgaagcagaggcggcggttgcaactcaagaaacctcgactgtgagacttaaggtgtccagcactgcggtgagaacccaacatacgaccactcgaccagtgcctgatacctcccgcctgcccggcgcaaccccaggcctgacgactgtggaaatcgtgactatgtcgcaccaggcgctgggggatgtggcaggccgggggaacgagaagaaaccatcttcggtgcgcgcactgtcaatcgtcctcccaatcgtgcttctggtgttcctgtgcttgggagtgtttctgctgtggaagaattggaggctcaagaatatcaacagtattaacttcgacaacccagtctaccaaaaaaccactgaggacgaagtgcacatctgccacaaccaagacggatactcatacccatcccgccaaatggtttcccttgaagatgacgtggca

SEQ ID NO: 15893 - DNA, 2580 bp, synthetic construct
  misc_feature 1..2580: note = source = /note="Description of Artificial Sequence: Synthetic coding sequence"
  source 1..2580: mol_type = other DNA
atgggaccctggggatggaagttaaggtggaccgtggctcttcttctggcagccgcaggcaccgccgtgggagatcgctgtgagcgtaacgagttccagtgtcaggacggtaaatgcatctcatacaagtgggtttgtgatgggtctgctgagtgtcaggacggatctgatgaatcccaggagacgtgtttaagcgtcacctgcaagtcaggagacttttcttgcggaggtagagtcaatcgctgcatccctcaattttggcgctgcgatggacaggtcgactgtgataacggtagcgacgagcaaggctgtcccccaaagacctgttcccaggacgaattcagatgtcatgacggtaaatgtatatcccgccagttcgtgtgcgatagcgaccgggattgcctggatggcagtgacgaggcctcttgtcctgtactgacatgcggaccagcctcctttcaatgcaactcgagcacttgtatcccacaattgtgggcttgtgacaatgatccggactgtgaagatggcagcgacgaatggccacagagatgcaggggactctacgtcttccagggtgactctagcccctgcagcgcttttgagtttcactgcttatccggcgaatgcatccactctagctggagatgcgacggcggtcccgattgcaaggacaaaagcgatgaggagaactgcgctgtcgcgacctgcaggcctgatgagtttcagtgctctgatgggaattgcattcacgggagcagacagtgcgacagagagtacgactgcaaagacatgtctgatgaagtgggatgcgtcaacgtgacattgtgtgagggaccaaataagttcaaatgccacagtggagagtgcataacacttgataaggtctgcaacatggccagagattgtagggactggtcagatgaaccaattaaagaatgcggcacaaacgagtgcttagataataacggcggatgctcccatgtgtgtaacgacctaaaaattggctacgagtgcctgtgtccggatggtttccagctggtggcgcagcgcagatgcgaagatatcgatgaatgtcaagatccagacacctgctcacagctgtgcgtgaacctggagggaggctataagtgccagtgcgaagaaggcttccaacttgatccacataccaaagcctgcaaagctgttggctcaatagcctacttattttttacaaacaggcatgaggttaggaagatgacgttagacaggagcgagtacacatctctgattccaaacctccggaacgtggtcgccttggacaccgaggtggcctcaaaccgaatctattggagcgatctctcacaacgaatgatttgtagtacccagctggatcgcgcccacggcgtgtcaagctatgatactgtgatcagtcgcgatattcaagcccctgatggtctggcggttgattggatccactctaatatatactggactgatagtgtattgggaaccgtaagcgtggcagacaccaaaggggtgaagaggaaaaccctgtttagggagaatggcagcaaaccgagggctattgtagtggatcccgtccacggcttcatgtactggacagactggggtacacctgccaagatcaaaaagggaggattgaatggggtcgatatctattccctggtcaccgagaacattcaatggcctaacggtatcacactggacctgctgtccggccgactttattgggtggactctaaacttcattccatcagttcgattgatgtgaacgggggcaacagaaaaaccattctggaagacgagaaacgactggcacaccctttttctctggccgtgtttgaagacaaagtgttctggacagatatcatcaatgaagcaattttttccgcaaacagactgacaggctccgacgtcaatctgctcgccgagaacctactcagcccagaagacatggtcctgtttcacaacctgacccagcctaggggggttaactggtgcgagcgcacgaccctctcaaacggaggctgccaatacctgtgccttcccgcaccccaaataaaccctcacagccctaaatttacctgcgcctgcccagatggcatgttgctggcgagggatatgcggtcatgcctgacagaagcagaagctgcagtggcaacacaagagacctccacggtccgcttaaaagtgagctccacggctgtccggacacagcacacaactacaaggcctgtccccgatacctcccgattgcccggagcaaccccaggactgaccacagtggaaatcgtgacaatgagtcaccaggccttgggagatgtcgcgggcagaggcaacgaaaagaaaccaagtagcgtgcgcgctctctcaattgtgctgcctatagtgctccttgtgtttctttgcctcggagtgtttctgctgtggaaaaattggaggttaaagaacattaatagtatcaattttgacaatccagtataccaaaagacgaccgaagacgaagtgcacatctgtcacaatcaagacgggtattcttacccttctaggcaaatggtcagcctggaggatgacgtggca

SEQ ID NO: 15894 - DNA, 2580 bp, synthetic construct
  misc_feature 1..2580: note = source = /note="Description of Artificial Sequence: Synthetic coding sequence"
  source 1..2580: mol_type = other DNA
atgggcccttggggttggaagctccgatggactgttgccttgcttctggctgccgcgggtaccgccgtgggcgatcggtgcgaacgaaacgagttccagtgtcaggacggcaagtgtattagttataagtgggtttgcgatggctctgcagaatgtcaggatggttcggatgagtcgcaggagacttgcctgtccgttacctgcaaaagtggggacttcagttgtggcgggagggtcaatcgctgcattccccaattctggaggtgtgatggtcaggttgactgtgataacggaagcgatgagcagggatgcccaccgaagacctgttctcaagatgagtttcgttgtcacgatggaaagtgcatctcacgacagttcgtttgcgattcggatcgtgattgcttggacgggagcgatgaagcctcgtgccccgtactgacgtgcgggccagcttcttttcagtgcaactcctcaacatgtataccgcagttgtgggcctgcgacaacgatccagattgcgaagatggcagtgatgagtggccccagagatgtcgaggcctatacgttttccaaggtgactcaagtccgtgctctgctttcgagttccactgcttgtccggggagtgcattcatagctcgtggcgatgtgacggtggtccggactgtaaagacaagtccgatgaggagaattgcgctgttgccacatgtcgtcctgacgagttccaatgcagtgatgggaactgcatacatggttctcgacagtgtgatcgagaatatgattgcaaggatatgtccgacgaagttggctgtgtcaatgtcacgttgtgtgaaggtccgaacaagtttaagtgccactcgggcgagtgtataaccctggacaaagtctgcaacatggcccgtgactgtcgtgattggagtgacgagccaattaaggaatgcggaacaaatgagtgtctcgacaacaacggtggctgcagtcatgtgtgcaatgatcttaagataggatatgaatgcctatgcccagatggatttcagctggttgcgcagagaagatgtgaagacatagatgaatgccaagacccggatacgtgtagccagttgtgtgtgaaccttgaggggggctataagtgtcagtgtgaggagggattccagctcgatccccatacgaaggcctgcaaggcggttggatcgatagcctaccttttcttcaccaaccgccacgaggtgcgcaaaatgactttggataggtctgaatatactagcctcattccaaacttgcgcaacgtcgtagccctggacaccgaggtcgcctcgaatcggatctactggtctgacttgtcccagagaatgatctgcagcacgcagctagatcgggcccacggtgtctcgagttatgataccgtgatctcgcgcgacatacaggcacccgatggattggccgtcgattggatccactccaatatctactggacggattcggtgctgggtaccgtgagtgtggccgacaccaagggcgtgaagcggaagacactattccgagaaaatgggtccaagccacgcgccatcgtggttgaccctgttcacggttttatgtattggacggactggggtacgcctgccaaaattaaaaaaggagggttgaacggtgtggacatctattctctcgttacggagaatattcagtggccaaatggaataacactggacctcctgagtggtcgcctttactgggttgatagcaagctgcatagcataagcagtatcgatgtcaacggaggcaataggaaaactattctggaggatgaaaagcgcttggcgcatcctttctccctagcggtgtttgaagataaggttttttggactgacattatcaacgaagccattttttccgctaaccggctaactggctctgatgtaaacttgcttgcggagaacctcctgtcgcccgaagatatggttttgttccacaacctcacgcaacctaggggagtcaattggtgtgaacgaaccactctgtccaatgggggttgtcagtatctctgcctgccggctccgcagatcaacccacacagtcctaaatttacttgcgcctgtccagacggcatgctcctggcaagggatatgaggtcatgtctaaccgaagcggaagcggccgtcgctacccaggagacatcgacagtccggctaaaggtttctagcacagccgtgagaacccaacacactaccactcggccagtccctgacacttccaggctccccggtgctacccccggcctgaccactgttgagattgtcaccatgagccaccaagccctcggtgatgtggccggccgcggaaatgaaaagaagcctagctctgtccgcgcgcttagtatagtcttgcctattgtcttgttggtcttcctctgccttggcgtatttctgctttggaagaactggagactaaaaaacataaattcaattaactttgataatccagtctatcaaaaaacaactgaggacgaggtccatatctgtcacaatcaagacggctactcctacccttctcggcagatggtttcgttagaggatgacgtggct

SEQ ID NO: 15895 - DNA, 2580 bp, synthetic construct
  misc_feature 1..2580: note = source = /note="Description of Artificial Sequence: Synthetic coding sequence"
  source 1..2580: mol_type = other DNA
atgggtccgtggggttggaaattacgatggacggtagcgctattactagcggcggcgggtacggcggtaggtgatcgatgtgaacgaaatgaatttcaatgtcaagatggtaaatgtatatcgtataaatgggtatgtgatggttcggcggaatgtcaagatggttcggatgaatcgcaagaaacgtgtttatcggtaacgtgtaaatcgggtgatttttcgtgtggtggtcgtgttaatcgttgtataccgcaattttggcgttgtgatggtcaagtagattgtgataatggttcggatgaacaaggttgtccgccgaaaacgtgttcgcaagatgaatttcgatgtcatgatggtaaatgtatatcgcgtcaatttgtatgtgattcggatcgtgattgtttagatggttcggatgaagcgtcgtgtccggtactaacgtgtggtccggcgtcgtttcaatgtaattcgtcgacgtgtataccgcaactatgggcgtgtgataatgatccggattgtgaagatggttcggatgaatggccgcaacgatgtcgtggtttatatgtttttcaaggtgattcgtcgccgtgttcggcgtttgaatttcattgtctatcgggtgaatgtatacattcgtcgtggcgatgtgatggtggtccggattgtaaagataaatcggatgaagaaaattgtgcggttgcgacgtgtcgaccggatgaatttcaatgttcggatggtaattgtatacatggttcgcgacaatgtgatcgtgaatatgattgtaaagatatgtcggatgaagttggttgtgttaatgtaacgttatgtgaaggtccgaataaatttaaatgtcattcgggtgaatgtataacgttagataaagtatgtaatatggcgcgagattgtcgtgattggtcggatgaaccgataaaagaatgtggtacgaatgaatgtctagataataatggtggttgttcgcatgtatgtaatgatctaaaaataggttatgaatgtttatgtccggatggttttcaattagttgcgcaacgtcgatgtgaagatatagatgaatgtcaagatccggatacgtgttcgcaactatgtgtaaatttagaaggtggttataaatgtcaatgtgaagaaggttttcaactagatccgcatacgaaagcgtgtaaagcggttggttcgatagcgtatttattttttacgaatcgacatgaagttcgtaaaatgacgttagatcgttcggaatatacgtcgctaataccgaatttacgaaatgttgtagcgttagatacggaagtagcgtcgaatcgtatatattggtcggatctatcgcaacgaatgatatgttcgacgcaattagatcgtgcgcatggtgtatcgtcgtatgatacggttatatcgcgtgatatacaagcgccggatggtttagcggtagattggatacattcgaatatatattggacggattcggtattaggtacggtatcggttgcggatacgaaaggtgtaaaacgtaaaacgttatttcgagaaaatggttcgaaaccgcgtgcgatagtagtagatccggttcatggttttatgtattggacggattggggtacgccggcgaaaataaaaaaaggtggtctaaatggtgttgatatatattcgttagtaacggaaaatatacaatggccgaatggtataacgttagatttactatcgggtcgtctatattgggttgattcgaaactacattcgatatcgtcgatagatgttaatggtggtaatcgtaaaacgatactagaagatgaaaaacgactagcgcatccgttttcgctagcggtatttgaagataaagtattttggacggatataataaatgaagcgatattttcggcgaatcgtttaacgggttcggatgttaatttattagcggaaaatttattatcgccggaagatatggtattatttcataatctaacgcaaccgcgaggtgtaaattggtgtgaacgtacgacgttatcgaatggtggttgtcaatatctatgtttaccggcgccgcaaataaatccgcattcgccgaaatttacgtgtgcgtgtccggatggtatgttactagcgcgtgatatgcgttcgtgtttaacggaagcggaagcggcggtagcgacgcaagaaacgtcgacggtacgtttaaaagtatcgtcgacggcggttcgtacgcaacatacgacgacgcgaccggtaccggatacgtcgcgattaccgggtgcgacgccgggtttaacgacggtagaaatagtaacgatgtcgcatcaagcgctaggtgatgtagcgggtcgtggtaatgaaaaaaaaccgtcgtcggtacgtgcgttatcgatagttttaccgatagtattattagtatttttatgtttaggtgtttttttactatggaaaaattggcgtctaaaaaatataaattcgataaattttgataatccggtatatcaaaaaacgacggaagatgaagtacatatatgtcataatcaagatggttattcgtatccgtcgcgtcaaatggtatcgttagaagatgatgttgcg

SEQ ID NO: 15896 - DNA, 2580 bp, synthetic construct
  misc_feature 1..2580: note = source = /note="Description of Artificial Sequence: Synthetic coding sequence"
  source 1..2580: mol_type = other DNA
atgggcccatgggggtggaaactgagatggactgtggccctgctgctcgcagctgctgggaccgccgtgggcgacagatgcgaaaggaacgagttccagtgccaagatggaaaatgtataagctataaatgggtgtgtgatggctctgcagagtgccaggacggctctgacgagagccaggagacctgtctatctgttacctgcaaaagtggcgacttctcttgtggaggccgggtgaatcggtgtatcccacagttctggaggtgtgatggacaagttgactgtgataacggatctgatgagcaagggtgcccacctaaaacctgttctcaggacgagtttagatgccacgacgggaagtgtatatcacggcagtttgtatgcgacagcgacagagactgcctggatgggagtgatgaagccagctgccctgttctaacctgtggcccagcatctttccaatgcaattcctcaacttgcatacctcagttgtgggcttgtgacaacgacccagattgcgaagacggctccgacgaatggccacagcggtgtcgcgggctgtatgttttccagggcgacagttccccttgtagcgctttcgagttccactgtctgtccggggaatgtatccacagttcctggcgatgcgatggggggccagattgtaaggataaaagcgatgaagagaattgtgcagtcgcaacatgccgccctgacgagtttcagtgtagcgacgggaactgcattcatggatctcgacagtgcgatcgtgaatacgattgcaaggacatgagcgatgaggttggatgcgtgaacgtcactctgtgtgaaggtccaaataagttcaagtgccattctggcgaatgtatcaccctggataaggtgtgtaacatggccagagattgccgtgattggtccgacgagccgataaaggagtgtgggaccaacgaatgtttggataacaatggaggctgttctcatgtgtgcaacgatctgaagatagggtacgagtgtctgtgtccagatgggttccagttagttgcacagaggcgctgtgaagatatagatgagtgccaggaccctgacacatgttcacagctatgcgtgaatctcgaggggggatataagtgtcagtgtgaggagggcttccagctggacccacataccaaggcctgtaaagctgtgggcagcatcgcatacctattttttaccaaccggcacgaggttcgtaaaatgacactggaccgatctgagtatacttcactcattccaaatcttaggaatgtcgtggctctggacaccgaggtggcttcaaatcgcatctactggtccgacttgtcacagcgcatgatatgcagcacacagctcgacagagctcatggggtttcctcttacgataccgtgatcagccgggatatacaggccccagatgggctagctgtggattggatccattccaacatttactggaccgacagcgtgctgggcaccgtgagtgtggccgacacaaaaggcgtgaagaggaaaactctcttcagggaaaacgggtccaagcctagagcaattgtggtggatccagtccacggattcatgtattggactgattggggtactcctgctaaaattaagaagggtggactaaacggggtggacatatattccctagttacagagaacatacagtggccaaatggcataaccctggatctgcttagcgggagactgtattgggttgatagtaaactccattccatctctagtatagatgtaaacggcgggaataggaagactatcctagaggacgagaagaggctggcacatccattctcactggcagtctttgaggataaggtcttctggactgatataatcaacgaggctatctttagtgcaaacagactaaccggcagtgatgttaacctgctcgccgaaaacctgctctcccctgaagacatggtcctattccacaacttaacccagccccgcggggtgaactggtgtgaacggacaacactcagtaacgggggctgccagtatctgtgtctcccggccccacaaattaaccctcactctcctaagttcacctgcgcatgtccagatgggatgctcctggctagggatatgcgtagctgcctgacagaggccgaagctgcagtcgccacccaggaaacctccacagtgcggctcaaagtgagtagtacagccgtgagaacacaacacactaccactcggcctgtcccagacacctcccggcttcccggcgccaccccagggctgacaacagttgagatagtgacaatgagtcaccaggcccttggagacgttgccggacgaggcaacgagaagaagcctagcagtgtccgagcactcagtatagtcctgccaatcgttctgctggtgttcctatgtctaggcgtcttcctgctatggaagaattggcgcctgaaaaatattaacagcataaattttgacaaccctgtttatcagaagactacagaagatgaagttcatatctgccacaatcaggacggctatagctacccaagtagacagatggtgtcactagaggacgacgtcgcc

SEQ ID NO: 15897 - DNA, 2580 bp, synthetic construct
  misc_feature 1..2580: note = source = /note="Description of Artificial Sequence: Synthetic coding sequence"
  source 1..2580: mol_type = other DNA
atgggtccgtgggggtggaagctgcgctggaccgtggccctgctgctggcggccgctggaactgctgtgggtgaccggtgcgaacgcaatgaattccaatgccaggacggaaaatgcatctcatacaagtgggtctgcgatgggtcagcggaatgccaagatggatcggacgaatcccaggagacgtgcctctctgtcacgtgcaagtcaggcgacttctcgtgtggcggacgggtcaatagatgcattccgcagttctggcgctgcgacggacaggtggattgcgacaacggttccgatgaacagggatgcccacctaagacgtgctcccaagatgaattcagatgtcacgatggaaaatgcattagccggcagttcgtgtgcgacagcgatagagattgcttggatggctccgacgaagcctcctgtcctgtgctgacctgtggccctgcctccttccagtgcaacagctctacttgcatcccacagctttgggcctgcgacaacgacccggattgcgaggacgggtcggacgagtggccgcaaaggtgccgggggctttacgtttttcaaggtgattcctcgccttgctcagcctttgagttccattgcttgtcaggagagtgcattcactcctcctggaggtgtgacggagggccggactgcaaagataagtcagacgaagaaaattgcgcagtcgcgacctgcagacctgatgaattccagtgctcagacggcaattgcatccacggatcgcggcaatgcgacagagagtacgactgcaaggacatgagcgacgaagtcggctgcgtgaacgtgaccctgtgtgaaggaccgaacaagttcaagtgccacagtggtgaatgtatcactctggacaaagtctgtaacatggcacgcgactgccgcgattggtcggatgagccaatcaaagagtgcggaaccaacgaatgcctggacaacaacggaggctgctcccacgtgtgcaacgacctgaagatcggttacgaatgcttgtgccccgatggattccaactcgtggcacagcgcagatgcgaggacatcgatgaatgccaagaccccgacacctgctcgcagctgtgcgtgaacctcgaaggggggtacaagtgccagtgtgaagaaggctttcagctggaccctcacactaaagcatgcaaagccgtgggatcaatcgcctacctcttcttcaccaatcgccatgaggtgcggaaaatgactctggaccggagcgaatacacctcactcattccgaatctcagaaatgtggtggccttggacaccgaggttgcctcaaacaggatctactggtctgacctgtctcaacggatgatctgctcgactcagttggaccgcgcgcacggtgtctcaagctacgacactgtcatcagtcgggacatccaggcgccggacggactggcggtcgactggatccattccaacatctattggactgactctgttctcggcactgtctccgtggctgacactaaaggagtgaaacggaaaaccctgttcagagagaacggctcgaagcccagagccattgtcgtggatccggtgcatggattcatgtactggaccgattggggcactcctgcgaagatcaagaagggaggactgaacggggtggatatctacagcctggtcaccgaaaacatccaatggccgaatgggattaccctggacctgctgtcagggagactgtactgggtggattcgaaacttcattccatcagctctatcgacgtgaacggcggcaaccgcaagacgatcttggaagatgaaaagcgcctggcccacccgttctccctcgccgtgttcgaggacaaggttttctggacggacatcattaatgaagcaatcttctcggctaacagactcaccgggagcgatgtgaacctcctcgcggagaacctcctgtctccggaagatatggtgctcttccacaacctgactcagccgcgcggagtgaactggtgtgagcgcactaccctttcgaacgggggctgccagtatctttgtctcccagccccccaaatcaatcctcacagcccgaagttcacttgcgcctgtcccgacggaatgctgcttgctagagatatgcgaagctgcctgactgaagcagaagccgcagtggccactcaggagactagcactgtgcgcctgaaggtgtcgtccactgccgtgcgcacccagcacacgactactcggccggtgccggatacgtcgagattgcctggcgccaccccgggtctgactactgtcgagatcgtgaccatgagccatcaggcgctgggagacgtcgctggtcgcggtaatgagaaaaagccaagctcggtgcgggctctgtcgatagttctcccaattgtgcttctggttttcctctgcctcggagtgttcttgctctggaagaactggaggctcaagaatatcaattccataaacttcgacaatcctgtttaccagaaaaccactgaagatgaggtccacatctgccataatcaggacggctattcgtacccgtcaagacaaatggtgtctctggaggatgatgtcgcc

SEQ ID NO: 15898 - DNA, 2580 bp, synthetic construct
  misc_feature 1..2580: note = source = /note="Description of Artificial Sequence: Synthetic coding sequence"
  source 1..2580: mol_type = other DNA
atgggaccctggggctggaagctcagatggaccgtggccctgctcctggcagcggccgggaccgcagtgggtgatcgctgtgagagaaatgaatttcaatgccaggacggaaagtgtatctcgtacaaatgggtgtgtgacggaagcgctgagtgtcaggatggctcagacgaaagccaagaaacctgtctcagcgtcacctgtaagtcgggtgatttttcctgtggcgggcgcgtgaaccgatgcatacctcaattttggagatgtgatggacaggtggactgtgacaatggatcggatgagcaaggatgccctccaaagacttgttcccaagacgagttccgctgtcatgatggaaagtgtatttcccgacagtttgtctgcgactcagatcgggattgcctcgatggatcagacgaagcatcatgccctgtgcttacttgtggtcctgcatccttccaatgtaactcttccacgtgcattcctcagttgtgggcctgtgacaatgaccctgactgtgaggacggctcagacgagtggccacaacgctgtagagggctttacgtgtttcaaggtgactcgtccccctgctcagcctttgaatttcactgtcttagcggggaatgtatccattcatcctggcggtgcgacggaggtcctgactgtaaggataagtccgacgaggaaaactgcgcagtggccacctgcagaccggacgaatttcagtgttcagacggaaattgtattcacggttccaggcaatgtgatagggaatatgattgtaaggatatgtccgatgaagtcggctgtgtcaatgtcaccctttgtgaaggtccaaacaagttcaaatgtcattccggcgaatgtatcacccttgataaagtctgcaatatggcacgagactgtagagattggtcggacgaacccattaaagagtgtggaactaacgaatgcctcgacaataacggcggatgttcccacgtgtgcaacgacctgaagattggctatgagtgtctgtgtccggatggttttcaactcgtcgcgcagcgcagatgtgaggatatcgacgaatgtcaagatccggatacttgcagccaactgtgtgtcaacctggagggaggatacaagtgtcagtgcgaggaaggtttccaactggatccacacactaaggcttgtaaggcagtcggatcaattgcgtaccttttcttcaccaatcgccatgaagtgaggaagatgactttggaccgatcggaatacacctccctcatccctaatctgcggaatgtggtggcacttgatactgaagtggcgagtaacaggatatactggtccgacctctcgcagcggatgatatgcagcacccaactcgaccgggcacatggtgtgtcgtcgtacgatactgtgatatccagagacatccaagcgccggacggactcgccgtcgattggatccatagcaatatctactggaccgattctgtgctgggaacggtgtccgtggcagacacgaagggcgtgaagcgcaaaactcttttccgagagaatggcagcaagcctcgggcaatcgtggtcgaccctgtgcatggattcatgtactggactgactggggcactccagcaaagatcaaaaagggtggtcttaatggggtggatatctacagcctcgtgactgaaaacattcagtggcctaatggtataaccctcgacctcctttccggccgactgtactgggtcgactcgaagctgcacagcatctcctcaatcgatgtgaatggaggtaaccgtaagaccattcttgaggatgagaagcgactggcacacccttttagcctcgcagtattcgaagataaggtcttttggaccgacattatcaatgaagcaatcttttccgccaacaggctgaccggatcagacgtcaaccttcttgccgaaaacctcctgtccccagaggatatggtgctttttcataaccttactcaaccgcggggtgtgaattggtgtgagagaacgactttgtcaaacggcggttgccagtacctctgtctgccggcccctcagattaacccgcactcgccgaagtttacctgtgcatgtcctgatggcatgctcctcgcacgggatatgcgctcctgcctgaccgaagctgaagctgctgtggccacccaagagactagcactgtgaggcttaaggtttcgagcacggccgtccgcactcaacacactactactagaccggtgcctgatacgtcgcggcttccaggggcaacccccggtctgactactgtcgagattgtgactatgtcacatcaagcactgggcgatgtggcaggtcgtggcaacgaaaagaagccaagctcggtccgggcactctccatagtgctgccaattgtcctgcttgtgttcctttgccttggggtctttctgctgtggaaaaactggagattgaaaaacattaactctattaactttgataaccccgtttatcaaaagaccaccgaggatgaggtccacatttgtcacaaccaggatggttactcatacccctcacggcaaatggtgtcattggaggacgatgtggcc

SEQ ID NO: 15899 - DNA, 2580 bp, synthetic construct
  misc_feature 1..2580: note = source = /note="Description of Artificial Sequence: Synthetic coding sequence"
  source 1..2580: mol_type = other DNA
atgggtccttgggggtggaagctgcgctggactgtcgccttgttgctcgccgcggcgggcactgccgtgggtgaccggtgtgagaggaacgagtttcagtgtcaagatggaaagtgcattagctacaaatgggtgtgcgatggatcagccgaatgtcaagacggatccgacgaatctcaggaaacttgtctctccgtcacgtgtaagtcgggagacttttcatgcggaggcagagtgaatcgatgtatacctcaattttggcgctgcgatggtcaggtggactgcgataatgggtccgatgaacaaggatgtccgcctaagacttgctcgcaagatgagttccggtgtcatgatggcaaatgtatttcaaggcaatttgtctgtgattcggacagggattgtctcgatgggtcggatgaagcaagctgtcccgtgttgacctgtggtcctgcatcgtttcagtgtaattcgtcaacgtgcattcctcaactgtgggcatgcgataatgatcctgactgtgaggatggatccgatgaatggccacagaggtgccgtggactgtatgtgttccaaggagattcctcaccttgctccgcattcgagtttcactgtctctcgggcgagtgtatccattcctcctggcgttgtgatggtggcccagactgcaaagataagtcagacgaagagaattgtgcagtggcaacttgtcgtcccgacgaatttcagtgtagcgacggtaactgtattcacggaagcagacagtgcgatcgcgagtacgattgcaaagacatgagcgatgaagtgggctgtgtgaacgtgactttgtgtgagggccctaacaagtttaagtgccattccggagaatgtattactcttgacaaggtctgtaatatggcgagagattgtcgcgactggtcggatgagcctattaaggaatgtggtaccaacgaatgtttggataacaacggtggttgttcgcatgtgtgcaacgacttgaaaattggatatgaatgcctttgtccggatgggtttcaactcgtggcccaaaggaggtgtgaagatattgatgagtgtcaggatcccgacacttgcagccagctttgcgtgaaccttgaaggggggtacaagtgccagtgtgaggaaggatttcaacttgacccacataccaaggcatgtaaagcagtgggttcaatagcttacttgttcttcaccaatcggcatgaagtgcggaagatgacgctggatcggtcagaatacacttcgctgattccaaatttgaggaatgtggtggcgcttgacactgaggtggcatctaatcggatctactggtccgacctgtcccagcggatgatctgctccactcagctggatagagcacatggtgtctcctcgtacgatactgttatctcacgggatattcaagcacctgatggacttgccgtggattggatacatagcaacatctattggaccgactcggtgctgggcacggtttcagtggcagacactaaaggggtgaagcggaaaactctgttccgtgaaaacggaagcaagcccagggcaatagtcgtcgatccggtgcacgggtttatgtactggaccgattgggggactccagcaaagattaagaaaggaggactcaatggcgtggacatctactccctggtgaccgaaaacatacaatggccaaacggaatcactcttgatctgcttagcggccgactgtactgggtcgattccaagctccacagcatttcttcgatcgacgtcaacggaggtaaccgcaaaaccatccttgaggacgaaaagagacttgcgcatcctttctcccttgcagtgtttgaagataaggtgttttggactgatatcattaacgaggctatcttttcagctaaccgcctgactggatcagatgtcaatctgctcgcggagaatttgctttcaccagaagatatggtcctgtttcacaaccttacccagcctagaggcgtgaactggtgcgagcgcactactctgagcaacggggggtgccaatacctgtgtttgcccgcacctcagatcaatccccacagcccgaaattcacttgcgcatgccctgatggaatgcttttggccagagatatgagaagctgtctgacggaagccgaggccgcagtcgcaactcaagaaactagcaccgttcgactgaaggtttcttccactgcagtgagaacccagcataccaccacccgaccggtgccagacacttcccgactgccgggtgccactccggggctcaccactgtggaaatcgtgaccatgtcgcaccaagcgctgggagacgtcgctggtagggggaacgaaaagaagccgtcgtcggtcagagcactgtcgattgtccttccaatagtgcttcttgtgttcctctgtctgggagtgttcttgctctggaagaactggagactgaagaacattaactcaattaactttgacaatcccgtgtaccagaaaaccaccgaagatgaagttcatatttgtcataaccaggatggatactcatacccatcccgccaaatggtgtcccttgaagatgacgtcgca

SEQ ID NO: 15900 - DNA, 2580 bp, synthetic construct
  misc_feature 1..2580: note = source = /note="Description of Artificial Sequence: Synthetic coding sequence"
  source 1..2580: mol_type = other DNA
atgggaccttggggttggaaattgcgctggacagtggcgcttctgctggctgctgccggaacagcagttggagatcgatgtgaacgcaacgagtttcagtgtcaggatggcaagtgcatcagctataaatgggtgtgtgacgggtctgcagagtgtcaggacggctcagatgaatcacaggagacttgcctgtccgtgacatgtaaaagtggagacttctcatgtgggggtagagtcaatcggtgtatcccccagttttggagatgtgatgggcaggtcgattgcgataatgggtcagatgaacaaggctgcccccccaaaacctgttctcaggacgagtttcgatgtcatgacgggaaatgtatttcaagacagtttgtgtgtgactctgaccgagactgtttggacggatccgacgaggccagctgtccagtattaacctgcggccccgcttcatttcagtgcaactcaagtacgtgcatcccccaactatgggcctgtgacaatgacccagattgtgaagatggcagtgacgaatggccacagcggtgccgaggcctgtatgtcttccaaggcgatagttccccttgctcggcctttgagtttcactgtctatccggagaatgtatccactccagttggagatgtgatggaggccccgattgtaaagataagagtgacgaagagaactgtgcggtcgcaacatgccggccagacgagttccagtgctccgacgggaattgcatacacggatcacggcaatgcgacagagaatatgactgcaaggacatgagtgatgaggtaggctgcgtaaacgttaccctgtgtgaaggacccaataaattcaagtgtcatagcggggaatgcattacgctggacaaagtttgtaacatggcccgcgactgtcgtgattggtccgacgagcctataaaagaatgcggtaccaacgagtgcctcgacaataatggagggtgtagccatgtctgcaatgatctaaagattgggtacgagtgcctgtgtccagatggattccaactggtcgcccaacggaggtgcgaggatattgatgagtgtcaggacccagatacctgctcacagctctgtgttaatttggaaggtggctataaatgtcagtgcgaagaggggttccagttggatccccatacaaaggcctgcaaagcagtcggatccattgcctatctgtttttcactaatagacatgaggttcggaaaatgactctcgaccgtagcgaatacacctctctcatcccaaatctccgaaatgttgtagccctggacaccgaggtggcaagtaatcgtatctactggtccgatctgagccagcgaatgatctgcagcacccagcttgacagggcacatggcgtgtcctcatacgacactgtgattagccgagatatacaggcacctgatggtcttgcggtagactggatccattccaacatatattggacggactccgttttgggcacagtatccgtggccgatacaaagggagtaaaacgtaagacactctttcgggaaaacggatcaaaaccccgagcgatcgtggtggaccccgtgcacggatttatgtattggacggactggggcacccctgctaagattaagaagggcgggctgaatggggttgatatctattctctggtaacggagaatatccagtggccaaacggaataaccttggacttgcttagtggacgcctttactgggtggattctaaattgcactccatctcatcaatcgacgtgaatggaggcaatcggaagactattttggaggatgagaagcggctggcccatccgttttctttggctgtgttcgaggacaaggtgttttggacagacattattaacgaggccatttttagcgccaatcgcctaacgggtagtgacgtaaacctgctggcagagaatctgttatccccagaggatatggtcctgtttcataatttgacacaaccaagaggcgtgaactggtgcgaacggaccacactaagcaacggggggtgccaatacctgtgcctccctgcccctcagattaatcctcactctccaaagttcacctgtgcctgcccagacggaatgttgctggctcgagatatgaggtcttgtctaactgaggccgaagccgctgttgcgactcaggaaaccagtactgtccgcctgaaagtgagtagtactgcggtgcgtacacagcatacaacaacacgcccggttcccgatacctccagactgcccggggccacccctggcttgactactgttgaaatcgtcaccatgtcacatcaggccctcggtgacgtggctggccgcgggaatgaaaaaaagcctagttctgtgagagctttgagcattgtccttcctattgtgctgctggtttttctttgtttaggtgtgttcctgctgtggaagaattggcggcttaagaacataaatagcataaacttcgataaccccgtctaccagaagaccacagaagacgaagtacatatttgccacaaccaagacggatattcatacccttccaggcaaatggtctccctggaagacgacgtggcc

SEQ ID NO: 15901 - DNA, 2580 bp, synthetic construct
  misc_feature 1..2580: note = source = /note="Description of Artificial Sequence: Synthetic coding sequence"
  source 1..2580: mol_type = other DNA
atggggccttggggatggaaacttaggtggactgtcgcgctgttgctcgctgcagctggaacagcggtgggagacagatgcgaaagaaatgaattccagtgccaggatgggaagtgcatcagttacaaatgggtgtgcgatggatcggccgagtgccaagatgggtctgatgaaagtcaggagacatgtctgtccgtgacttgtaaaagtggagattttagttgcggggggcgggtaaataggtgcatcccacagttctggaggtgtgacgggcaggtcgattgcgataatggaagtgatgagcaggggtgcccgcccaaaacttgttcccaggatgaatttcgatgtcatgatggaaaatgtatatctagacagtttgtgtgcgattccgaccgggattgcctggatggatcagacgaagcgtcctgtcccgtcttgacttgtgggcccgcgtcgtttcagtgtaactctagtacatgtatcccccagctctgggcatgtgataacgatccagactgcgaagacggatccgatgaatggccacagaggtgtaggggactctatgtgtttcagggggatagttctccttgctcagccttcgaattccattgcttatcaggagaatgtatacactcttcgtggaggtgtgacggagggccagattgtaaagataaatccgacgaagagaactgcgccgtagctacttgccgccccgatgaattccaatgctccgacgggaattgcatacacgggtctcgacagtgcgatcgggaatatgattgcaaggatatgtccgatgaggtcggatgtgtgaatgttactctgtgcgaagggcccaataaatttaaatgtcactccggggaatgtattacactcgataaggtctgcaacatggctcgcgattgtagggattggagtgatgaacccatcaaggaatgtgggactaacgaatgtctagataacaatggggggtgttcacacgtttgcaatgatcttaaaatcggatatgaatgtttatgtcccgatggattccagctcgtcgctcagcgacgctgcgaagacatagatgagtgtcaggatcctgatacttgctctcagctttgcgtaaatctcgaaggggggtataaatgtcagtgcgaagaggggttccagctggatccccatacaaaagcgtgcaaagcagtggggtcgatcgcctacctgttctttactaaccggcatgaagtcagaaagatgactctggatagatctgaatacacttctcttatccctaatctgagaaacgtcgtggctcttgatactgaagttgccagtaatcgaatctactggtccgatctttcccagaggatgatatgcagtactcagctggacagggcccatggggtatcttcttacgatacagtgattagtcgagatatccaggcacccgatgggctagcggttgattggattcactctaatatttattggactgattctgtcctgggaacagtttctgtggccgacacaaaaggggtgaaacgaaaaactctatttagggaaaatggatcgaagccacgggctatcgtggtcgaccccgtgcacgggtttatgtattggacagattggggaacacccgccaaaataaagaaaggagggctgaacggggttgatatatattccctcgtgactgaaaacatccagtggcctaacggaataactctggatctgttaagtggaagactctactgggttgactccaaactgcactccatatccagtatcgatgtcaatggagggaatagaaaaactattttagaagatgagaaaagactagcacatcccttctccctagccgtgtttgaagacaaagtcttctggactgacatcatcaacgaagctatcttttctgcaaaccgactcactgggagtgatgtaaacctcctagccgagaacttgctatccccagaagacatggttttattccataacctaactcagccaagaggggtaaattggtgcgaacgcacaactctctctaatggagggtgtcagtacctttgcttacccgctccacagatcaacccccattctcctaaattcacatgtgcctgtcctgatgggatgctgctcgcgcgcgatatgaggtcttgtcttactgaagcagaagctgcggtagctactcaggaaacatcgactgttagactcaaggtctcctccacggccgtccggacacagcacactacaacacggccagtacccgatacttccagacttcccggggccacaccagggctgactactgttgaaatagttacgatgtcccatcaggcccttggggatgtcgctggaagggggaacgaaaagaaaccctcaagtgtcagggcgctatctatcgtactacctatagtgctgttagtctttttatgtctgggggtgtttctgctgtggaaaaattggcggctaaaaaatataaattccattaattttgataaccctgtgtaccagaaaacaacagaagatgaagtccatatctgtcataatcaggatgggtattcatatccctcacgccagatggtgtctctggaggatgacgtggcc

SEQ ID NO: 15902 - DNA, 2580 bp, synthetic construct
  misc_feature 1..2580: note = source = /note="Description of Artificial Sequence: Synthetic coding sequence"
  source 1..2580: mol_type = other DNA
atgggaccatggggctggaagctcagatggaccgtcgccttactgctggccgcagccggcacagcagtgggcgaccgctgcgagaggaatgaatttcagtgtcaggacggaaagtgtatctcgtacaaatgggtatgcgacgggtctgcagagtgccaggatggttcagatgagtcccaggaaacatgtttatccgtcacatgcaaatccggagacttctcatgtggcggccgtgtgaatcgctgcatacctcagttttggcgctgcgatggccaagtggactgtgacaatgggtctgatgagcaagggtgccctccgaagacgtgctctcaagatgagttcaggtgtcacgatggcaagtgcatctccaggcagttcgtgtgcgattccgaccgggattgtctggacggatccgacgaggcgtcttgcccagtgctaacctgtgggcccgcgtcattccagtgcaactcttccacctgcatccctcagctctgggcttgtgacaacgaccccgactgcgaggacgggagcgacgagtggcctcaacggtgcagaggattgtatgttttccagggggattcatccccttgctcagcttttgaattccattgcctctccggcgagtgcatccacagctcatggcgttgtgacgggggtcccgattgcaaagataaatcagacgaggagaattgtgccgtggctacctgcagacctgatgagttccagtgtagtgatggaaactgtattcacggaagcagacaatgtgatcgtgaatatgattgcaaggacatgagcgacgaggtaggatgtgtgaacgtgacgctctgcgaggggccaaataagttcaagtgccattccggagaatgtatcacactggacaaagtctgtaacatggcccgggactgtcgggactggagcgacgagcctattaaggagtgcggcaccaatgaatgtctggacaacaacggaggatgttcccacgtgtgtaatgaccttaagatcggatatgaatgcctgtgtccggacggtttccagttggtggctcagcgcaggtgtgaggacatagatgaatgtcaggatcccgatacttgcagccagttgtgtgtgaatctcgagggcgggtataaatgccaatgcgaagaagggttccagttagacccgcacacaaaagcttgtaaggccgtgggctctattgcatacctcttttttaccaacagacacgaggtaaggaagatgactctggacagaagtgaatacacctctctgatccccaacttgagaaacgtagtggccttggatacagaagttgcctcaaatcggatctactggagtgatctaagccagcggatgatctgctcgacgcagctagatagagcccatggcgtatccagctatgatactgtcatcagtcgagacatccaggccccagacgggctagccgtcgattggatccattccaatatctattggaccgatagcgtgttgggaacagttagcgttgccgacacaaaaggggtgaagaggaagaccctctttcgcgaaaatggttccaagccccgtgctatcgtcgtcgacccagtgcacggcttcatgtactggactgattgggggactccagccaagataaaaaaagggggcctgaatggagtggacatttacagcctcgttactgaaaacatccagtggccaaacgggattacactggatcttctgtcaggaaggctttattgggttgactcaaagctgcactctatcagttcaatcgatgtgaacggaggaaaccgaaagacaatcttagaagatgagaagaggctggcgcacccgttttccctggccgtgttcgaggacaaggtcttctggacagacatcatcaatgaagctattttctccgctaaccgcctgaccggatccgacgtcaatttgctggctgagaacctgttgtctccagaggacatggtactgtttcataatctaacccaacctcggggcgtcaattggtgcgaaaggactaccctaagtaacggaggctgtcagtatctgtgcctacccgctcctcagattaaccctcattctccgaaattcacctgcgcctgccctgatgggatgctgctcgcacgcgacatgcggagttgtctcacagaggccgaagccgcggtagctacccaagaaacatcaacagtgaggctgaaggtgtcttccaccgccgtgcgaacccaacatactacgactcgacccgttcccgacacatcccggctcccgggagcaaccccgggactgacaacagtggaaatcgtcactatgagtcaccaggcactgggcgacgtggctggacgcggcaatgagaagaaaccctcttccgtgagagccctgtccatagttttacctatcgtgctgttagttttcctctgccttggtgtgtttctcctgtggaagaactggcgcctaaaaaacatcaattccataaactttgataatcccgtgtaccagaaaactactgaggatgaagtgcacatctgccacaaccaggacgggtacagctacccgagccgccagatggtcagcctagaggacgacgtagca

SEQ ID NO: 15903 - DNA, 2580 bp, synthetic construct
  misc_feature 1..2580: note = source = /note="Description of Artificial Sequence: Synthetic coding sequence"
  source 1..2580: mol_type = other DNA
atgggcccttgggggtggaagttgagatggacagtggcactcctcttggctgctgccggcacggccgtcggcgaccgctgtgaaaggaacgagttccaatgtcaagatgggaaatgcatctcatacaaatgggtgtgcgatggatctgcggagtgtcaagatggctccgatgagagccaggagacttgcctgagtgttacatgcaagtctggcgacttcagctgcggcggtagggtgaataggtgcatcccacaattctggaggtgtgatggccaggtcgactgcgataatggtagtgatgagcaggggtgtccacccaagacctgttcccaagacgagtttaggtgccacgacggcaaatgtatctctcgacagtttgtgtgcgactccgatcgggactgtctcgacgggtctgatgaggcctcttgccctgtgctgacctgtgggccagcttcttttcagtgtaactcgtccacctgcattccgcagctgtgggcatgcgataatgaccctgactgtgaggacggctctgatgagtggccccagcggtgtcggggactatacgtcttccagggtgattcttcaccttgtagcgccttcgagttccactgtctgtccggagaatgcattcactcctcctggaggtgtgacggaggccccgattgcaaggacaagtcagatgaggagaactgtgctgtggccacttgccgccctgatgaatttcagtgctctgatggtaattgtattcatgggtccaggcagtgcgatagggagtacgactgtaaagacatgagcgacgaagtcggctgcgtgaacgtgacactgtgcgaaggaccgaataagttcaagtgccactcaggcgagtgcattacattagataaggtttgtaatatggcccgcgattgccgcgactggtccgatgagccgatcaaagagtgcgggactaatgagtgcttggacaacaatggtggctgtagccacgtatgcaatgatcttaaaattggatatgaatgtttgtgtccagatgggttccaactggtcgcgcagaggagatgcgaggatatcgatgagtgtcaggatcccgacacctgtagtcagttatgcgttaacctggaaggtggctataagtgtcagtgtgaggagggctttcagttagatccgcacacgaaagcctgcaaagccgtcggaagcattgcctatctctttttcacaaatagacacgaagtgagaaagatgacgctagacaggtctgagtacacctcattgattcccaacctacgcaatgttgtggccctggataccgaagttgcctccaatcggatttactggagtgacttgtcacaacgaatgatatgttccacccagctcgacagagcgcacggcgtgagttcttatgacacggttatctcaagagacatccaggctcccgatgggctggctgtcgactggatccattcgaacatttactggaccgattcagtactggggactgtaagtgtggctgatacaaaaggagttaaacgcaaaaccttgtttcgggagaacggctcaaagcctcgcgctatagtggtggatcctgtgcacggattcatgtattggactgactgggggactcccgctaagattaaaaagggaggactgaatggagttgacatatatagtctggtcaccgaaaatattcaatggccaaatggaattactctggacctcctgtccggtcggttgtactgggtcgactccaagctacattccatctcatccatcgacgtgaatggaggcaatcgtaaaacaattttggaagacgagaaacggttggcacatcctttctcgctcgcggtttttgaggacaaagtgttctggacagacatcatcaacgaggcaatctttagcgccaatagacttaccggcagcgacgttaatcttttggccgagaatctactgtctccagaggatatggtgctatttcataatcttacccagccacgcggggtcaattggtgtgaaaggacaaccctgtccaatgggggatgtcagtacttgtgcctgccagcacctcaaatcaatcctcacagtcccaaattcacttgtgcttgtccagacgggatgctcctcgcaagggacatgcgcagctgcctgacagaagcagaagccgcagtcgccacccaggagacctccactgtgagacttaaagtaagtagcaccgccgtgcgcacccagcatacgaccacgcggcccgtccccgacaccagtaggctccccggcgctacgcctggactgaccaccgttgagatagtgaccatgtctcatcaggccttgggggacgttgccggaaggggtaatgagaagaagccttcatcagtccgcgccctgagcattgtgttaccaattgttctgctggtcttcttatgtctcggagtgttcctcctgtggaagaactggcggctgaaaaacataaattccattaacttcgataacccggtctaccagaagacaactgaggatgaggtgcatatctgccacaaccaagacggctacagttaccccagccgccagatggtgtctttggaagacgacgttgct

SEQ ID NO: 15904 - DNA, 2580 bp, synthetic construct; identical to SEQ ID NO: 15902
  misc_feature 1..2580: note = source = /note="Description of Artificial Sequence: Synthetic coding sequence"
  source 1..2580: mol_type = other DNA

SEQ ID NO: 15905 - DNA, 2580 bp, synthetic construct
  misc_feature 1..2580: note = source = /note="Description of Artificial Sequence: Synthetic coding sequence"
  source 1..2580: mol_type = other DNA
atgggcccctggggatggaagctgcggtggaccgtcgcgttactgcttgctgcagccgggactgcagtgggcgaccgatgtgaaagaaatgagttccagtgtcaggatggaaaatgcatcagctataagtgggtctgtgatggatccgctgaatgccaggacgggtccgatgagtcccaagaaacttgcctctcagtcacctgcaagagtggtgacttttcatgtgggggcagggtcaacagatgtatcccacagttctggaggtgcgacggccaggtggactgcgataatggcagtgacgagcagggatgcccccccaaaacttgctctcaagacgaatttaggtgccacgacgggaaatgcataagccggcagttcgtgtgtgatagcgaccgagactgtcttgacggatccgacgaggcatcttgccccgtcttgacatgtggacccgcctctttccagtgtaactcctccacatgtataccccaactgtgggcctgtgacaatgacccagattgcgaagacggttctgatgaatggccgcagcggtgcaggggactatacgtctttcagggagacagctctccatgcagcgcttttgaattccactgccttagtggcgagtgcattcattccagttggcgatgtgatgggggccctgattgcaaagacaaatcagacgaggagaactgcgccgtagcaacatgcaggcccgatgaattccagtgctccgatgggaactgcattcatggaagccgacagtgtgatcgtgaatacgattgtaaggatatgtctgacgaggtgggttgcgtgaacgtgactctatgcgagggccctaataagtttaagtgccattccggagaatgtattactttagacaaggtttgtaatatggcgcgcgattgcagggactggtcggacgagccaatcaaagaatgtggcactaatgaatgcctcgataataatgggggatgctcccatgtgtgtaacgacctgaaaatcggatatgaatgtctgtgccccgatggattccagctggtcgcccaaaggagatgcgaggacattgacgaatgtcaagaccctgacacctgttcccagctctgtgtcaatcttgagggcggctacaagtgccagtgcgaggaaggcttccagcttgaccctcatacaaaagcatgcaaagctgttggaagtatagcatacctgttttttacaaatcgacacgaggtaaggaagatgaccctcgaccgatccgagtatacctctctgattccaaacctgaggaacgtcgtagccttggataccgaagttgcgagtaataggatctattggagcgacctctcacagaggatgatttgctcaactcagcttgacagggctcacggcgtcagcagttatgacacagtgataagcagggatatccaggcaccggacggtttggccgtggactggattcatagcaatatttattggacagactctgtgctgggaacagtttctgtggccgatacaaagggcgtgaagcgcaaaacccttttccgagagaacggctcaaagccaagagccattgtggtggaccctgttcacgggtttatgtactggacggactgggggacccccgctaagattaagaagggaggcctcaacggggtggatatctattctctggtgacagaaaacatacagtggcccaacggaatcaccctggacttgctcagtgggaggctgtattgggttgattccaaactccatagcattagttctatcgacgtcaacggagggaatcgaaaaacaatcttggaagacgaaaagagactagctcatcccttttccctggccgtcttcgaggataaggtgttctggactgacattatcaatgaggccatattttccgcgaatcgattgaccggtagtgatgtcaacctcctcgccgaaaacctcctatctccagaagacatggttctatttcataatttgacgcagccccggggggttaattggtgcgagcggactaccctgtccaacggtggatgtcagtatctgtgcttacccgctccccagatcaatccacacagcccaaagttcacctgcgcgtgtccagatggtatgctactggccagggacatgagatcttgccttactgaggccgaagctgcggtggctacgcaggaaacatccaccgtgaggctgaaggtctcgtcaacagccgtgcgaacacaacataccacgaccaggcctgtgcccgacacatcaagactgccaggtgcaacccccggactgacaaccgtggaaattgtaaccatgagtcatcaggccctcggcgacgtggccggacgaggaaacgaaaagaagccctcctctgttcgggccctttctatagtgctgcccattgtcctgctggtgtttctctgcttaggagtatttctcctctggaagaattggagacttaaaaatataaactcaatcaatttcgataaccccgtttatcagaagacgaccgaagatgaggtgcatatttgccacaatcaggacggctattcgtacccctcaaggcagatggtctccctggaggacgatgtcgcc

SEQ ID NO: 15906 - DNA, 2580 bp, synthetic construct
  misc_feature 1..2580: note = source = /note="Description of Artificial Sequence: Synthetic coding sequence"
  source 1..2580: mol_type = other DNA
atggggccttggggttggaagctgcggtggacagttgcactgctgctggccgctgctggaacggctgtgggagacagatgtgagcgtaatgagttccagtgccaggatggaaagtgcatcagctacaagtgggtgtgcgacggctctgcagaatgccaagatggaagcgatgagtcacaggaaacttgcctctccgtaacatgcaagtcaggtgatttttcctgtggcggccgagtcaatcggtgtatcccccagttctggcgatgcgacggccaagtggattgtgacaatggctctgatgagcaaggctgccccccaaaaacctgcagtcaggatgagtttcgatgccatgacgggaagtgcattagtagacagttcgtgtgcgactccgatcgggattgtcttgatggcagcgatgaagcctcctgcccggtcttaacctgtggccctgcctcattccagtgtaactccagcacgtgcattccccagctgtgggcatgtgataacgacccagattgcgaagacggatctgatgagtggccccagcggtgtcgggggctctacgtgtttcaaggggattcatcaccatgcagcgccttcgagttccattgcctgagtggtgaatgtatccactcctcgtggcgctgtgatggtggtcctgattgtaaggacaagagcgatgaggaaaactgcgccgtggctacctgtaggcccgatgagttccagtgcagtgatggcaattgcatccacggcagcagacagtgcgaccgggagtatgactgcaaagatatgtctgatgaggtgggatgtgttaacgtcaccctctgcgagggtcccaacaaattcaaatgtcacagtggcgagtgcatcaccctggataaggtgtgcaacatggcccgtgactgccgcgattggagcgacgagccaattaaggaatgtggaacaaatgagtgtctggacaataacgggggatgctctcacgtgtgcaacgacttgaagattggttatgaatgtttgtgtccggatgggttccaacttgtagcccaaagaaggtgtgaagacatcgatgaatgccaagatccggatacgtgttcccagctgtgtgttaatcttgagggaggttataagtgccagtgcgaggaagggttccagctcgacccacacaccaaagcatgcaaagccgtcggcagtatcgcatacctgtttttcactaaccgccacgaggtgcggaaaatgacccttgacaggagcgagtacacctccctgattccaaacctcagaaatgtagtcgctctggacactgaggtcgcatccaatcgcatctactggtcagacctcagccagagaatgatatgtagcactcagctggaccgagcacacggagtctcctcttacgacaccgtgatcagtagagatattcaggcacctgacggtctggccgtggattggatccattcaaatatttactggaccgactccgtgctcggtacagtgtcggtcgcggacaccaagggagttaagcgtaaaacgctttttcgggagaacgggtccaaaccccgcgcaattgtcgtggacccggttcacggattcatgtattggaccgattggggcactcctgcaaaaattaaaaaagggggtctgaacggagtcgacatatattcacttgtgaccgagaacattcaatggccaaatggtattactctcgatctgcttagcggccgcctctattgggtggactcaaagctgcattctatcagtagcatcgatgttaatggcggaaatcgcaagacaatactggaggatgagaaaaggctggcacatccattttctctcgctgtttttgaggacaaagtgttctggaccgatatcatcaatgaggccatcttctccgccaaccgcttaaccgggtccgacgtaaacttgctggcggaaaatctgctgtcaccagaagacatggtacttttccacaatctgacgcagccccgcggtgttaattggtgtgagcgtaccaccctgagtaatggaggctgccagtatctatgcctcccagcgccccagattaatccacactctccaaaattcacatgtgcttgtcccgacgggatgctcctggccagagacatgcggagctgtctcaccgaggcagaagccgccgtcgctactcaggaaacgagcacagttaggcttaaggtctcctccacagccgtgaggacccagcacacgacaactcgccctgtgcccgatacatcgcgcttacctggcgcaacccccggcctcaccacggtggaaatcgtcacaatgagccaccaggcactgggtgacgtagcaggtcgaggaaacgagaagaagcctagcagcgtgagggcactgtcgattgtcctccctattgtcctgctcgtcttcttgtgtctgggagttttcctgctctggaagaactggaggctgaagaacattaatagtataaacttcgacaaccctgtttatcagaagaccacagaggatgaggtgcacatctgccacaaccaagacgggtattcttacccgtcacgccaaatggtctcactcgaagatgatgttgct

SEQ ID NO: 15907 - DNA, 2580 bp, synthetic construct
  misc_feature 1..2580: note = source = /note="Description of Artificial Sequence: Synthetic coding sequence"
  source 1..2580: mol_type = other DNA
atgggtccctggggttggaagttgcggtggactgtcgcactgctcctcgccgcggcagggaccgccgtgggagatagatgtgagagaaacgaatttcagtgtcaagatgggaagtgtatctcatacaaatgggtctgcgatggatcggcagagtgccaggatggttcagatgaatcccaagaaacctgtctgagcgtcacttgtaagtcgggagacttttcgtgtgggggaagggtgaataggtgcattccccaattctggcgttgtgatgggcaggtcgactgcgacaacgggtcggatgaacaaggttgcccacctaagacgtgttcgcaagatgagttcagatgccacgacggaaaatgtattagccgtcagtttgtttgtgattcggacagagactgtctggatggatctgacgaggcctcctgtcctgtgcttacttgtggacctgctagcttccaatgtaatagcagcacttgtattccgcagctttgggcatgcgacaacgaccctgactgtgaggatggttccgacgagtggccacagcggtgtagaggactctatgtgtttcaaggcgactcgtcgccttgctcggcatttgagtttcactgtttgtccggggaatgtatccactcctcgtggagatgcgatggaggtccggattgtaaggataagagcgatgaggaaaactgtgctgtcgcaacttgtcgacctgatgagtttcaatgttccgatggaaactgtatacacggctcaagacagtgcgaccgagaatatgattgtaaggacatgtcagacgaagtcggatgcgtcaacgtgaccctttgcgaaggaccaaacaaattcaaatgccattcaggagaatgtatcaccctggacaaggtctgtaacatggcgcgggattgtagagactggtcagatgagcccattaaggagtgtggcacgaacgaatgtttggacaataatggtgggtgcagccatgtgtgtaatgatctgaaaattgggtacgaatgcctttgtccagatggattccaactggtggcgcaaagacgttgtgaagatatcgacgaatgccaagatccggacacttgttcacagctgtgtgtgaatttggaaggcggctacaagtgtcagtgcgaggagggatttcaacttgatccccatacgaaggcatgcaaggcagtgggttccatagcatacctgttctttacgaacaggcatgaagttaggaagatgaccctggacaggtcagagtacacctctctcatcccaaaccttcgaaatgtggtggcacttgacaccgaagtggcctcgaatcgaatttactggtcggacctttcgcaaagaatgatctgtagcactcagctcgatagagcacacggagtctcgtcgtacgatactgttatctcgcgtgatattcaagcaccagatggtctggcagtggactggatacatagcaacatttactggaccgattcggtgctgggaaccgtctcagtggccgatactaagggtgtcaagagaaagaccctgttccgggaaaatggttcgaaaccgcgcgcaattgtggtggatcccgtgcatggctttatgtactggactgactggggtactccagccaagatcaaaaagggtggtctgaatggcgtggacatatactccctggtgacggagaatatacaatggcctaacgggatcaccttggacttgctttcgggtcggttgtactgggtggattctaagttgcactccatttcatctatcgatgttaacggaggaaaccggaaaacgattcttgaagatgaaaagcgactcgcgcatcctttttccctcgcggtgtttgaagataaggtgttttggaccgacattatcaacgaagctatcttttcggcgaacaggcttaccggctcagacgtgaaccttctggccgagaatcttctctcccccgaggacatggtcctgtttcacaacctgacccagccgcggggagtcaattggtgtgaaaggaccaccctttccaacggtggttgccaatacctttgcctgcctgcacctcagattaacccccatagccccaagttcacgtgcgcctgccctgacggaatgctcttggcaagagacatgcggtcctgtctcactgaagcagaggctgcagttgcgactcaggaaacctcaaccgtgagactgaaagtgagctccactgccgtccggacccaacataccaccacgcgcccagtgcctgatacctctcgcctgcctggtgccactcctggccttactacggtcgaaattgttactatgtcccatcaggccctcggggatgtggcaggtcgtggcaacgaaaagaagccatcctccgtgcgagcattgtccatagtgctgcctattgtgctgcttgtttttctctgccttggagtgttcctcttgtggaaaaactggcggctgaaaaacattaactctatcaacttcgataatcccgtgtaccaaaagaccactgaagatgaagtccatatatgccataatcaagatgggtactcgtacccaagcagacaaatggtgagccttgaggatgacgtcgca

SEQ ID NO: 15908 - DNA, 2580 bp, synthetic construct
  misc_feature 1..2580: note = source = /note="Description of Artificial Sequence: Synthetic coding sequence"
  source 1..2580: mol_type = other DNA
atgggcccctgggggtggaagctccgatggaccgtggccctactgctggcggccgcaggaacggcagtgggtgatcggtgtgagcggaacgaattccagtgtcaggacggcaaatgcatctcgtataaatgggtttgcgacggcagtgcagaatgccaggacggctcagacgagtctcaggagacctgtctttcagtgacttgcaaaagcggggactttagttgcggcggacgtgtcaacaggtgcattccacagttttggcgctgcgatggtcaggttgactgcgacaacgggtctgacgaacaggggtgcccccctaagacgtgttcgcaggacgagttccggtgtcacgacggaaagtgtatctcccggcagtttgtgtgtgactctgatcgggactgtctagacgggtccgacgaagcatcctgtccagtgcttacttgcggtccagcctcatttcaatgcaactcctctacctgtataccccagttatgggcttgcgacaacgatcctgactgcgaggacggctccgacgagtggccacagcgctgcagggggctttacgtattccagggagattcaagtccatgttccgcgttcgaatttcattgtcttagcggggaatgcattcactcctcatggagatgtgacggcggccccgattgcaaggataagtctgacgaagagaattgcgccgtggcaacatgcaggcctgatgaattccagtgctccgatggaaattgcatacatggcagccggcagtgtgatcgggagtatgactgcaaagacatgtctgacgaagttggatgcgtgaatgtgacgctatgtgagggcccgaacaagttcaaatgtcacagcggagagtgtataaccctcgacaaagtttgtaatatggccagggactgccgtgattggtctgatgagccaatcaaggagtgtgggacgaacgagtgcctggacaataacggtggttgttcacacgtgtgtaacgatctcaaaatcggttacgagtgtctgtgtccagacggcttccagctagtggctcagcggcgttgcgaagacatcgacgaatgtcaagatccggacacgtgttctcaactatgtgtgaatctcgagggagggtataagtgtcagtgcgaagagggttttcagcttgacccgcatacaaaggcctgcaaagctgtaggatctatagcttaccttttcttcactaatcgccatgaggtgcgcaaaatgacccttgacaggagtgagtacacatccctcattcccaacctgagaaacgttgtggcactggacacagaggtggcaagcaacagaatatactggtctgacctctctcagcgcatgatctgcagcacgcaacttgatagagctcacggagtgtcatcttatgacacagtgataagccgggacatccaggccccagacgggttagccgtggattggatccactctaatatctactggacggactctgttcttggcacagtcagcgtcgctgatactaaaggtgttaagagaaaaaccttgtttcgggaaaacgggtcgaaacctcgcgccatcgtggtcgatccagtgcacggttttatgtactggactgattggggaaccccagccaaaattaaaaaagggggcctcaatggggtcgacatctacagtttggtcaccgagaacatccagtggcctaacggtattacgcttgacctccttagcggcagattgtactgggtagattccaagttacatagcatcagcagtatcgacgtaaatggtggaaatcgtaaaacgattctggaggacgaaaaaagactggctcatcccttttctctagctgtctttgaggacaaggttttctggaccgatatcattaacgaggccatcttttcagccaacagactcacgggttccgacgtcaacttactagcagagaacctgttgagcccagaggacatggtgctgtttcacaatcttacacagcctagaggggttaattggtgcgagaggaccaccctgtccaatgggggctgtcagtatctctgcctgccagccccccagatcaacccccactcccctaagttcacatgcgcatgtcctgatggtatgctgctggcccgtgatatgcgctcgtgcctgacagaggccgaagctgccgttgccacgcaggagacatctaccgttaggctcaaggtctctagcaccgccgtgcgaacccagcatactactacacgacctgtgccagatacatcacgacttcctggggcgacccctggcctgaccacggtcgagattgtcaccatgagtcaccaagccctgggagatgtagctgggcgcggtaacgaaaagaagccttccagtgttcgcgccttgtcaatcgtgttgcctatagtcctcctcgttttcctgtgcttgggcgttttcctgctgtggaaaaattggcgactcaaaaatattaactctatcaatttcgacaaccctgtgtaccagaaaacaactgaagatgaagtgcacatctgccacaatcaggacgggtacagctaccctagccgacaaatggtaagcttggaggacgacgtggct

SEQ ID NO: 15909 - DNA, 2580 bp, synthetic construct
  misc_feature 1..2580: note = source = /note="Description of Artificial Sequence: Synthetic coding sequence"
  source 1..2580: mol_type = other DNA
atgggaccgtggggatggaagctcagatggaccgtcgcgctgctccttgccgcagcgggaaccgccgtgggcgaccggtgcgagcgtaatgagttccagtgtcaagacggtaagtgtatcagttacaaatgggtgtgcgacgggtcggctgagtgccaggatgggtcagacgagtcccaggagacgtgcctgtccgtgacctgcaaaagcggagatttttcgtgcggtgggagagtgaacaggtgcataccgcaattctggcggtgcgacggacaagttgattgcgacaacggctcagatgaacagggatgtccgcctaagacgtgctcacaagacgagttccggtgtcatgacggaaagtgcatctcgaggcaattcgtgtgtgactcagatagggactgcctcgacggctcggatgaagcgtcgtgcccagtgctgacttgtggcccggcctcgtttcagtgcaactcgtctacttgcataccccagctttgggcatgcgacaacgacccggattgcgaggatggatcggatgagtggcctcagagatgccggggactttacgtgttccagggcgactcatccccatgctcggccttcgagttccattgtctgtctggagaatgcatccactcttcgtggcgatgcgatgggggaccggattgtaaggacaaaagcgacgaggagaattgcgcggtcgcgacttgccggccggacgagttccaatgctcggacggaaattgcatccatggctcccgccagtgtgaccgcgagtacgattgcaaggacatgagcgatgaagtgggatgcgtgaacgtcaccctgtgcgaaggcccgaacaaattcaaatgccactccggagaatgtatcaccctggataaagtgtgcaacatggcgcgcgactgcagagattggtctgatgaaccaatcaaggaatgcggcaccaatgagtgcctggataataacggtggatgctcccatgtgtgtaatgacctgaagatcgggtatgaatgtctctgtcctgatggctttcaactggtggcccaacggaggtgtgaagatatcgacgaatgccaggacccagatacttgcagccagttgtgtgtcaatctggaaggaggatacaagtgccagtgcgaagaaggattccaactggacccacacacgaaggcatgtaaggccgtcgggtcgatcgcctacctgttttttaccaaccgacatgaagtgcggaagatgacccttgaccggagcgaatacacctcgctgatccccaatcttcggaatgtggtggccttggatacggaagttgcctcaaaccggatctactggtcagacctctcacagcggatgatctgcagcacccagctcgaccgcgcgcacggcgtctccagctacgatactgtgatctcgcgcgacatacaggctccggacggactggccgtcgattggattcattcgaatatctactggactgactcagtgctgggaacggtttccgtggccgatacgaagggtgtcaagagaaaaaccctctttcgggagaatggctcgaaaccgcgggccattgtcgtggatccggtgcatggtttcatgtactggacggactggggcacccctgcaaagatcaaaaaaggcggactcaatggagtggatatctactcgttggtgacggaaaacatccagtggccgaacggaatcaccctggacctgctttccgggaggctgtactgggtcgatagcaaactgcattcaatctcatcgattgacgtgaacggagggaaccggaagactatcctcgaagatgaaaagcgcctggcccacccgttctcgctcgccgtgtttgaggacaaagtgttctggaccgacatcattaacgaggcaatcttctcagctaatcggctgactggatcggacgtgaatctcttggcagagaacctgttgtccccagaggacatggtgctgttccacaatctcacgcaaccgcgcggcgtgaactggtgcgaacggaccactctgtcaaatggaggctgtcaatatctttgcctgcctgccccgcagattaacccacattccccgaagttcacttgcgcatgtccggacggtatgctcctggcccgggacatgaggtcctgcctgacggaggctgaggccgccgtcgcgacccaagaaacctcaaccgtgcgcctgaaggtgagcagcaccgcggtccgcactcagcacacgactaccagacccgttcctgatacttcccgcctcccaggagctactccgggcctcaccaccgtcgaaatcgtcaccatgtcccaccaggctctgggagacgtcgcaggacgaggaaatgaaaagaagccatcgtccgtgagggcacttagcatcgtcctgcccatcgtcctgctggtgtttctgtgcctcggagtgtttctgctctggaagaactggcgcctgaagaacatcaatagtataaactttgacaacccggtctaccagaagaccactgaagacgaagtgcacatctgccacaatcaggacggatacagctacccatcgcggcagatggtgtccctcgaggacgacgtggcc

SEQ ID NO: 15910 - DNA, 2580 bp, synthetic construct
  misc_feature 1..2580: note = source = /note="Description of Artificial Sequence: Synthetic coding sequence"
  source 1..2580: mol_type = other DNA
atgggaccttggggatggaagctgcgctggactgtggccctcctgcttgcagcggccggcaccgccgtaggggatagatgcgagcgcaacgaattccagtgtcaggacggcaagtgtatttcgtacaagtgggtgtgcgatggaagtgccgaatgtcaggatggatccgacgaatcacaagaaacttgtctgagcgtgacttgtaagagcggcgacttctcgtgtggcggacgagtgaaccgatgcatccctcaattttggagatgtgacggccaagtggactgcgataacggaagcgacgagcaaggttgtccgcctaaaacctgtagtcaagatgagtttcgttgccatgacggcaagtgcattagcaggcaatttgtgtgtgactcggatcgagactgtctcgatggttcggatgaggctagctgcccagtgcttacctgcggaccggccagctttcagtgtaactcctccacttgtattccccaactttgggcatgtgataacgatcccgattgcgaggacgggtcggacgagtggccacagcgatgcagaggactttacgtctttcagggagactcatcgccctgtagcgcatttgaatttcattgtttgagcggtgaatgtatccactcctcctggcgctgcgacggcggtccggactgtaaagataagtcggatgaagagaactgtgccgtcgcaacttgtcgccccgacgaattccaatgctccgacggtaattgtattcatggctcgcgacaatgcgatcgggagtatgattgtaaggatatgtccgacgaagttggatgtgtgaacgtgactctgtgcgagggacctaataagtttaagtgtcactcaggagaatgtataaccttggataaggtttgtaacatggcacgtgactgcagagattggtcggacgaacccataaaggaatgtgggactaacgaatgcctggacaacaacggaggctgctcccatgtgtgtaatgacctgaagatagggtacgagtgcttgtgtccggatggttttcagcttgtggcacagcgccgttgtgaagatattgatgaatgtcaagatccagacacttgttcgcaactctgtgttaaccttgaaggtggctacaagtgccagtgcgaagaaggcttccagctggatcctcataccaaggcgtgcaaggctgtgggcagcattgcatatctgttctttactaatcggcatgaagtccgcaaaatgactctggatcgatcggaatacacctccctgatacctaacttgcgcaatgtcgtggccctggataccgaggtggcgtcgaaccgcatttactggtcggacctgtcccaacgcatgatctgctcgacccagttggaccgagcgcatggtgtctcctcatacgacacggtcatctcgcgtgacatccaagcccccgatgggctcgcagtggattggattcacagcaacatatactggaccgattcagtccttggaaccgtgtccgtggccgacactaagggggtgaagcgtaaaaccttgtttagggagaacggttcgaaacccagagcaatagtcgttgacccagtccacggttttatgtactggaccgactggggtactccagcgaagatcaaaaagggaggactgaacggagtggacatttactcacttgtgaccgaaaacatccaatggccaaacggaattaccctggacctccttagcggacgtctctactgggtggattccaagctgcatagcatttcaagcatcgatgtgaacggcggtaaccgcaagactattctggaagatgaaaagcgtttggcacacccgttttcccttgccgtgtttgaagataaagtgttttggaccgatatcattaacgaagcaatcttttccgccaaccgactgactggaagcgacgtgaacctcctggcggaaaacctcctgtctccagaagatatggtcctttttcataacttgacgcaacctagaggtgtgaactggtgtgaaaggaccaccctgtctaacggtggatgtcagtacctgtgtctccccgcaccacagattaatccacattcccctaagtttacctgcgcatgtcctgatggaatgctgcttgctcgcgatatgaggagctgtcttaccgaggctgaggcagcagtggcgactcaggaaacctcaaccgtgcgactcaaggtcagcagcactgcagtccggactcaacataccaccacgcggccagtgccagacacttcgagacttccgggagcaactccaggacttaccactgtggagatcgtgaccatgtcacaccaggcactcggtgatgtggcaggacgcggaaatgagaagaagcccagctcagttagggcactttcaatcgtgctgcctattgtgctcctcgtgttcctttgtcttggagtgttccttctctggaagaattggagactcaagaacattaactccatcaactttgataaccccgtctaccaaaagaccaccgaagatgaagtgcacatctgtcataaccaagatggctactcctaccctagcagacagatggtgagcctcgaagatgacgtggcc

SEQ ID NO: 15911 - DNA, 2580 bp, synthetic construct
  misc_feature 1..2580: note = source = /note="Description of Artificial Sequence: Synthetic coding sequence"
  source 1..2580: mol_type = other DNA
atgggaccatgggggtggaagctgaggtggaccgtggctctgctgcttgccgctgccggaacagctgtgggagatagatgcgagagaaatgagtttcagtgccaggacgggaagtgtatttcgtacaaatgggtgtgcgatggcagtgccgagtgtcaggatggttccgatgagagccaggagacctgcctttcggttacctgtaaatctggtgatttcagctgcggaggcagggtaaatcgctgcatcccccagttttggcggtgcgacggtcaggttgattgcgacaacgggagtgacgagcaggggtgtccccccaaaacttgctcgcaggacgaatttagatgccacgacggaaagtgcattagtaggcagttcgtgtgtgatagcgatagagactgtctggatggaagcgacgaggcttcatgtcccgtcctgacatgcggccccgcatctttccagtgcaatagtagcacttgtatccctcagctgtgggcctgtgacaatgacccagattgcgaggacggctctgatgagtggccacaacggtgtcgaggattgtatgttttccagggcgattccagcccctgcagtgccttcgaatttcattgtctgtccggggagtgcatccattcttcatggagatgtgacgggggtcctgactgcaaggacaaatctgatgaggaaaattgcgcagttgcaacctgccgtcctgacgaattccagtgcagtgatggtaactgcatacacggctcgcgccagtgcgatagagaatacgattgcaaggacatgtctgatgaggttggatgtgtgaacgttaccctgtgtgagggccccaacaagtttaaatgccatagtggcgaatgcatcaccctggacaaggtctgtaatatggcccgtgactgccgggactggagcgacgaacctattaaagagtgtgggactaacgaatgtcttgataataacgggggatgctcacatgtgtgcaatgatctgaagattggctatgagtgtctttgtcccgatggctttcagctagtcgcacagaggcgatgtgaggacatcgatgaatgtcaggaccccgacacgtgttcacagctgtgcgtcaatctggagggcgggtataaatgccagtgtgaggaaggatttcagctggatccccacacaaaagcatgtaaagcagtgggcagcatagcctacctgttttttacaaatagacacgaggtccggaagatgactctggataggtctgaatataccagtctaattccaaatctcagaaacgtcgtcgccttggacacggaagtggcatccaacaggatatattggagcgacttatcacagagaatgatctgctctactcagctcgatcgggcccacggagtctccagttacgacacggtcatctccagagacattcaagccccagatggccttgctgtcgactggatacactcgaacatttactggaccgactctgtgttagggaccgtcagcgtcgctgacacgaagggggtaaagcgaaagactctgttccgcgagaatggaagcaagccccgggctatcgtggtggaccctgtccatgggtttatgtattggacagattggggaaccccagctaagataaaaaagggagggctgaatggcgttgatatttatagcctggtcactgagaacatccagtggcctaacggaatcacccttgacctgctgagcggaaggctgtattgggttgacagcaagcttcactctatcagcagcattgacgtgaacggcggtaatcgaaaaacaatcctggaggacgagaagcggctggcccaccccttcagtctggcagtgttcgaggataaggtgttctggacagacatcatcaacgaagcaatattcagcgctaatcggttgaccgggagcgacgtgaatctgctggccgagaatctactgagtcccgaggatatggtgctgttccataacctcacccagcctcgaggagtaaactggtgcgaaagaacgacgttgagtaatggcggatgccagtacctttgcctccccgccccacagattaatccccacagtccaaagtttacgtgtgcttgcccagacggcatgctcctcgctcgggatatgaggagctgtctcacggaggccgaagcagctgtggccacacaagagacctccacagtgcgcctgaaggtgtcctccactgcggtcaggacacagcacactactacccgcccagtgccagatacttcgcgacttcccggtgctaccccgggactgactaccgttgaaatcgttaccatgagtcaccaggcacttggagatgtagccggccgcggaaacgagaagaagcccagtagtgtccgagctttatccattgttcttccaattgtgttactcgtatttctgtgtctgggcgtattcctgctgtggaagaactggcgcctgaaaaatattaatagcatcaattttgataatcccgtgtaccagaaaactacagaggacgaggtacacatctgccacaatcaagacggatactcctatccatctaggcaaatggtgagtcttgaggatgatgtggcc

SEQ ID NO: 15912 - DNA, 2580 bp, synthetic construct
  misc_feature 1..2580: note = source = /note="Description of Artificial Sequence: Synthetic coding sequence"
  source 1..2580: mol_type = other DNA
atggggccttgggggtggaagttgcgttggactgtggccctactcctggcggccgcaggcactgctgtgggggataggtgcgagcgcaacgaatttcagtgccaggatggaaaatgtatttcttacaagtgggtctgtgacgggagtgccgaatgtcaggatggctccgacgagtcccaagagacgtgtctaagcgtgacctgcaagagcggcgattttagctgtgggggaagagtaaatcgctgcataccacaattctggagatgcgatggccaggtggactgtgacaacggcagcgatgaacaagggtgcccccccaagacatgcagccaggacgagttccgatgtcacgacgggaagtgcatttcccgacaattcgtatgcgatagtgaccgggactgcctggatggaagtgacgaggcttcatgccctgtccttacctgcggacctgctagcttccagtgcaatagtagtacctgcatcccacagctgtgggcgtgcgacaacgaccctgactgtgaggacggctccgacgaatggccacagcggtgtcgaggcctgtacgtctttcagggggatagttctccctgttctgcgtttgaatttcattgcctaagcggagagtgtatacacagttcttggcgctgcgatggcggccctgactgtaaggacaaaagcgacgaggagaactgtgccgtggctacctgtcgccccgatgaatttcagtgttctgatgggaactgtatccatggcagtcgccaatgtgatcgagagtatgactgtaaggacatgagcgacgaagtcgggtgcgtgaatgtgactctctgcgagggccctaataagttcaagtgccactctggcgaatgtataacactagataaggtttgtaacatggccagagactgtagagattggtcagatgagcctatcaaagagtgcggcacaaatgagtgtctggacaataatggaggttgtagtcatgtatgtaacgacttgaagatcgggtatgaatgcctgtgccctgatggcttccagctggtcgctcaaaggcggtgtgaagacattgatgagtgtcaggacccggacacttgtagtcagctctgcgtaaaccttgagggtggctacaaatgccagtgtgaggaggggttccagttagacccacacacaaaagcttgtaaggccgttggcagcatcgcttatttgtttttcacaaatcgacacgaagtccgaaagatgactcttgaccggagtgaatatacttcacttatcccgaatctcaggaacgtagtggcactggatactgaggtggccagcaatcgtatctactggagtgatctctcccaacgtatgatttgttccactcagctagatcgcgctcatggcgtgtcttcatatgacactgtgatttcaagggacatccaggctccagatggcctggcagttgattggatccactctaatatatattggacagattcagtactgggcacagtgtcagttgccgacacaaagggggtgaagcgcaagactctgtttcgtgagaatggatctaagcctagggctattgttgttgacccagttcacggcttcatgtactggaccgactggggcacacctgccaaaattaagaagggcggtttaaatggagtggacatctatagcctggtcacggagaacattcagtggcccaacggaataaccctcgatctgctgtctggacgactttattgggtggacagcaaactgcacagcatctcatccatcgatgtgaacggaggaaacaggaaaactattcttgaggatgagaaacgtctggcacacccattctcactggctgtgtttgaggataaggtgttctggactgacataataaatgaagctatattttccgcaaatagactaaccggctctgacgtcaatctactggcggaaaatctgttgagtcccgaggatatggttctgttccacaatctgacgcagccgaggggggtaaattggtgtgaacgcacaactctctccaatggaggatgtcagtacctctgtctgcccgcccctcagatcaatccccatagccctaagtttacatgcgcatgtcccgatgggatgttgctggcccgggatatgagaagctgcctgactgaggctgaggccgccgtcgccactcaggagacctccaccgtgaggctaaaagtcagtagcacggccgtgaggacacagcacaccacaacacgccctgttcctgatacctctcgcttacctggagcgacaccaggcctgactaccgtagagattgtgacgatgtctcaccaggccctaggtgacgtggcgggcagaggtaacgaaaagaagccctcctccgtcagagccctatccattgtattgcctatcgtcctgttagtgtttctgtgcctcggagtgttcctgctgtggaaaaattggagactgaagaacatcaatagcattaatttcgataatcctgtttatcagaaaaccacggaggatgaggtgcacatttgtcacaaccaggacggttattcatatccatcccggcaaatggtcagtttggaggatgacgtcgcc

SEQ ID NO: 15913 - DNA, 2580 bp, synthetic construct
  misc_feature 1..2580: note = source = /note="Description of Artificial Sequence: Synthetic coding sequence"
  source 1..2580: mol_type = other DNA
atgggtccctggggctggaagctgcgatggaccgtagcactgttgttagccgccgctggcactgctgtcggtgaccgctgtgagagaaatgagttccaatgtcaggacggcaagtgtatctcctacaaatgggtgtgcgacgggagcgcggaatgccaggacggctccgatgagtcccaggagacctgtctttcagtcacctgcaagtccggcgacttttcatgtggtggccgggtgaaccgatgtatccctcagttctggcgatgcgacggccaggtggattgcgataatggctccgatgaacagggctgtcccccaaagacgtgctcgcaggacgaatttcgatgtcatgacggcaagtgcatcagccgccagtttgtgtgcgactccgatagagattgtctcgacggatctgacgaggcatcttgccccgttctgacctgcggtcccgcctcatttcagtgtaatagctcgacttgtattccccagctttgggcctgtgataatgacccggactgtgaagatgggagcgacgaatggccgcaacggtgccgcggcttgtatgtctttcagggcgatagctccccctgcagcgctttcgagtttcattgtctgagcggagagtgcatccattctagttggaggtgtgatgggggacctgattgcaaggataagtccgacgaagagaactgtgccgtggccacatgtagaccagacgaatttcagtgttctgacggaaattgtatacacggatcccggcaatgtgatcgcgagtatgattgcaaggatatgtcagatgaagttggatgcgtgaacgttaccctttgcgaaggaccaaacaagttcaagtgtcattctggcgagtgtattacactggataaggtatgtaacatggctagagactgtcgtgactggtccgacgagccaataaaagaatgtgggacaaatgaatgtctcgataataacggcggctgctcccacgtgtgtaacgaccttaagataggctacgagtgcctgtgccctgatggcttccagctggtcgcacagagacgctgcgaggatatagacgagtgtcaggacccagacacatgttcccaactgtgtgtgaacctggaaggaggatacaagtgccagtgcgaggaaggatttcaactggatccgcacaccaaagcctgtaaggccgttggaagcatcgcatatctgttttttactaatcggcacgaggtaagaaaaatgaccctggataggtcagaatacacgtcattgatacctaatctgaggaatgtggttgcactcgataccgaagtggcttctaaccgcatctactggagcgacctctctcagcgaatgatttgttccacccagttggatagagcccacggggtgagcagttacgataccgtgatcagtcgggacatacaagcccctgatggcctagcagtcgattggatacattccaatatatattggacagatagcgtgcttggcactgtgtctgttgctgatacaaagggcgtgaagcggaagacactattcagagagaacgggtctaaaccaagagctattgtggtggaccctgttcacggattcatgtattggaccgactggggaaccccagccaagatcaaaaaaggagggcttaatggagtagacatttatagccttgtgactgaaaacattcagtggccaaatgggatcactttagacttactctccggtcgcctgtattgggtggactctaaactacatagcatcagctcaatcgatgtgaatggcggaaacagaaagaccatcctggaagacgaaaagaggctggcacatcctttcagcctggccgtttttgaggataaagttttttggaccgacattatcaacgaagcaatctttagtgccaatcggctcactggctctgacgtaaacctcttggctgagaacctcctctcgccagaagatatggtccttttccataatctgactcagccaagaggggtgaactggtgtgaacgcactactttgtcgaacgggggctgtcagtatctgtgtttgccagctccacagattaatcctcattccccgaaatttacctgcgcatgcccggacggcatgttactggcccgagatatgaggtcatgtcttaccgaggctgaggccgccgtggctacacaggaaacctcaacagttcgactgaaagtgtccagtaccgccgtaaggacacaacacactacaacgcggccggtgccggatacctcaagactgcccggcgccacccctggcctcaccacagtcgagattgtgactatgtcccaccaagccttgggcgacgtcgcaggacgcgggaacgagaaaaagcctagctcggttagggccctcagcatcgtgcttccaatagtcttgcttgtgttcttgtgtctgggtgttttcctgctgtggaaaaattggaggcttaagaatatcaactccatcaattttgataaccccgtctaccaaaagactaccgaagatgaagtgcacatctgccacaaccaagatggctactcttatccatcgcgccagatggtgtcacttgaggatgacgttgct

SEQ ID NO: 15914 - DNA, 2580 bp, synthetic construct
  misc_feature 1..2580: note = source = /note="Description of Artificial Sequence: Synthetic coding sequence"
  source 1..2580: mol_type = other DNA
atgggaccatggggatggaaattaagatggacagtagcattattattagctgctgcaggaactgcagtgggagacagatgtgaacgtaatgaatttcaatgtcaagatggtaaatgtattagttataaatgggtttgtgatggaagtgcagaatgtcaagatggaagtgatgaatcccaagagacttgtttatctgttacttgcaaaagtggtgattttagttgtggaggaagagttaatagatgtattccacaattctggcgttgtgatggacaagttgactgtgataatgggagcgatgaacagggatgtccaccaaagacttgttcacaagacgaattcagatgtcatgatggaaaatgtattagtagacaatttgtttgtgattcagatagagattgtcttgatggttctgatgaagcatcttgtccagtattaacctgtggaccagcctcattccaatgtaattcaagtacttgtattccacaactttgggcatgtgataatgatccagattgtgaagatggaagtgatgaatggccacaacgttgtagaggactttatgtatttcaaggtgactcttcaccatgttctgctttcgaatttcattgtttatctggagaatgtattcattctagttggagatgtgatggtggtccagattgtaaggataaaagtgatgaagaaaattgtgctgttgctacatgtagaccagatgagtttcaatgttcagatggaaattgtattcatggatcacgacaatgcgatagagaatatgattgtaaagacatgtcagatgaagttggatgtgttaatgttacattgtgtgaagggccaaataaatttaagtgtcattctggagaatgtattactttagacaaagtatgtaatatggctagagattgtagagattggtcagatgaacctataaaagaatgtggaacaaatgaatgtttagataataacggtggttgttcacatgtttgtaatgatttaaagattggatatgaatgtctttgtccagatggttttcaacttgtagctcaaagaaggtgtgaagatattgatgaatgtcaagatccagatacatgtagtcaactttgtgttaatttagaaggaggttataaatgtcaatgtgaagaaggttttcaacttgatccacatacaaaagcatgtaaggcagtaggttccattgcatatttgttctttactaatagacatgaagttagaaaaatgaccttggatagaagtgaatatacaagtcttatcccaaatttacgaaatgtggttgcattagatacagaagtagccagtaatagaatttattggtctgatttaagtcaaagaatgatatgttctactcaacttgatagagcacatggagtttcttcatatgatactgttatttctcgtgatatacaagctccagacggacttgcagttgactggattcattcaaacatttactggacagattcagttttaggaacagtttctgttgcagacactaaaggagtgaaaagaaaaactttattcagagaaaatggttctaaaccaagggcaattgttgttgatcctgttcatggattcatgtattggactgactggggaacacctgcaaaaattaaaaagggtggacttaatggtgttgatatctattcattagttacagagaatattcaatggcctaatggaattactttagatcttctttctggaagattatattgggttgattcaaaacttcattctattagttcaattgatgttaatggtggtaatagaaagacaatattagaagatgaaaaaaggcttgcacatccattttcacttgctgtgtttgaagataaagttttttggacagatattataaatgaagcaatatttagtgctaatagattaactggaagtgatgttaatttacttgccgaaaatcttttgtcaccagaagacatggtattgtttcataatttaactcaaccaagaggagtaaattggtgtgaacgtacaactctcagtaatggaggatgtcaatatctttgtcttccagcaccacaaattaatccacattctccaaagtttacttgtgcttgtccagatggaatgcttttagccagagatatgagaagttgtttaactgaagctgaagcagcagttgctacgcaagaaactagtactgttagattgaaagtaagttcaactgcagttcgaacacaacatacaactacaagaccagttccagatactagtagacttccaggtgctactccaggtcttacaacagttgaaattgtcactatgagtcatcaagcattaggagatgtagctggaagaggaaatgaaaaaaaaccatcatccgttagagctctttctattgttctcccaatagttttacttgtttttctttgtcttggagtttttttattatggaaaaattggcgtcttaagaatattaattcaattaattttgataatccagtttatcaaaagacaactgaagatgaggttcatatttgtcataatcaagatggatattcttatccaagtagacaaatggtatcacttgaagatgatgttgct

SEQ ID NO: 15915 - DNA, 2580 bp, synthetic construct
  misc_feature 1..2580: note = source = /note="Description of Artificial Sequence: Synthetic coding sequence"
  source 1..2580: mol_type = other DNA
atggggccatggggctggaagctgcgatggactgtggctctactgttagctgctgcaggcactgctgtcggggatcggtgcgagcgcaacgagttccagtgtcaggatggcaagtgcatcagctataagtgggtgtgcgatgggagcgcggaatgtcaagacggaagtgatgaatcacaagaaacatgcctctccgtgacttgtaagtcaggtgacttctcctgtgggggaagggtcaacagatgtatccctcagttctggaggtgtgacggccaggtggactgtgacaacggaagcgacgaacagggctgcccgcctaaaacttgtagccaagatgagtttcgctgtcacgacggcaaatgcatttccagacagtttgtctgcgattcagatcgagattgtctggacggctctgacgaggcatcctgtcctgttctcacctgtggccctgcctcgttccagtgtaactcttctacctgtatccctcagctctgggcttgtgacaacgatcccgattgtgaggatggatcagacgaatggcctcaacgttgtcggggcctctacgtttttcagggggactcatcaccgtgcagtgcttttgagtttcactgcctgtccggagagtgcatccactcatcctggcggtgcgatggaggtcctgattgcaaggacaaaagcgacgaggagaattgtgccgtagcaacctgccgcccggacgagttccagtgcagtgacggaaactgcatacatggatcaaggcagtgcgatcgtgaatacgattgtaaagacatgagcgacgaggtcggatgcgtcaacgtcaccctttgtgaagggcccaacaagttcaaatgccactccggggagtgcattactcttgacaaggtctgcaacatggccagggactgtcgtgactggtcagacgaacctataaaggagtgtgggaccaacgagtgcctggataacaacggcggctgctcccacgtgtgcaacgacctaaagattggctacgagtgcctatgccccgacgggttccagttggttgctcagcggcgatgtgaagacattgatgagtgccaagacccggacacttgtagtcaactgtgtgtgaatcttgagggaggttacaagtgccaatgtgaagaggggtttcaactggatccacacacaaaggcttgcaaagccgtaggcagtatcgcctatttattttttactaaccggcatgaagtgcgcaaaatgactcttgaccgcagcgagtatactagccttatccctaatcttcgtaacgttgtcgcactggacacggaagtggcctcaaaccgaatctattggtccgacttgtctcaacggatgatttgtagtacacagctggacagagcacacggcgtgagcagttacgatactgttatttctcgcgacatacaagctcctgacggtctggccgtcgactggattcactccaatatctactggactgacagtgtactcggtaccgtgtccgtagcagacactaagggagtgaagcgtaagacactctttagggaaaatgggtcaaagccacgggccatcgttgtggatcctgtccatgggtttatgtattggaccgattggggaactcctgccaaaatcaagaaggggggcctgaacggggtggacatttattcgttggttactgagaatattcagtggcctaacgggattacccttgacctgctgagtggacggctttactgggtggactccaagctgcactctatttcatctattgacgtgaacggcgggaatcggaagaccatcctggaagacgaaaagagacttgcacaccccttctccctggcagtgttcgaggacaaggtgttctggaccgatattatcaacgaagcaattttttcagcaaacagactgacagggtctgatgtgaatctgctggccgaaaatctgctgtcaccggaggatatggtcctgttccacaatcttacacagccacggggcgtgaactggtgcgaacgcacgacattgtccaacggcgggtgtcagtatctttgtctacctgctccacagattaacccccactcgccaaaatttacttgcgcatgccctgacgggatgcttctcgcaagggatatgcggtcttgcttgactgaggcggaagcagccgtcgccacccaggagactagtactgttaggcttaaggtcagcagcactgccgtgagaactcagcacacaaccaccagaccagtccccgacacctcaagactccccggagccaccccaggactaactaccgtggagatcgtgaccatgagccaccaagcgctaggggatgtggccggtcgcgggaacgaaaagaagccttccagcgtgcgagcgctcagtattgtgttaccgattgtcttgctggtgttcctatgtcttggggtgttcctcctgtggaaaaattggagattgaagaacataaatagtattaacttcgataatcctgtgtaccaaaagaccaccgaagatgaggtccacatttgtcataatcaagatggctacagctatccttcacgccagatggtgagtctggaggatgacgtagct

SEQ ID NO: 15916 - DNA, 2580 bp, synthetic construct
  misc_feature 1..2580: note = source = /note="Description of Artificial Sequence: Synthetic coding sequence"
  source 1..2580: mol_type = other DNA
atggggccctggggctggaagctcagatggaccgtagccctacttttagctgctgcaggcacagcagtgggtgaccgctgcgagcggaatgaattccagtgtcaagatggtaagtgcatctcttataaatgggtgtgtgatgggtctgcagagtgtcaggacggcagcgatgagtcacaggagacatgcctcagtgtgacatgcaagagcggggatttcagttgtggcggtagagttaacagatgtattccccaattttggcgctgtgacggccaggtggactgcgacaacgggtctgacgagcagggttgtccacccaagacgtgctcgcaggatgaatttcggtgccacgacggcaaatgtatttcaaggcagtttgtgtgcgatagtgaccgagattgcctcgacggcagtgacgaggcctcctgcccagttctgacatgtggccccgccagtttccagtgcaactcgtctacatgcatccctcagttatgggcctgcgataatgacccagactgcgaagatggatccgatgagtggccccagcggtgtcggggtctctatgtcttccagggcgatagcagcccttgtagcgctttcgagttccactgtctgtctggagagtgtatacactcctcctggagatgcgatggcggccccgactgtaaagacaagtcagatgaggagaactgtgcggtggccacctgcaggccagatgagttccaatgcagcgatggcaattgcatccacggaagtcgccagtgcgaccgggagtacgattgcaaggacatgtccgacgaagttgggtgcgtcaacgttacactgtgtgagggacccaacaaatttaagtgtcattctggtgagtgcatcacactggataaagtctgtaacatggcgagagactgcagggattggagtgatgagcctattaaagagtgtggaacgaatgagtgcctggacaataatgggggctgttctcacgtgtgcaacgatctcaagatagggtatgagtgcctctgtccagatgggttccaactggtcgcccagcgccgatgtgaggatatcgacgaatgtcaggatccagacacctgttcacagctatgcgttaacctggagggtggatacaagtgccagtgcgaagaaggttttcagctggatcctcataccaaagcgtgtaaggcagttggcagtattgcctatctgttcttcaccaatcggcatgaggtcaggaagatgactcttgaccgcagcgagtacacttccctgattccaaatttgagaaatgtggtagcactcgacacagaggtagcatctaacaggatctactggagcgacttatcccaacggatgatctgcagcacccagctggatcgggctcacggcgtttcatcttacgatactgtgataagccgggatattcaagccccagacggactggccgtggactggattcacagtaacatttactggacagactcggtactggggactgtctccgtggcggataccaagggtgtcaagcgaaagactctgtttcgtgaaaatggatcgaaaccacgcgccatcgtggtggacccagtgcacggattcatgtattggacagactggggcaccccagccaagataaagaaaggtggacttaatggcgtggatatttactctctggttactgagaacatccagtggcccaacgggataaccctggaccttttatccggtcggttatactgggtggacagtaagctccacagcatctcttccattgacgttaatggagggaatagaaagacaatcctggaagacgagaagaggctcgcacaccccttttctctcgcagtgttcgaggataaggtcttctggacagacattataaacgaggcgattttctcagcgaaccggctcactggctcagacgtcaacctcctggccgaaaacttgctatctcctgaggacatggtgctgtttcacaatttgacccagccacggggtgtgaactggtgcgagcgcaccacccttagcaacggggggtgccagtatctttgccttcctgcacctcagatcaatcctcactccccaaagtttacgtgtgcctgccccgatggcatgctgctggccagagatatgcgttcatgcctgacagaagcagaggccgccgtcgccacacaggagacgtcgaccgtcaggttaaaagtctccagcacagcagttaggacacagcataccactacccgacccgtgcctgacacttcccggcttccgggggctactccggggcttactaccgtggaaatcgtgacaatgtcacatcaggcgctcggcgacgttgccgggagagggaacgagaagaaacccagtagtgttcgagctctgtcgatcgtgctaccgatcgtccttctcgtcttcctctgtctgggcgttttccttctgtggaagaactggcgactgaagaatattaacagtattaacttcgataatccggtttatcagaagacaacagaggatgaggtgcatatttgtcacaatcaggacggatatagctacccttctcgccaaatggtgtctttggaagatgatgtggcg

SEQ ID NO: 15917 - DNA, 2580 bp, synthetic construct
  misc_feature 1..2580: note = source = /note="Description of Artificial Sequence: Synthetic coding sequence"
  source 1..2580: mol_type = other DNA
atgggtccatggggctggaaacttagatggaccgtcgccctgttattggctgcagccgggacagcggtgggtgacaggtgcgagagaaatgaatttcaatgtcaggatggtaaatgtatctcttacaagtgggtttgcgatggaagcgctgagtgtcaagacggtagcgacgaatcacaagaaacatgtttgtctgtaacctgcaagtcgggcgatttctcctgtgggggtagggtaaaccgatgcattcctcagttctggcggtgcgatggccaggtggattgcgacaacgggagtgatgagcagggatgtccccctaagacctgctcacaagatgagtttcggtgccacgacgggaaatgcatctcccggcagttcgtgtgcgactcggatcgggactgcctggatggcagcgatgaagccagttgccctgtactgacttgtgggccggcctcattccagtgtaatagttccacctgcatcccccagttgtgggcgtgcgacaacgacccagactgtgaagatggctccgatgaatggcctcagcggtgtcgcgggctctacgtcttccagggagatagctcaccttgctccgcattcgaatttcactgcctttccggcgaatgcattcatagttcttggaggtgcgatggaggcccagattgcaaggataagtccgatgaagagaactgcgctgtggccacatgtaggccggacgagttccagtgtagtgacggtaactgcattcacggctcccgtcagtgtgaccgagagtatgactgcaaggatatgagcgacgaagtgggctgcgtgaacgttactttatgtgagggacccaataaattcaaatgccattctggggaatgtataaccctggacaaggtttgtaacatggctcgagactgcagagattggtcagacgaacccatcaaggagtgcgggactaatgagtgcttagataataacggaggctgcagccacgtctgcaatgacctgaaaattgggtatgaatgtttatgccccgatggattccagttggtcgcacagcgtagatgtgaagatattgatgaatgtcaggatccagatacatgtagccaactgtgtgtgaacttggaaggtggatacaagtgccagtgcgaggagggattccagttagacccccacaccaaggcctgtaaagccgtaggcagcattgcctatctgttcttcaccaaccgccacgaagtgagaaagatgaccttggatcggagcgaatacacctctctgattccaaatttgcgtaacgtggtagctctcgacactgaagtcgcctcaaataggatttactggtctgatctgtctcagaggatgatttgtagtacgcagttggaccgtgcccacggagtcagtagctacgacaccgtgatctcgcgagatatccaggctccagatgggttggcagttgactggatccattccaacatttactggaccgacagtgtgttggggaccgtttcagtggctgataccaagggggtgaagcggaagacactttttagggagaatggatccaagccccgcgctattgttgtggaccccgttcacggctttatgtattggactgattggggcaccccagccaaaatcaagaaaggaggcctgaacggcgtggacatttactccctcgtcaccgaaaatatccagtggcccaatgggatcaccctggatctgctgtctggtcggctgtactgggtcgattccaaactgcattctatatcctcaatcgatgtgaatggaggtaacaggaagacgatcctggaagacgagaaacgcttggctcaccccttcagcctggccgtttttgaagacaaggtgttctggactgacataatcaacgaagcgattttcagcgctaataggctaactggatccgatgttaacctgttagcagaaaacttgctctcccccgaagatatggttctgttccacaatctcacacagcccagaggcgtgaattggtgcgaacgtacgacgctgtccaatggggggtgccagtatttgtgcctgcctgccccacagatcaacccccattcgccaaagttcacctgtgcctgtccagacggtatgctcctggcccgggacatgcgctcctgccttaccgaggccgaggcggccgttgcaacacaggaaacatccacagtgaggcttaaggtttcttcaaccgcagtaaggacccaacacacaacaactaggccagtccctgatacaagtcgcctgccgggcgctactcccggtctgaccacggtcgaaattgtgaccatgtcacatcaggcccttggcgacgtcgctggtcgcgggaatgagaagaagccgagctcagtacgcgctttgtcaatcgtcctccctatcgtgctgctcgttttcctgtgcctaggtgtgtttctcctctggaagaattggcgactcaagaacataaacagtataaacttcgataatccagtatatcagaaaacgacggaggatgaagtgcatatctgccacaatcaagatggatactcttatcccagcagacagatggtgagtctggaggacgatgttgct

SEQ ID NO: 15918 - DNA, 2580 bp, synthetic construct
  misc_feature 1..2580: note = source = /note="Description of Artificial Sequence: Synthetic coding sequence"
  source 1..2580: mol_type = other DNA
atgggcccttggggatggaaactcagatggaccgtggccctcttgctcgctgcagcagggaccgctgtcggagaccgatgcgagcggaacgaatttcaatgccaggatggcaaatgtatttcatacaagtgggtgtgcgacggtagcgccgagtgccaggatgggagtgatgagagccaggagacatgcctgtcagtcacctgtaagagtggcgacttttcctgcggcgggagggtgaaccgctgtattccgcagttttggcggtgtgatggacaagtggattgcgacaacggctcagacgaacagggatgtcctccaaagacatgctctcaggatgagtttcgatgtcacgacggaaaatgcatttccaggcagtttgtgtgtgactctgacagggactgcctggacgggagcgatgaggcttcctgtcccgtgctcacctgcgggccagcatctttccagtgcaacagtagcacttgtatccctcagctttgggcctgtgataatgacccagactgcgaggacggctctgacgagtggccccagagatgcaggggattgtacgtcttccagggcgacagcagcccttgcagcgcatttgaattccactgtctcagcggcgaatgtatacacagctcctggaggtgcgatgggggacctgactgtaaggacaagtccgacgaagagaattgcgcagtagccacatgtcgccctgacgagttccagtgctccgacggaaactgtatccacgggtcccggcagtgtgatagagagtatgattgcaaagatatgtctgacgaggtaggatgtgttaacgtcaccctctgcgaggggccgaataagttcaagtgccacagtggtgagtgtatcactttggataaggtctgtaacatggcccgggattgcagggactggtcagatgaacctattaaggaatgcggtactaatgagtgtctggacaataatggcggttgttctcacgtgtgtaatgacttgaagatcgggtacgaatgcctctgcccagacgggttccagctcgtcgcccagaggcgatgtgaggacattgacgaatgccaagatccagacacgtgttctcagctttgcgtaaacttggagggtgggtacaagtgtcagtgcgaagaagggtttcaactcgatccacacaccaaggcatgtaaggccgtggggtccattgcgtacctgtttttcaccaataggcatgaagtgcggaaaatgactctggaccgctctgaatacacctctttgatccccaacctcaggaacgtggtcgccctggatacagaggtagctagtaatcgcatttactggtcagatctgtctcagcgcatgatctgctctacccaactggacagggcacatggagtcagttcttatgacacggtgatctctagagatatacaggccccagacgggttggccgttgactggattcattccaatatctactggacagatagcgtgctgggtacagtttctgtggccgatacaaagggcgtcaagagaaaaaccctctttagagaaaacggcagcaagccacgggcgatagtggtcgatcccgtccacggctttatgtactggacagattgggggacccccgccaagattaagaagggggggttgaatggagtcgacatatacagcctggtcaccgaaaacattcaatggcctaacgggatcacactcgacctgctgagcgggcgcttgtattgggtggattctaagcttcacagcatctcttcaatagacgtcaacggcggtaaccgcaagaccatactggaagatgaaaaacgactggcgcatccgttctcacttgcagtgttcgaagacaaggtgttctggacagacatcattaacgaggcgattttttcagccaacagattgaccggttccgacgtgaacctgctggcagaaaatctgctcagccctgaagatatggtgcttttccacaatctcacacagcccaggggagtgaattggtgtgaacgcaccactctttctaatggtggttgtcagtatctgtgtcttccagcacctcagatcaatcctcatagccctaagtttacgtgtgcatgtccggatggcatgttgctcgcgcgagatatgcgatcctgtctgaccgaagccgaggctgctgtggctactcaggagacgtccaccgtcagactcaaggtgtcttccaccgctgtgcgcactcaacacactaccactcggcctgtacccgatacgagccgcttgcccggggctactcccggacttaccactgtggagatagtgacgatgagccaccaagctctgggcgacgtggctggcagaggtaacgagaagaaaccgtcctcagtccgggccctctccatcgtgctgcctatcgtgctgcttgtgtttctttgcctcggagtgtttctcctttggaaaaactggaggctgaaaaacattaactccatcaacttcgacaatccagtgtaccagaaaaccaccgaagatgaagttcacatctgtcacaatcaggacgggtattcataccccagccgccaaatggtttcccttgaagacgatgtggca

SEQ ID NO: 15919 - DNA, 2580 bp, synthetic construct
  misc_feature 1..2580: note = source = /note="Description of Artificial Sequence: Synthetic coding sequence"
  source 1..2580: mol_type = other DNA
atggggccatggggatggaagctgcgctggaccgtggcgctgctcctggctgccgcaggaaccgccgtgggagacagatgcgaaagaaacgagttccaatgccaggatggtaaatgtatctcgtacaagtgggtttgcgatgggtcagccgagtgtcaggacggatcggatgagtcgcaggaaacctgcctgtcagtgacgtgtaagtccggagacttctcctgtggaggaagagtcaatagatgcatcccacagttttggcggtgcgatggtcaggtagattgcgacaatggaagcgacgagcagggatgcccgcccaagacctgtagccaggacgaattcagatgtcacgacggtaagtgtatttcccgacagtttgtctgtgattccgaccgcgactgtcttgatggatcagatgaagcgtcgtgccccgttctgacttgtggacctgcctcgttccagtgcaatagctcaacctgcatccctcaactctgggcatgcgacaatgatcctgattgcgaagatggatcagacgagtggcctcagcgctgccggggactctacgtgttccagggagattcgtcaccctgctcagctttcgagtttcactgcctgtcgggagaatgtatccatagctcttggcggtgtgacggcgggcctgattgtaaggacaagtcggacgaagaaaattgcgccgtggcgacttgcaggccggatgaattccaatgtagcgatggcaactgcattcacggatcccgccaatgcgaccgcgagtacgactgcaaagacatgtccgacgaagtcggatgcgtcaacgttactctgtgcgaagggccaaataagtttaagtgtcactctggagaatgcatcaccctggataaagtgtgcaacatggcgcgcgactgtcgcgactggtcggacgagccgatcaaggagtgcggaactaacgagtgtctggataacaatggaggttgcagccacgtgtgcaacgatttgaagatcggctatgaatgcctgtgcccggacggcttccagctcgtggcacagcgacggtgcgaggacatcgacgagtgccaggaccctgacacttgttcccagctgtgcgtgaatctcgaaggagggtacaagtgccagtgcgaggaaggattccagctggatcctcataccaaggcgtgcaaggccgtcggatcaatcgcgtacctgtttttcactaacagacacgaagtgcgcaaaatgaccctggaccgttcggagtacacctccctgatcccaaacctgagaaacgtggtggcactcgacaccgaagtcgcctcgaacaggatttactggtcggacttgagccaacgcatgatctgttcgactcagctggatcgcgcgcatggagtgagctcctacgataccgtgatctcccgcgacatccaggcgcccgacggactggcggtcgactggatccatagcaacatttactggactgattctgtgttgggtactgtgagcgttgccgatactaagggagtgaagcgcaagaccttgttccgggaaaacggatcaaagcccagggcaatcgtggtcgaccctgtgcatggattcatgtattggaccgactggggcaccccagcgaaaatcaaaaaaggagggttgaatggagtggatatctatagcctggtgactgaaaacatccaatggcccaacggaattacccttgacttgctctcaggcaggctctactgggtggattccaagctgcactcaatctcgagcatcgacgtgaacggcgggaacaggaaaacgattctggaagatgagaagagactggcccacccattctcgctggccgttttcgaggacaaggtgttctggaccgacatcatcaatgaagcaatcttctccgcaaacaggctgaccggatcagatgtgaacctcctggcagagaacctcctttcaccggaagatatggtgctcttccataacctgactcaaccgagaggagtcaattggtgcgaaagaactacgctgagcaacggcgggtgccagtacttgtgtctcccggcacctcagattaatccgcatagccctaaattcacttgcgcctgcccagatgggatgctgctggcacgggacatgcgctcctgcctgactgaggccgaagccgccgttgccacccaggaaacgagcacggtgaggcttaaggtgtcaagcactgcagtcagaacccaacacaccactactagaccagtgccggatacctcgagactgccgggcgctacccccggactcactaccgtggaaattgtgacgatgtcccaccaagccctgggggacgtggcgggaagaggcaacgagaaaaagccatcctcggtgcgggctcttagcattgttctgccgatcgtcctcctggtgtttctgtgcctgggcgtgtttctgctttggaagaactggaggctcaaaaacatcaattcgatcaatttcgataatcccgtgtatcagaaaactacggaggacgaggtgcacatctgtcacaaccaagatggatactcatacccttcccgccagatggtgtcgctggaggacgatgttgcg

SEQ ID NO: 15920 - DNA, 2580 bp, synthetic construct
  misc_feature 1..2580: note = source = /note="Description of Artificial Sequence: Synthetic coding sequence"
  source 1..2580: mol_type = other DNA
atgggtccctggggatggaagctaagatggaccgtagcgttgctgctggctgcagcagggactgctgtgggcgatcggtgtgagcgcaatgagttccagtgccaggatggcaagtgcatttcgtataaatgggtttgtgatggttcagcagaatgtcaggacggatccgacgagtctcaagaaacttgtctgagcgtgacatgtaagagtggtgacttctcatgcggaggccgggtgaacaggtgcataccccagttttggaggtgcgacggccaagttgactgcgacaacggaagtgacgaacaggggtgtccacccaagacatgctcacaggatgagttccgatgtcacgatggcaagtgtatttcccgacagttcgtgtgcgacagtgatagggactgcctggacgggtctgatgaagccagctgtcctgtgctgacttgtgggccagcttcctttcagtgtaactcaagcacttgtatcccccaattatgggcctgcgataacgatcctgattgtgaggatggaagcgatgagtggcctcagagatgtcggggcctctacgtcttccaaggagattccagtccatgtagcgcatttgagtttcactgcttgtctggcgaatgcatccacagctcatggcggtgtgacggaggacccgattgcaaggacaaatcggatgaagagaactgcgcagtggccacttgtagacctgatgagtttcagtgtagcgacggcaattgtatacacggaagtagacagtgtgatcgggagtacgactgcaaggacatgtcagatgaagtaggatgtgtcaacgtgacactctgcgagggtcccaataaatttaagtgccattccggagagtgtattacactggacaaggtttgtaacatggcacgagattgtcgggactggtccgatgaacctatcaaggaatgcggtaccaatgaatgcctggataataacggtggctgtagccatgtgtgcaacgacctaaaaattggctacgagtgcctctgcccagacggattccagcttgttgcacagcgtcggtgtgaagacatcgacgaatgtcaggatcccgacacatgctcgcaactgtgcgtgaacctcgagggaggatataagtgccagtgtgaagagggcttccaactggatccacacaccaaggcctgcaaagctgtggggtctattgcctacctgtttttcaccaatcgccacgaagtacggaaaatgacgcttgaccgatctgagtacacctccctaattcctaacctccggaacgtggtggcgctcgataccgaggttgcttctaataggatctattggtccgacctttcacaaaggatgatctgctctacacaattggatagggcccacggcgtatcttcctatgatacagtgattagccgtgacattcaggcccctgacggcctcgccgtagattggattcattccaacatatactggaccgactctgtcctaggcaccgtgagcgtggcagacaccaagggagtgaaaagaaaaaccctgtttagggaaaatggcagcaagccaagggctatagttgtggaccctgttcacggtttcatgtactggacagattgggggacacctgcaaagatcaagaaaggtggtctgaatggggtggacatttatagcttggtaactgagaatatccagtggcctaatgggataactttagatctgctgtccggtagattgtattgggtggacagtaaattgcattctatttccagcatcgacgttaatggcggaaaccggaagaccattttagaggacgagaaacgcctcgcacatcccttcagtctggccgtattcgaggataaggtcttttggaccgacattattaatgaagccatcttctcagctaacagactgactgggagcgacgtcaatctgctagctgagaatctgctcagtccagaagatatggtgctctttcataaccttacacagcctagaggtgtgaattggtgcgagcgaacaaccctctctaatggagggtgccagtacctatgcctgccagccccccagattaatcctcactctcctaagtttacttgtgcttgtccggatggaatgttgctcgcacgtgatatgcgctcttgtctgactgaggcggaggcggctgtcgccacacaggaaacctcaaccgttcgccttaaggtgtcaagtactgctgtaagaacccagcacacaaccactaggccagtgcctgacaccagcagattgcccggggccactcccgggttgacaacagttgagatcgtaacgatgagccaccaggccctcggggatgtcgcggggaggggcaatgagaagaagccatcctcagttagggctctcagcatcgttctgcctatagtcctattggtgtttttgtgcttaggggttttcctcctgtggaaaaactggaggttgaaaaatatcaacagtataaatttcgacaatcctgtgtatcagaagactacagaagacgaagtgcatatttgccacaaccaggacgggtattcctatccatcccgccagatggtgagcctcgaggacgatgtggct

SEQ ID NO: 15921 - DNA, 2580 bp, synthetic construct
  misc_feature 1..2580: note = source = /note="Description of Artificial Sequence: Synthetic coding sequence"
  source 1..2580: mol_type = other DNA
atgggaccatggggttggaaactaagatggacagtcgccttactgctcgcggccgcgggcaccgcggttggtgacaggtgtgaaaggaatgagtttcagtgccaggacggaaagtgcatcagctacaaatgggtctgcgatgggagtgctgagtgccaggatggcagtgacgaatctcaggagacatgcctgtctgtgacctgtaaatccggtgatttctcctgcggcggcagagtgaatcgatgtatacctcaattctggagatgcgatggtcaggttgactgcgataacggtagcgacgagcaggggtgtcctccgaagacttgttcccaggatgaattcagatgtcatgatggcaaatgtatttcacgacaattcgtgtgtgattccgatagagattgcctggacggatctgacgaggcttcttgtcccgtgttgacttgcgggcctgcaagttttcagtgtaattcttcgacttgcatccctcagctatgggcctgtgataacgatcctgactgcgaggacggtagcgatgaatggccccagcgatgccgaggcttatacgtctttcagggggattcaagcccctgttcagcattcgagtttcattgtctgagtggagagtgtatccattcgtcttggaggtgcgacggaggccccgactgtaaggacaagagcgacgaggaaaactgcgcagtcgccacttgtcgccctgatgaattccagtgctctgacggcaactgtatccatggtagcagacaatgcgaccgcgagtacgattgtaaggacatgagcgatgaggttgggtgtgtgaatgtaactctttgtgagggtccaaataaatttaagtgtcattcaggcgaatgcattacactggacaaagtgtgtaatatggcgagggattgtcgtgattggtccgatgagccgatcaaggagtgtggaacaaacgagtgcctggataataacggggggtgttcacatgtgtgtaatgatctgaaaattggatacgaatgcctctgccccgacggatttcagctcgtggcccaaagaaggtgcgaggatatcgatgagtgtcaggacccagatacgtgttctcagttatgcgtgaatctggagggcggttataaatgccagtgcgaggagggtttccagctggatccccacacaaaggcttgtaaggccgtgggcagcatagcctatctcttctttacaaatcgacatgaggtgcgaaagatgacgcttgataggtcagagtatacttcactgattcccaatctccggaacgtggttgccttagacacagaggtggcaagtaaccgtatttactggagtgatctcagccagcggatgatttgttcaacccagctcgatcgcgcccacggtgttagttcttacgacacagtgatctctcgggatatccaggcccctgatggattggccgttgactggattcactccaacatctattggaccgacagtgtactgggcacagtgtccgttgcagatactaagggagtgaaaagaaaaaccctatttagagagaacggaagtaagccccgagccattgtcgttgatccggtgcacggctttatgtattggacagactggggaacccccgcaaagatcaagaagggcggcctcaatggtgtggacatctattccctagtgactgagaatattcagtggcccaatgggatcacactggacctactgagcggccggctgtactgggtggacagtaaactccattcaatctcctcaatagatgtgaatggtggtaacaggaaaactatattagaggacgaaaagcggttggcccaccccttctccctggctgtatttgaggataaggtattctggactgacattatcaacgaagcaattttcagtgccaaccgcctcacggggagcgatgttaacctcctagctgaaaatctccttagcccagaagatatggtgcttttccacaacctcacccagccccgaggtgtaaactggtgtgagcgcaccacactgagcaatggtggctgccaatatctctgcctgcctgcaccccaaattaacccgcattctcctaagttcacctgcgcgtgtccggacggcatgctgctggcaagggacatgaggagctgtctgacggaggcggaagcagcagtggctactcaagagacaagcaccgttcgattaaaagtgtccagcacagcagtcagaactcagcatactacaacccggccagttcccgacacaagcagactgccaggcgccacaccagggctaactactgtagagattgtgacaatgagtcaccaggctctcggcgacgtcgctggcagaggtaacgaaaagaaaccatccagtgtgcgggcactgtctatcgtgctgcctattgtgctgctcgtgttcctgtgtctcggagtttttctgctatggaagaactggaggctgaaaaacatcaactccataaactttgacaatccagtgtaccaaaagaccactgaagacgaagtgcatatctgtcacaatcaagatggctatagctacccaagccggcagatggtgtccctggaagatgacgtcgcg

SEQ ID NO: 15922 - DNA, 2580 bp, synthetic construct
  misc_feature 1..2580: note = source = /note="Description of Artificial Sequence: Synthetic coding sequence"
  source 1..2580: mol_type = other DNA
atgggtccatggggctggaagctgcggtggaccgtcgccttgctgctggccgcagccgggactgccgtgggggatcggtgtgagcgcaacgaattccaatgtcaggatggcaagtgtatttcttacaaatgggtgtgcgacgggtccgccgagtgccaagacggttccgacgagtcccaggagacctgtttaagtgtgacctgcaaatctggcgacttttcctgtgggggtcgagtaaacagatgtatccctcagttctggaggtgtgacgggcaggtcgattgtgacaacggatctgacgagcagggatgtccccccaagacctgtagtcaggacgagtttaggtgtcatgatggtaaatgcatctcaagacagtttgtttgcgacagtgacagggactgtcttgacggttcagacgaagccagttgtcccgtgttgacgtgcggtcctgccagcttccagtgcaatagcagcacctgtatccctcagctgtgggcctgtgataacgacccggactgtgaggatggctctgatgaatggccgcaacgatgccgaggactgtacgtgtttcaaggcgattctagtccctgcagtgcattcgaattccattgcctgagcggggaatgcatacattcctcttggcgttgcgacggtgggccagactgcaaagacaagagtgatgaggagaattgtgccgtggcaacctgtagacccgatgaatttcagtgctccgacggaaattgtatccacggaagccgacagtgtgatcgagagtacgactgcaaggacatgtcagacgaagtagggtgtgtaaacgtgaccctctgtgaagggcctaataagttcaaatgccacagcggtgagtgtatcacgctggataaggtgtgtaacatggcgagagactgtagggactggtcagatgagccaattaaggaatgtggtacaaatgaatgtctggacaataacgggggttgttcccacgtctgcaacgacctcaagattggttatgagtgcctgtgtcctgacggctttcaactggtggcccagcggcgatgtgaagatatagatgaatgtcaggaccctgacacatgtagccagctgtgtgttaatcttgaaggcggctataagtgtcagtgcgaagaagggtttcagcttgatcctcatacaaaggcttgtaaggccgtcggaagtatcgcctacctgttttttactaacaggcatgaagtcaggaaaatgacactcgatcgttcagagtacactagtctgatccccaatcttagaaatgtagttgccttagacactgaagtggccagtaacagaatctactggagcgatttaagccagcgtatgatttgcagtacccagttagacagggcccatggagtgagtagctatgatacagtgatatctagggacattcaggcccctgatggactggccgtggactggatccattcaaacatctactggacagactcagtcttgggtaccgtctcggtggccgatactaaaggggtgaaaaggaagacactgttccgggagaacggttctaagccacgtgccatcgtggtcgatccagtacacgggttcatgtattggacagattggggtacaccagctaaaatcaagaagggtggcttgaatggtgtggatatctacagcctggtgacagaaaatattcagtggcctaacggaattactcttgacctgttatctggtaggctttactgggtggactccaaactccattctatttcgagcatcgatgtgaacggcggcaatcgcaaaactattctggaggacgagaagcgactcgcccatccttttagtctggccgtgtttgaggataaggtgttctggactgatatcattaatgaggctatcttcagcgccaatcgtctgaccgggtcagacgtaaacctcctcgcagagaacctgttgtctcctgaggacatggtgctgttccataacctgacacagccccgaggcgttaattggtgtgagcgaacaactctgtctaatggaggctgccagtatctttgccttcctgccccgcaaatcaacccccatagccccaagtttacatgcgcttgtcctgatggcatgctgctggctagggatatgcgaagctgcttgacagaggctgaggccgcagtggctacacaggaaaccagtacagtgcgattgaaggtttcctctactgccgtacgcactcagcacaccaccacacgacccgtcccagacacatctcgacttccaggagccactccggggcttaccaccgttgagatagtgaccatgagtcatcaagccttaggagatgtagctggcagagggaacgaaaagaaacccagcagtgtacgagccctgtccatcgttctcccaattgtactacttgtgttcctttgcctgggcgtgtttcttctttggaaaaactggagactgaaaaatatcaactccattaatttcgacaaccccgtgtatcaaaagacaaccgaggatgaggtgcacatctgccacaaccaagatggctactcctatccatccagacagatggtgtctctagaagacgacgtagct

SEQ ID NO: 15923 - DNA, 2580 bp, synthetic construct
  misc_feature 1..2580: note = source = /note="Description of Artificial Sequence: Synthetic coding sequence"
  source 1..2580: mol_type = other DNA
atgggaccgtggggatggaagctccgctggaccgtggctctgctcctcgcagcggccggaacggctgtcggagacaggtgcgagcgcaatgaattccaatgtcaggatggaaaatgcatatcctacaaatgggtgtgtgacggttctgcggaatgccaagacggatccgacgagtcccaagaaacttgcttgagcgtgacctgcaaatcaggtgatttctcgtgcgggggacgcgtcaacagatgcatccctcagttctggcgctgcgatggacaagtcgattgtgacaacggttcagacgaacaaggatgccctcctaagacgtgctcccaggacgaattccgctgccacgatggtaagtgcataagcaggcaattcgtgtgcgatagcgacagggattgcttggatggatccgatgaagcgtcctgcccggtcctgacttgcggcccggccagctttcagtgcaactcgtcgacctgtatcccacaactgtgggcctgcgacaatgaccccgactgcgaggatggctcggacgagtggcctcagagatgccggggcctgtacgtgttccaaggcgatagctcaccgtgttctgccttcgagttccactgcttgtcgggagagtgcatccactcctcgtggcgctgcgacggcggaccggattgcaaggacaagagcgacgaagaaaactgcgccgtcgcgacgtgccgtccggacgagttccagtgctcagacggcaattgcatccatgggtcccgtcagtgcgatcgggaatacgactgcaaagatatgagcgacgaggtcggatgcgtgaacgtgactctgtgtgaaggaccgaacaagttcaagtgccattctggagaatgcattaccctggataaagtgtgcaacatggcacgcgattgccgggactggtccgatgagcctatcaaagaatgcggaactaacgagtgtctggataacaacgggggatgttcacatgtgtgtaatgatctgaaaatcggatacgagtgcctctgcccggatggtttccagcttgtggctcagcgcaggtgcgaagatatcgatgaatgccaggatccggacacgtgttctcagctctgcgtgaatctggaaggcggctacaagtgccaatgcgaagagggattccagctggacccgcatactaaggcctgcaaggccgtgggttcgatcgcctacctgttcttcaccaaccggcatgaagtccggaagatgacgctggatcgaagcgaatacacctcgcttattccgaatctgagaaatgtcgtggccttggatactgaggtcgcctcaaaccggatctactggtcggacctcagccagcgcatgatctgttccactcaattggaccgggcccacggcgtcagcagctacgacactgtcatttccagggatatccaagccccggacggactcgccgtcgattggatccattcgaatatctactggacggactcagtgctgggcactgtgtccgtcgcagacaccaagggtgtgaaacgcaagaccctgttccgggaaaacgggtcaaagccgcgcgcgatcgtcgtggacccggtccatggattcatgtactggactgattggggcacccccgcaaagatcaaaaagggaggactgaacggggtggatatctattcactggtgaccgaaaacatccagtggcccaatggtatcacgctggatctgctgtcagggaggctgtactgggtggactcgaagctccactccatctcgtcgattgatgtgaatggcgggaaccgcaaaactattctcgaagatgagaagcgcctggcgcatccattctcgctggccgtgtttgaggacaaggtgttctggaccgacattatcaacgaagccattttctcggcaaaccggctgactggatccgatgttaacctcttggccgaaaatctgctgtcacccgaggacatggtcctctttcacaatttgacccaaccacggggagtcaattggtgcgaaaggaccacgctgtccaacggcgggtgccaatacctctgcctgccagcgcctcagatcaaccctcacagcccgaagtttacttgcgcctgtccagacgggatgctgctggcacgggatatgagatcgtgcctgaccgaggccgaggcggccgtggcaacccaagaaactagcaccgtgaggttgaaggtgtcatctaccgcggtgcggacgcagcacaccactactagaccggtgccagatacctccaggctccctggtgcaaccccaggactgactaccgtggaaattgttaccatgtcccaccaggcactgggcgacgtagctggaagaggaaacgaaaagaagccgtcatcggtgagggctctcagtatcgtcctgcccatagtgttgctggtgtttctgtgcttgggtgtgttcctgctttggaagaattggcgcctcaagaacatcaattcaatcaatttcgataacccagtctaccaaaagacgaccgaggacgaggtgcacatctgtcataatcaagacgggtactcatatccatcgagacagatggtgtccctggaggacgacgtggcc

SEQ ID NO: 15924 - DNA, 2580 bp, synthetic construct
  misc_feature 1..2580: note = source = /note="Description of Artificial Sequence: Synthetic coding sequence"
  source 1..2580: mol_type = other DNA
atgggaccctgggggtggaaactgagatggacggtggcgcttctcctagctgcggctgggacagcagtcggagatcggtgtgagcgaaacgagtttcagtgtcaggatgggaaatgcattagttataaatgggtatgcgatgggtctgcagaatgccaggacgggtcagatgagtctcaggagacttgtctttcagtcacttgtaagtctggggacttttcatgcggaggaagagtcaaccgatgtataccacagttctggagatgtgatggacaagtggactgtgataacggatctgatgaacaagggtgtccacctaaaacatgcagtcaggatgaatttcggtgtcacgatgggaagtgtataagtagacagttcgtctgtgattcagatagagactgtcttgatggatcagatgaagcttcttgccccgtactcacatgcgggccagcctcctttcagtgtaattcctctacatgtattcctcagctctgggcatgcgataacgacccagattgcgaagatggatctgatgagtggcctcaacgctgccggggactctacgtatttcagggggattcaagtccttgttccgcctttgaatttcactgtctttctggagaatgcatccacagtagttggaggtgtgatggggggcccgattgtaaggataaatccgacgaagaaaattgcgctgtagctacttgtcgcccagacgaattccagtgttctgacggaaattgcatccatggaagtcggcaatgtgatagagaatacgattgcaaagacatgtccgatgaagttgggtgcgtaaatgttacactttgtgaagggcctaataaatttaagtgtcactctggggagtgtattacacttgataaagtatgcaatatggctcgggactgcagagattggtctgatgagccaattaaagaatgtgggactaacgagtgcctggataacaatggaggatgttctcatgtgtgcaatgatctgaaaattggatatgaatgcctttgtcccgacgggtttcagctcgtggcccagaggcgctgtgaggacatcgatgagtgtcaagatcccgacacatgttcacagctctgcgtcaatttagaaggggggtacaaatgccagtgtgaagaagggttccagcttgatccacatactaaagcctgtaaagctgtagggtctatagcctatcttttctttacaaacaggcatgaagttagaaaaatgactctggatagaagtgaatatacttctctaattcccaatcttaggaatgtcgtagcactagatactgaagtggcctctaacagaatctattggtctgacctaagtcaaagaatgatctgctccactcagttagaccgggcacatggggtgtcctcttatgatacagtcatctctcgggatatccaggcgccagatgggcttgccgtcgactggattcacagtaacatttattggacagattcagtactgggaactgtatctgttgcagatacaaaaggggtcaagagaaaaacactgttcagggagaatggatctaagcctcgggcaatagtggtcgatcccgtacatggatttatgtattggacagattggggaactcctgcgaaaattaaaaaaggaggattaaacggagtcgatatatattcactagtgactgaaaacatccagtggcccaatgggattacacttgatctcctttctggacggctgtattgggtagatagtaaattacattctatctcatcaatcgacgtcaatggggggaaccggaagactatactagaagatgaaaaacgcctcgcacaccccttttcattagcggtttttgaagataaagtcttttggacagatattataaacgaagctatattctccgccaatcggctcacaggaagtgacgtcaatctcctcgccgagaatcttctgtccccagaagatatggtgctattccataatttaacacagcctaggggagtgaactggtgcgaaaggactactctttcaaatggagggtgtcagtatttatgccttccagcccctcagattaatcctcactctcctaagttcacatgtgcttgccccgatggaatgctgctggcccgggatatgagatcttgcctcacagaagctgaagctgccgttgccacacaggagactagtactgtaaggctgaaagtgtcctctactgcagtgagaactcagcatacgactactcgccccgtccctgatacttctaggctgcccggagcaacacccggactcacaacagtggaaatcgtgacaatgagtcatcaggcattgggagatgtagcgggaaggggaaatgaaaagaaaccttcaagtgtgagagcgctgtccatcgtgcttcctatcgtgctgttagtatttctatgtttaggagtttttttactttggaagaactggcggctcaagaacataaattctattaactttgataacccagtgtaccagaaaacaacggaagatgaagttcatatctgccataatcaggatggatattcctacccatctagacagatggtatccctggaagatgatgtggct

SEQ ID NO: 15925 - DNA, 2580 bp, synthetic construct
  misc_feature 1..2580: note = source = /note="Description of Artificial Sequence: Synthetic coding sequence"
  source 1..2580: mol_type = other DNA
atgggcccgtggggctggaagcttcgctggaccgtcgctctccttcttgccgcggcaggcacagctgttggtgaccgttgcgagagaaatgaattccagtgccaagatggaaagtgcatcagttataaatgggtatgcgacggcagtgccgaatgccaagatggatcagatgaatcgcaagagacgtgcctgtcagtgacatgcaagagcggggacttctcttgcggtggacgcgttaaccggtgtataccgcaattttggcgttgcgatgggcaggtcgattgtgataacgggagcgatgaacaagggtgcccaccgaaaacgtgtagtcaagacgaattccgctgccacgatggaaaatgcattagccggcaatttgtctgcgattcggatagagactgcttggatggctcagacgaggccagttgccctgtgctgacatgtggaccggcgtcttttcagtgcaattcctcaacatgcatcccccaactgtgggcgtgcgacaatgacccagactgcgaagatggctccgacgagtggccgcaacgttgtcgtggcctctacgtattccaaggcgacagctcgccgtgttctgcctttgaatttcattgcctgtcgggtgaatgtattcactccagctggagatgtgatggaggcccggattgcaaggataaatcagacgaagagaattgtgcggtcgctacgtgtcggcctgacgaatttcaatgttcagacggcaactgcatccatggaagccgacagtgcgatagggagtacgattgcaaggatatgtccgacgaagtggggtgtgtgaacgtcacactgtgcgaggggcctaataaattcaagtgccattcgggcgaatgcataacgttagataaggtgtgtaatatggccagagattgccgcgattggtctgacgagccgattaaagaatgtggaacaaatgagtgccttgacaacaacggaggttgttcacatgtctgcaatgacttgaagattggttacgaatgtttatgtcctgacggatttcaattagttgctcaaagaagatgtgaggatatcgacgaatgtcaggatcctgatacgtgcagccagttgtgtgttaatcttgaaggtggatataaatgccagtgcgaggaaggctttcagctcgaccctcacacgaaagcgtgcaaagccgttgggtcaattgcctaccttttttttacaaatcgtcatgaagttaggaaaatgaccttggatagaagcgaatatacaagcctgatcccaaacctgcggaatgttgtcgcactggacacggaagtggcctcgaatcgtatctactggtcagacctgtcacagaggatgatttgcagtacacagttggatcgcgctcatggcgtcagctcatatgatacggtgattagtcgagatatacaagcgcctgacggattagcggtcgattggattcatagcaatatttactggactgattccgtactgggaacggtgagtgtggcggatacaaagggagtgaaacgcaaaacattatttcgcgaaaatggttcaaaaccgagggcaatcgtagtcgatccggttcatggttttatgtattggacagattgggggacgccggccaagattaaaaaaggcggattaaatggtgttgatatttactccttggttacggaaaatatacaatggccgaatggtataacgttggatttgctatcaggtcggttatattgggtggattctaaactgcactctataagttcaattgatgtgaacggcggaaaccgcaaaacaattttggaagacgaaaaacgcttagcgcatccattctcactggccgtgtttgaagataaagtcttttggacggacattattaatgaagcgattttctcagcgaataggcttacaggctctgatgtaaatttgttagcggaaaatctgctgtcaccggaagatatggtcttgttccataaccttactcagccgcggggcgttaattggtgcgagcggaccacattatcaaatggcggatgtcaatatctatgcttacctgcgccgcaaattaatccgcattcaccgaaattcacgtgcgcttgcccggatggtatgttgcttgcgcgagatatgcgcagttgcctgacagaagcagaggccgcggtagcgacccaggaaacatcgacggtccgtctcaaagtcagctcgacggccgtcagaacacaacatacaacaacgagaccagtaccggatacaagcagattaccgggagctactccgggattgacgacagtggagatcgtaacaatgtcccaccaggcactgggagacgtggctgggcgcggaaatgaaaagaaacctagcagtgtgcgcgcgttaagcatcgtcttaccaattgttctgttagtattcttatgcttgggcgtctttcttctgtggaaaaattggagattgaaaaacattaatagcatcaacttcgataacccggtttaccagaaaacaactgaggacgaagttcatatatgtcataaccaggacggatattcttatccaagtagacaaatggtctctttagaggatgatgtggcg

SEQ ID NO: 15926 - DNA, 2580 bp, synthetic construct
  misc_feature 1..2580: note = source = /note="Description of Artificial Sequence: Synthetic coding sequence"
  source 1..2580: mol_type = other DNA
atgggaccgtggggttggaagctgagatggaccgtggccttgttgctggctgcagcgggaactgccgtgggtgacagatgcgaacggaatgaatttcaatgccaagacggaaagtgcatttcctacaagtgggtttgtgacggttctgccgaatgtcaagacggatcggatgagtcccaggagacttgcttgtcggtcacttgtaaatccggcgatttctcctgtggagggagagtgaatagatgtatcccacagttctggcggtgcgacggacaggtggattgcgacaacgggtcggacgaacagggatgcccgccaaagacttgctctcaggacgaattccggtgccacgatggcaagtgtatcagccgccagtttgtttgcgactcagatcgggactgtctcgatgggtcggacgaggcttcatgcccggtgctgacctgcggacctgcgagcttccaatgcaactcctccacgtgcatcccgcagctttgggcgtgcgacaatgatccggattgtgaagatggatccgacgaatggcctcaaagatgccggggactctacgtgtttcagggggactcctctccttgctccgcctttgaattccactgcctctcaggtgaatgtatccattcttcatggagatgcgacggtgggccggactgcaaggacaaatcggacgaagaaaattgtgccgtcgcgacgtgccgccccgacgagttccaatgctctgacggcaactgcatccacggatcgaggcagtgtgatagagaatacgattgcaaagatatgagcgacgaagtgggctgcgtgaacgtgactctctgtgagggccctaacaagttcaagtgtcacagcggagagtgcatcacgctcgacaaggtgtgtaatatggcgcgggattgccgggattggtcagacgagcctatcaaggaatgcggtaccaatgaatgtcttgacaacaacggaggatgcagccatgtgtgcaacgacctgaagatcggatacgaatgtctttgcccggacggctttcagctggtggctcagcggcgctgcgaggatattgatgaatgccaggaccccgatacgtgctcgcagctgtgcgtgaaccttgaaggcggatacaaatgtcagtgcgaggaaggattccagcttgatccgcacaccaaggcttgcaaggccgtaggatccatcgcttacctcttcttcaccaatcggcacgaggtcagaaagatgaccctggatcgctccgagtacacctctcttattccgaacctgaggaatgtggtggcgctggatactgaagtggctagcaataggatctactggtcggacctctcccagaggatgatctgcagtacccagctggaccgcgcgcatggtgtgagctcctacgacaccgtgatctcgcgcgacatacaagccccagacggtctggccgtggattggatccattcgaatatctactggaccgactccgtgcttggtactgtgtctgtggcagatactaagggagtcaagagaaagactttgttccgcgaaaacggctcaaaaccgcgcgctattgtcgtggatccggtgcatggtttcatgtattggacggattggggcactccggcgaagatcaagaagggaggtctgaacggagtggacatctactccctggtgaccgaaaacatccagtggcccaacgggatcactctcgacctcctgtcaggacgcctctactgggtcgactccaaattgcatagcatctcgtccatcgatgtgaacggaggaaaccgcaaaactattctcgaggacgagaagcggttggcgcaccctttcagcctcgccgtctttgaggataaggtgttctggaccgacatcattaacgaggctatcttctcagctaatcgccttacgggatccgacgtcaacctgctcgcggaaaacctcctttccccagaggacatggtcttgttccataatctgacccaaccgcgcggggtgaactggtgtgaacgcaccactctgtctaacggagggtgccaatacctgtgcctgcccgcaccccaaatcaatcctcactcgccgaagtttacctgcgcctgtccagacggaatgcttctggcgcgcgacatgcggtcctgcctcactgaggcggaggccgctgtggcaactcaggaaacctcaactgtgcgactgaaagtgtcctccaccgcggtgcgtacccaacataccaccacccgtcctgtcccagatacttcgcggctgcctggggctactccaggtctgactactgtggaaatcgtcaccatgtcccatcaagcattgggcgatgtggcaggtcgcggaaatgaaaagaaaccctcaagcgtgagggctctgtcgatcgtcctgccaatcgtgctgctggtgtttttgtgtttgggagtgttcctgctgtggaagaattggcgcctcaagaatatcaactcaattaacttcgacaaccctgtctatcagaaaaccactgaggacgaggtgcacatctgccacaaccaggatggctactcctacccgtcaagacagatggtcagcctggaagatgacgttgcc

SEQ ID NO: 15927 - DNA, 2580 bp, synthetic construct
  misc_feature 1..2580: note = source = /note="Description of Artificial Sequence: Synthetic coding sequence"
  source 1..2580: mol_type = other DNA
atgggcccctggggatggaagttacgctggactgttgcactgcttcttgcggccgctggaactgccgtaggggaccggtgcgaacgaaatgaattccagtgtcaggacggcaaatgcatttcttacaagtgggtgtgtgacggttccgcagaatgccaggatggctccgatgagtcacaggaaacctgcctatcggttacctgcaaaagcggggatttctcgtgcggagggcgagtgaatcggtgcattccgcagttctggagatgtgatgggcaggtcgattgtgacaatgggagtgatgagcagggctgccctcccaagacttgttcacaggacgaattcaggtgccacgacggtaaatgtatttcccgacagttcgtctgcgactcagatcgagattgtcttgatggaagcgatgaagcttcgtgccctgtcctcacttgtggtcccgcttcctttcagtgtaactcatctacctgcatcccgcagctgtgggcttgcgataatgatccggactgtgaggacggatccgacgaatggcctcaacgctgccggggcctatatgtttttcaaggggactccagtccctgctctgctttcgagttccattgtctctctggggagtgcatccactccagctggcgatgcgacggaggacccgactgtaaggataaaagcgatgaagagaactgtgccgtcgccacttgtcggcctgatgagtttcagtgttctgatggaaattgtatacatgggtctaggcagtgcgaccgcgagtatgactgcaaggacatgtcagatgaggttgggtgcgtgaacgtgactctgtgcgagggtccgaataaattcaagtgccatagtggggagtgcattactctggacaaggtctgtaacatggctagagattgtagagattggtctgatgagcccattaaagagtgcggaacgaacgaatgcctggataacaacggtgggtgcagccacgtgtgcaatgacttgaaaatcgggtatgagtgcctatgtccagacgggtttcaactggtggcccaacgtcgctgcgaggacattgacgagtgtcaggacccagacacctgcagtcagctttgtgtgaatctcgagggagggtataagtgtcaatgcgaggagggattccagcttgacccacatactaaggcctgtaaagcagtgggttcgatcgcttacttgttcttcacaaataggcacgaggtcagaaagatgacactagatcgtagcgagtacacgtccctgattcctaatctgaggaatgttgtcgccctcgataccgaggtggcctctaatagaatctattggagtgacctgagccagaggatgatttgctcaacacagctggaccgggctcacggggtgagcagctatgacaccgtcatttctcgggatattcaggcaccagacggcctcgcggtggactggatacattccaacatctattggacagacagcgtgcttggcacagtgtccgtggccgacaccaaaggcgtgaagcgaaaaaccctgttccgcgaaaacggctccaaaccccgagctatagtggtggatcccgtacatggcttcatgtactggacagactggggtacaccagctaagatcaaaaagggcggactgaacggggtggatatttactctttggtgacagaaaacattcagtggcccaacgggatcactctcgatctcctcagtggaaggctgtactgggtcgattctaaactccactccatctcatccatagatgttaacggcggcaatagaaagactatcttggaagatgagaagcggcttgcacatcctttcagcctcgccgtgtttgaggacaaggtcttctggaccgacattatcaatgaggcgatattttccgcaaatcgcttgaccgggtctgacgtgaacctactcgcggagaacctccttagccctgaggacatggtcctgttccataaccttactcagcctcgcggcgtcaattggtgtgagcgaactactctgtcgaacggaggatgccaatatctgtgtctgccagcaccacagatcaaccctcattcaccgaaatttacctgtgcatgcccagacggcatgctcctcgcgagagacatgcgatcttgccttacagaagccgaagctgcagtcgccactcaggaaactagcacggttagactgaaggtgagtagcaccgcggtaagaacgcaacacactacaaccagacccgttcccgatactagccggctgcctggggcaacaccaggattgaccaccgtcgaaatcgtgaccatgtcccatcaggccctcggcgacgtcgctggaagagggaatgaaaaaaagccctcaagtgtacgggctttaagcatagtacttcctattgtcctgttggtgtttctgtgcttaggagtgtttctcctctggaaaaactggcgtctgaagaatataaattctattaattttgacaatcctgtctaccaaaaaactacagaagacgaagtgcatatctgtcataatcaagacgggtacagctatccatctcgccaaatggtctcgttggaagacgatgtcgct

SEQ ID NO: 15928 - DNA, 2580 bp, synthetic construct
  misc_feature 1..2580: note = source = /note="Description of Artificial Sequence: Synthetic coding sequence"
  source 1..2580: mol_type = other DNA
atgggcccatggggctggaagctccggtggactgttgctcttcttctcgcggccgctgggactgcagtcggcgataggtgtgaacgaaatgagtttcagtgccaggacggaaaatgcatcagctacaagtgggtttgcgacggctcggcagaatgtcaggatggttcggacgaatcgcaggagacttgtttgagcgtgacctgtaagtcaggagatttttcctgcggcggtcgcgtcaacaggtgcatcccgcagttctggagatgtgacggacaagtggattgcgacaatggatctgacgagcaggggtgcccgccgaaaacttgctcgcaggatgaatttcgctgccacgatggaaagtgtatttcacgccagtttgtgtgtgacagcgatcgcgactgcctggatgggagcgacgaagcctcgtgtccggtcctcacttgcggccctgcctcgttccaatgcaactcgagcacgtgcatcccccaactgtgggcatgtgacaacgaccctgattgcgaggacggttcagacgaatggccgcaaagatgccggggattgtacgtattccagggtgactcctccccttgctcagcgttcgagttccattgcctgtcaggagaatgcatccattcaagctggcggtgcgatggcggcccggactgtaaagataagtcggacgaggagaactgcgcagtggccacgtgccgccctgacgaatttcaatgttcggacggcaactgcatccacggctcaaggcaatgcgaccgggagtatgattgcaaagacatgtcggacgaggtcggatgcgtgaacgtaaccctgtgcgaagggcccaataagttcaagtgtcattccggagaatgtatcactctcgataaagtgtgtaatatggcgagagactgccgggactggtcggacgagcctatcaaagagtgcggaaccaacgaatgcctggacaacaatggagggtgctcacacgtttgtaatgacctcaagattggatacgagtgcctgtgcccagacggattccagctggtcgcgcagagacggtgcgaggacatcgatgagtgccaagacccggacacttgctcccagctgtgcgtcaatctggaaggcggctacaagtgccagtgcgaagaaggattccagctcgatccacataccaaggcatgcaaagccgtgggatcaatcgcctacctgtttttcaccaatagacacgaagtgaggaaaatgaccctggaccgcagcgaatatacctcgctgatcccgaatctccggaacgtggtcgccctcgacaccgaagtggcgtcaaataggatctactggtcggatttgtcgcagagaatgatttgctcaacccagctggaccgcgcccatggcgtgtcaagctacgatactgtgatcagcagggacatccaagcgccagacgggctcgcggtggactggattcacagtaacatatactggactgactcggtcttgggtaccgtgagcgtggccgacaccaagggtgtgaagagaaagactctgttcagggaaaacggatcaaaaccgcgggctatcgtggtggacccagtccacggattcatgtactggactgattggggcaccccggccaagatcaaaaagggcggactgaatggggttgacatttacagtcttgtgacggaaaacatccaatggccgaacggcatcaccctggacctcctgagcggacgcttgtactgggtcgactcgaagctgcattcgatcagctcgatcgatgtcaacggcggaaaccgcaagaccatcctggaggatgagaagagactcgcccacccgttctcgctcgccgtgttcgaagataaagtgttctggaccgacatcatcaatgaggcgatcttttccgcgaaccgtctcactggcagtgacgtgaacctgctggcggagaatctgctgtcgcccgaggatatggtgctgttccacaacttgacccaaccgcgcggtgtgaactggtgtgaacggactacgctgtcaaacggaggctgccagtacctgtgtctgccagcccctcaaatcaacccacattcgccaaaattcacttgtgcttgtcctgacggaatgctgctggcgcgcgacatgcggtcgtgtttgaccgaagcggaggctgccgtggctactcaagagacttccactgtgcggctgaaggtgtcctccaccgccgttcgtacgcagcacactactaccaggccggtcccagatacttctcgcctgccgggggccacccccggacttactacggtcgagatcgtgactatgtcgcaccaagcgctcggagacgttgctggcagagggaatgagaagaagccgagctcagtgagagcactgtcaatcgttctgcccatcgtgctgctcgtgttcctctgcctgggagtgttcctgctgtggaagaactggaggctcaagaacatcaacagcatcaattttgataatccagtgtaccaaaaaactactgaggatgaggtgcacatctgccataatcaggatggatactcgtacccatcacgccagatggtgagcctggaagatgatgtggcg

SEQ ID NO: 15929 - DNA, 2580 bp, synthetic construct
  misc_feature 1..2580: note = source = /note="Description of Artificial Sequence: Synthetic coding sequence"
  source 1..2580: mol_type = other DNA
atgggaccatggggatggaagcttaggtggaccgtcgctctcctgcttgccgccgcaggaactgccgtgggcgacagatgcgagcgtaatgagtttcaatgtcaggacggaaagtgcatcagttacaagtgggtatgtgacggatccgccgagtgccaagatggttccgacgaaagtcaggagacctgcctcagcgtaacatgtaagagcggagacttcagttgcggcggaagggtcaatcgttgcatccctcagttttggcgctgcgatggacaggtcgactgtgacaacggttcagacgagcagggctgcccccccaaaacatgttcccaagacgaatttagatgccacgacggaaaatgtatctcaaggcagttcgtctgcgacagcgatagagactgtctggatggtagtgacgaagctagctgccctgtactgacctgtggccctgccagcttccagtgtaactcctccacatgcataccccagctgtgggcctgcgacaacgatcccgactgcgaggacggtagtgacgaatggccacagcgctgtaggggtctttacgttttccagggagactcctctccatgttctgctttcgagttccattgcttgtccggagaatgcatccatagctcttggaggtgcgatggaggtccagactgcaaggacaagagcgatgaagagaactgtgccgtggctacatgcaggcccgacgagttccaatgtagcgatggaaactgcatccacggttctaggcagtgcgacagagaatacgactgtaaggacatgagcgatgaagtgggttgtgtcaatgtgaccttgtgtgagggacccaacaagttcaagtgccactctggagagtgcatcacattggacaaagtatgcaatatggctcgtgattgcagggactggtctgacgagcccataaaagaatgtggtacaaacgaatgcctggataacaatggaggatgtagtcacgtctgcaacgatctcaagattggctacgagtgtctctgccccgacggattccaactggttgcacagaggaggtgcgaggacatagacgagtgccaagatcctgacacttgctcccagttgtgtgtcaacctcgagggaggctacaagtgccaatgtgaggagggtttccagttggatccacacactaaggcctgcaaggctgttggatccatcgcctatctgttctttacaaacagacacgaagtgcgcaaaatgaccctcgatcgttctgagtacacctctctcatccctaacttgaggaacgtggtggctttggacactgaggtggctagtaatagaatttactggagtgacctgagccaacgtatgatttgcagtacacagctggatcgcgcccacggagtgagcagctacgacaccgtcatcagtcgtgatatacaggcacctgacggacttgcagttgattggatccactccaacatctattggactgactcagtgcttggcactgtgtctgtggctgatacaaagggagtgaagcgcaagacattgttcagggagaatggttctaaacctcgcgctatcgttgtggaccccgtacatggcttcatgtactggactgattggggcacacccgccaagataaagaagggcggactcaacggcgtggacatctactccctggtgacagagaacatccagtggcccaacggcatcacattggatcttctctccggcagactttattgggtggactctaagctccattccatatcaagcatcgatgtcaatggtggtaatcgtaagaccatcctggaggatgagaagcgtctcgcacacccattctcactggctgtatttgaggataaggtgttctggactgacatcattaacgaagcaattttttctgccaaccgcctgaccggctctgacgttaacctgttggccgaaaatcttctcagcccagaggacatggtgcttttccataacctcacccaaccccgtggtgtaaactggtgcgaacgtactacactgtctaatggaggttgccagtacctgtgcctgcccgctcctcagatcaaccctcactcacctaagtttacctgcgcctgccccgatggaatgctgctggccagggacatgcgtagctgtcttaccgaagccgaggctgcagtggccactcaggagactagcaccgtgcgtcttaaggtctccagtacagctgtaaggacccagcacactacaacccgtcctgtaccagacacttcacgtttgccaggcgctacacctggcctcaccaccgtagaaattgtaaccatgtcacaccaagctctgggagacgtggctggaagaggtaatgagaaaaagccttccagcgtgcgcgccttgtctatcgtcttgccaatagtcctgctggtatttctctgtctgggtgttttcctgctgtggaaaaattggcgtctcaaaaacatcaactcaattaacttcgataaccctgtgtaccagaaaactactgaggacgaggtgcatatctgccacaatcaggatggctactcttacccctcacgccaaatggtgtccttggaggatgatgtagct

SEQ ID NO: 15930 - DNA, 2580 bp, synthetic construct
  misc_feature 1..2580: note = source = /note="Description of Artificial Sequence: Synthetic coding sequence"
  source 1..2580: mol_type = other DNA
atgggcccttggggatggaagctccggtggaccgtggccctgctcctcgcggccgccggaaccgccgtcggcgataggtgcgaacggaatgagttccagtgccaggatggaaagtgtatttcatacaagtgggtctgtgacgggtccgccgaatgccaggacggatcagacgaaagccaggagacgtgcttgagcgtgacttgcaaatcgggagatttctcgtgcggaggccgcgtgaacaggtgtatcccacagttttggcgctgcgatggccaagtggattgcgacaacggttccgatgaacaaggatgtccccctaagacttgctctcaagatgagttcagatgtcacgatggtaaatgtatcagccggcagttcgtgtgcgactccgacagggactgcttggacggatctgatgaggcttcttgcccggtcctgacttgcggccccgcctcctttcaatgcaatagcagcacctgcatccctcagctgtgggcctgcgacaatgacccggattgcgaagatggcagcgatgaatggccgcaacgatgccgcgggctttacgtgttccaaggagactcgtcaccatgttccgcgttcgaattccactgcttgagcggagaatgcattcactctagctggaggtgcgacggaggacccgactgcaaagataaatccgatgaagaaaattgcgccgtggctacttgtcgcccagacgaattccagtgttccgatggaaactgtattcatggatcaagacagtgtgatcgggagtacgactgcaaggacatgtccgatgaggtgggatgtgttaacgttaccctgtgcgagggcccgaacaagtttaagtgtcactccggggagtgcatcacgctcgataaagtctgtaatatggccagagactgccgcgattggtcggacgagccgatcaaggaatgcggaaccaacgaatgcttggacaataacggaggatgctcacatgtgtgcaacgatctgaagatcgggtacgaatgtttgtgtcccgatggattccagctcgtcgcccaaagaagatgcgaggacatcgacgagtgccaggatccggacacctgctcacaactctgcgtgaacctcgaaggaggatataagtgtcaatgtgaggaaggatttcaactcgacccgcatactaaagcgtgcaaagctgtcggatcgatcgcttacctgttcttcacgaatcggcacgaagtgagaaagatgactttggaccgctcagaatacacttcactcatccccaacctgcgcaacgtcgtggcgctggatactgaagtggccagcaaccggatctattggtcggatctctcccagcggatgatctgctccacccagctggaccgcgcccacggggtttctagctacgacactgtcatctccagagacatccaggccccggacggtctggctgtggactggatacattcaaacatctactggactgactcggtcttgggcaccgtctcggtggcagacaccaagggggtgaaacggaaaactctgtttcgcgaaaacggatcgaagccgcgcgcgatcgttgtggacccagtgcatgggtttatgtactggaccgattggggaacgcccgctaagatcaagaaaggagggctcaacggagtcgacatttactcattggtgaccgagaatatccagtggccgaacggtatcactctggaccttctgtccggtcggctgtactgggtcgattccaagctgcactcaatctccagcatcgacgtgaacggcggaaaccgtaagacgattctggaggacgagaagcggctggcacaccctttcagcctcgcggtgttcgaggacaaggtgttctggactgacattatcaacgaagctatcttcagcgccaatcgcctgactggcagcgacgtgaacctgctcgcagaaaacttgctgagcccggaagatatggtgttgtttcacaacctgactcagcccaggggagtgaattggtgtgaacgcactaccctgtcgaacggaggctgccagtacctgtgcctgccggcaccgcagattaacccgcatagcccgaagttcacctgcgcatgtccagatggcatgcttctcgcccgggatatgcggtcctgtctcactgaagctgaagcggccgtggcgactcaggaaacctctactgtgcgactgaaggtgtcctccaccgctgtccgcacccagcataccacgactcggcctgtgccagacaccagccggctgcccggcgcgactcctggattgaccacggtggaaattgtgaccatgtcacaccaggcgctgggagatgtcgcaggcagaggtaacgaaaagaagccatcaagcgtgcgcgccctgagcatcgtgctgccgattgtgctgctggtgttcctttgtctgggagttttccttctgtggaaaaactggcgcttgaagaacatcaattcgatcaatttcgacaatccagtgtaccaaaaaactactgaggacgaagtgcacatctgccataaccaggatggatactcctacccatcacgccaaatggtttcgctcgaggacgatgtggca

SEQ ID NO: 15931 - DNA, 2580 bp, synthetic construct
  misc_feature 1..2580: note = source = /note="Description of Artificial Sequence: Synthetic coding sequence"
  source 1..2580: mol_type = other DNA
atgggcccttggggctggaagctgaggtggacagttgctctattgttggctgccgctggaaccgctgtcggcgacagatgcgagagaaacgaattccaatgtcaggacgggaaatgcataagctacaaatgggtctgcgacggctcggcggagtgccaagacggctcggacgaaagccaagaaacatgtctgtccgtgacctgcaagtcgggcgactttagttgcggaggaagagtgaacaggtgtattcctcaattctggaggtgcgatggacaggtggactgtgacaacggtagtgatgagcaaggttgccctccaaaaacctgtagccaagatgagttccggtgccacgacggaaagtgcatctcacgccagtttgtgtgcgatagcgatcgagattgcctggacgggtcagatgaggcatcatgtccagtgctgacttgtggccccgcttcatttcagtgcaattctagcacttgcataccccagctctgggcatgcgataacgatcccgattgcgaggatggctctgacgagtggcctcagagatgtaggggattatatgtgtttcagggcgacagctctccctgcagtgcctttgagttccattgcctcagcggggaatgtatccattcaagctggcggtgcgatggaggccctgactgcaaggacaagtctgacgaagaaaactgcgccgttgccacctgtagacccgacgaattccaatgcagcgatgggaattgtatccacggctccaggcagtgcgaccgagagtatgactgcaaggatatgtctgatgaagtcggatgtgtgaacgtaaccttgtgcgagggaccgaacaaattcaaatgccattctggagagtgcatcacactggataaagtgtgcaacatggctcgcgactgtcgggactggagcgatgaacccattaaagaatgcggaactaacgaatgcctggacaataacggcggctgctcccatgtgtgcaacgatttgaagatcggttacgagtgcctgtgccctgacggcttccagctggtggcccagcggaggtgcgaagacatcgatgagtgccaggaccctgatacttgttcccagctctgcgtgaatctggagggcggctacaaatgccagtgtgaggaaggctttcaactggacccacatactaaagcttgtaaggctgttggatctattgcctatcttttctttaccaacaggcacgaggtcaggaagatgaccttggacagaagcgaatacacgagtctgatccctaaccttcgaaatgtggtggcactggataccgaagttgcttcaaatagaatttactggagcgatcttagccagcgcatgatctgttcaacccagctagacagggcacacggcgtgagctcatacgatacagttatcagcagggatatccaggcgcctgacgggcttgctgttgactggatccacagcaacatctattggaccgattctgtgctgggaacagttagcgttgcagataccaaaggagtgaagaggaaaactctctttcgcgagaacggttctaagccccgcgcaatcgttgtggacccagttcacggctttatgtattggactgactggggcacaccggcaaaaatcaagaaagggggcctcaacggagtcgatatctactctctggtcaccgaaaacatccagtggcctaacgggataaccctcgaccttctgagcgggagactttactgggtggacagtaaactccattcgatatctagtattgatgtaaatggtggcaacagaaagactattcttgaagacgagaaacgcctggcccaccccttctcactggcggttttcgaggacaaggtgttctggactgacattatcaacgaggcaatcttcagcgctaaccgattgacaggcagcgacgtcaacctcttggccgaaaatctgctatctccagaggatatggtgctcttccataacctgacacagccgcgtggagtcaactggtgcgaaaggaccaccttgagcaatggcggctgccaatatctgtgcctccctgctccccaaatcaatcctcatagtcctaaattcacctgtgcatgccccgacggcatgctgctcgcccgggatatgaggtcttgtctcaccgaggctgaggccgcagttgcaacccaggaaacttcaacagtgaggttaaaagtgtcatccaccgccgtgcgcacccagcacactaccacccggcccgttcctgacacaagcaggctgcccggagccaccccagggcttactactgtcgagatcgtgaccatgtcccaccaagcactgggagacgtggccggcagaggaaatgaaaagaagcctagcagcgtgagagccttgtctattgttctgcctatcgtgctgcttgtctttttgtgtcttggggttttcctcttatggaaaaattggcgcctgaaaaatatcaacagtataaacttcgataaccccgtttaccagaagacaactgaggacgaagtccacatttgccacaatcaggacggatattcatacccatcacgccaaatggtgtcacttgaggatgatgtcgct

SEQ ID NO: 15932 - DNA, 2580 bp, synthetic construct
  misc_feature 1..2580: note = source = /note="Description of Artificial Sequence: Synthetic coding sequence"
  source 1..2580: mol_type = other DNA
atgggcccttggggttggaagctgcggtggacggtggctctcttgctagcggccgctggaacagctgtcggagacaggtgtgagagaaacgaattccagtgtcaggatggaaaatgtatatcatacaagtgggtgtgcgacggaagcgccgaatgccaggatggatcggacgagtcccaggagacatgcctgtctgtcacctgtaaaagtggtgatttctcatgtggcggacgggtgaacaggtgcattccccaattctggcgctgtgatgggcaggtggattgtgataacggctccgacgagcagggttgtcccccaaagacttgtagccaggatgagtttagatgtcacgatggaaaatgtatttcacggcaattcgtctgcgattctgacagagattgtcttgacggctctgatgaggcgagttgtccagtgctgacatgtggcccagcgtcgttccaatgtaattctagtacgtgcattcctcagctctgggcttgcgataatgatcccgactgcgaagacgggtcggacgagtggccacagaggtgcagaggcctttacgtcttccagggggactcctccccatgttctgccttcgaatttcattgtctttcaggtgaatgcatccattcatcttggaggtgcgacggaggcccggattgtaaggataagagcgacgaggaaaactgcgcagttgcaacctgccggcctgacgaatttcaatgcagcgatggaaactgcatacacggttccaggcaatgtgaccgagagtatgattgtaaagatatgagcgatgaagtcggctgcgtgaatgtgacactgtgtgaaggccctaataagttcaagtgccactccggcgagtgtattacacttgacaaggtgtgtaacatggcccgcgactgccgggactggtcagacgagcccattaaagagtgcggcaccaatgaatgtctcgataataacgggggctgttctcatgtgtgcaacgatctgaaaatcggttacgaatgcttgtgcccagatgggtttcagctcgtggctcaaagacgatgcgaagacattgatgagtgccaggatcccgatacctgttctcagttgtgcgtgaaccttgaaggcggctacaaatgccagtgcgaagagggcttccagctggacccccacaccaaggcttgtaaagccgtgggttccattgcataccttttctttacaaacaggcatgaggtgaggaagatgactttagatcgttcagagtacacctctctcatacctaacctcaggaacgtggtcgctctcgacacggaggtcgcaagtaacagaatctactggtccgacctttcccagcggatgatctgcagtacccagctagatagagcacatggggtgtctagctacgacaccgtgatttcgcgggacattcaagccccagacgggttggcggtggattggattcactcaaacatctattggactgattcagtgctcggcacagtatctgtggccgatactaagggggttaagagaaaaacccttttcagggagaacggcagtaaaccccgggcaatagtagtggacccagtgcatgggtttatgtactggacggattgggggactcccgccaagattaaaaaggggggtcttaacggtgtcgacatatattcgttagttacagagaacattcagtggccaaacggtatcaccctagacctgttaagtggcagactgtattgggtagacagcaagctccactccatctcgtccatcgacgtgaatggcgggaaccggaaaaccatcctggaggacgagaagcgactggcccaccccttctcacttgcagtgtttgaggacaaagtgttttggacagacattatcaacgaggctatattctcggctaatcgcttgactgggagcgatgtcaatcttctcgccgagaacctcctgtctccggaggacatggtgctgttccataatcttacccagcctcgcggcgttaattggtgcgaacgaactacattgtccaatgggggttgccagtatctatgtctgccagctccccaaattaatccacactccccaaaatttacctgcgcctgtcctgatggcatgctgcttgcaagggacatgagaagctgcttaacagaagccgaggctgcagtggccacacaggaaacctctactgtgcgattaaaagtgagcagcacagccgtgagaacccagcatacaaccacccgcccagtgcctgatacttcacggctgccaggcgccacaccaggactgacgactgtagaaatcgtgacaatgagccaccaggccctcggggacgttgcagggagaggtaacgagaaaaagccaagctcagtgagggcattaagtattgttttgcccatcgttctgctggtatttctgtgtctgggagtattcctcctgtggaagaactggcgcctgaagaatatcaattctatcaactttgacaaccccgtgtaccagaaaaccacagaagatgaggtgcatatttgccataaccaagacggttactcgtatccaagtaggcagatggttagcctggaagacgatgttgca

SEQ ID NO: 15933 - DNA, 2580 bp, synthetic construct
  misc_feature 1..2580: note = source = /note="Description of Artificial Sequence: Synthetic coding sequence"
  source 1..2580: mol_type = other DNA
atgggaccgtgggggtggaagcttcgctggactgtcgctttgttattagctgcagcgggaactgccgtcggcgacagatgcgaaagaaatgaatttcaatgccaggatggcaaatgtatttcttataaatgggtctgtgatggaagcgccgaatgtcaagacggaagcgatgagtctcaagaaacgtgtttgtcagttacgtgtaaatcgggggatttcagttgcggtggtcgagttaatagatgcatcccacaattctggcgatgtgatggtcaagttgattgcgataacggaagcgatgagcaaggatgtccgccaaaaacgtgttcgcaagatgagttcagatgtcatgatggaaagtgcatttcccgacaattcgtgtgcgattcagatagagattgcttggatggttcggatgaagcatcttgccctgtgctgacttgtggacccgcaagttttcaatgcaattcttccacctgcattccacaactctgggcttgcgataatgatccagactgtgaagatgggtccgatgaatggccacaacggtgtcggggattgtatgttttccagggagatagcagtccctgtagtgcctttgagtttcattgtttgagcggagagtgtattcattcatcttggcgctgtgatggaggacctgattgtaaggataagtcagatgaagagaattgtgcagtggctacttgtcgcccagatgagtttcaatgctcggatggaaattgtattcacggttcccgtcaatgcgatcgggagtatgattgcaaagacatgtccgacgaggttggttgtgttaatgtaactttgtgtgaaggaccaaataagtttaaatgccactctggcgaatgcattacgcttgataaagtatgtaacatggcacgcgattgtcgagattggtccgatgaaccgattaaggagtgtggaacgaatgagtgcctagacaacaatggaggatgttcgcacgtgtgcaatgatctgaagattggttacgaatgcctgtgtccggatggattccagctggttgctcaaagacgctgtgaagatattgatgaatgtcaagatccagatacctgttcacagttgtgtgtaaatcttgaaggcggttacaagtgccagtgcgaagaagggtttcaactggacccacatactaaggcgtgtaaggcagtagggagtattgcatacttgtttttcaccaacagacacgaggtacgaaagatgactttggatagatctgaatatacttctctcatccccaatctaaggaacgtagttgcacttgacacggaggttgcgtctaaccggatctactggagcgatctttctcaacgtatgatttgttcaacccaattggatagagctcatggagtatcatcttacgacactgtcatttcccgagacattcaggccccagatggccttgccgtagattggattcactccaacatttactggacagatagcgtattaggaaccgtatcggttgcggatactaagggagtgaaaaggaaaactctttttcgagaaaacggatctaaaccacgagctattgttgtggatccagtacacgggtttatgtattggacagattggggaactcctgcgaaaattaaaaaaggcggactgaacggagtagacatctattctcttgttactgaaaatatccaatggccaaatggtataacgctcgatcttctttcgggacgactgtactgggtcgactctaagttgcattcaatttcgtcgatcgacgtaaatggaggaaatagaaaaactattctagaagacgaaaaacggctcgctcaccctttttcacttgcggtatttgaggataaagttttctggacagatataatcaacgaggctatcttcagcgctaatagacttacaggaagtgacgtaaatctgttggccgaaaacttgctgtctcccgaagatatggtactcttccacaatctcacacaaccacgaggagtcaattggtgtgaacggactacgctttcgaacggaggttgtcagtacctttgcctgccagctccccagatcaatccacattcacctaaatttacttgcgcgtgcccagatggtatgcttcttgctagagatatgcgttcatgtcttacagaagctgaagcagctgttgctacgcaagaaactagtacagttcgtttaaaagtgagttctaccgcggtgcgaactcagcacactaccacgcgaccggtcccagacacatccagactgccgggagctacgccaggactaaccacagttgaaattgtcaccatgtcacaccaagcactgggtgacgtggccggacgtggaaatgaaaagaagccaagttctgtgcgagctctgtctattgttctccccatagtacttctagttttcctttgtctcggcgtctttctgctgtggaaaaattggcgattgaaaaatatcaatagtattaattttgacaacccggtataccaaaagaccactgaagacgaggtccacatttgccataatcaggatggatacagttatccatccagacaaatggtctctcttgaagacgatgtggcc

SEQ ID NO: 15934 - DNA, 2580 bp, synthetic construct
  misc_feature 1..2580: note = source = /note="Description of Artificial Sequence: Synthetic coding sequence"
  source 1..2580: mol_type = other DNA
atgggcccttggggctggaaacttcgctggacggttgcgctgctgttggccgctgccggtacggcagtgggggatcgttgcgagcgtaatgagttccagtgtcaagacggaaagtgcatatcgtataagtgggtatgcgacggatcggctgaatgtcaggatggttcggacgaatcacaggagacatgcctgagcgttacctgcaagtctggtgatttcagttgtggcggacgtgtgaatcgttgcattccccagttttggcgatgcgacggccaggtggactgtgataacggatcagatgaacaaggttgcccacccaagacctgctcccaggacgagttcagatgtcacgatggcaagtgcatttccaggcagttcgtgtgcgactcggaccgggattgcctggacggctcagatgaggcttcctgcccagtgctgacctgcggaccggctagcttccagtgcaacagttcgacatgcattcctcagctgtgggcctgcgacaatgatccagactgcgaggatggatctgacgagtggccgcagagatgccgtggtttgtatgtctttcagggtgacagttccccgtgttctgcctttgagtttcattgcttgtcgggcgaatgcatccatagtagttggagatgcgatggtggccctgattgcaaggataagagcgacgaggagaattgtgccgtagctacttgccgtccagatgagttccagtgcagcgacggaaactgcatccacggatcccgacaatgcgaccgcgagtatgactgcaaagatatgtccgatgaggtgggatgcgtgaacgtgaccctttgtgaaggaccgaataagttcaagtgccattcgggcgagtgcataactctggataaagtgtgtaatatggccagggactgtagagattggagcgatgaacccatcaaggagtgcggaaccaatgagtgcctggacaacaacggtggatgctcgcatgtgtgtaatgacctgaagatcggttacgaatgcctgtgccctgatggcttccagttggtcgctcagaggcgctgcgaggacatcgacgaatgccaagatccggacacctgtagccagctgtgcgtcaatctagaaggcggctacaaatgccagtgcgaggagggattccaattggaccctcatacgaaagcctgtaaagctgtgggcagcatcgcctacctatttttcaccaatcgacacgaggtgcgcaagatgaccctggataggagtgagtacaccagtctgattccaaatctgcgaaatgtagtggccctcgacacagaggtcgccagtaaccgcatctactggtcggatctctcccagcgcatgatttgctccactcagttagatcgagcccacggcgtgtcgagctacgatactgttatcagccgtgacattcaagccccggacggcttggccgttgactggattcattccaatatctattggaccgattccgtactgggtaccgtctcggttgccgatacaaagggcgttaaacgcaagacgctcttccgggagaatggtagcaagcccagggcgatcgtcgtggatccagtccatggttttatgtactggactgattggggcacacccgccaagattaaaaagggcggacttaatggcgttgacatctattcgttggtgacggagaatattcagtggcccaacggcataactctggacctgttgtccggccgtctctattgggtggatagtaagctccattccatctcctccattgatgtgaatggcggcaacagaaagacaatcctagaggacgagaagcggctagcgcatcccttcagcctggccgtgttcgaggataaggttttctggacggatatcataaatgaggctatcttttccgccaatcggcttacgggctcggatgtcaacctcctggcggagaatctgctgtcccccgaagacatggttctgtttcacaatctgacccaaccgcgcggagtcaactggtgtgagcgaacaacccttagtaatggcggctgccaatacctgtgtcttccggccccccagattaacccacactcgccaaagttcacgtgcgcatgccccgatggaatgctgcttgctagagacatgcggagctgtctaacggaggccgaggcggcggtggccactcaagagacatcgacggttcgactgaaggtatcctccacggctgtgcgtacccaacacacgactacacgcccggtccctgacacatcgcgactgcccggtgccacaccgggccttaccacagttgaaatcgtgacgatgtcccatcaggcactcggagacgtcgccggtcgtggaaacgagaagaagccgagctcggtgcgcgcccttagtatcgtgctcccgattgtcctcctcgtgttcctgtgtctgggcgtgttcctactttggaagaattggcgactgaagaacatcaacagcattaatttcgacaatccagtttatcagaagaccaccgaggacgaagttcacatctgccataatcaggacggctactcctaccccagccggcaaatggtgagcctggaggatgacgtcgcg

SEQ ID NO: 15935 - DNA, 2580 bp, synthetic construct
  misc_feature 1..2580: note = source = /note="Description of Artificial Sequence: Synthetic coding sequence"
  source 1..2580: mol_type = other DNA
atgggaccctggggatggaagctccggtggactgtggcacttctgcttgccgcagcgggaactgcagtgggcgatcggtgtgaacgcaacgaatttcagtgtcaggatggaaagtgcatctcctacaaatgggtctgtgatggaagcgcagaatgtcaagatggatcagatgagtcgcaggaaacctgtctgtcggtcacttgtaagtctggcgacttctcctgcggtggacgtgtcaatcgctgcatcccacaattttggagatgtgatggccaagtggattgtgataatgggtcggacgagcagggatgcccgccaaagacctgtagccaggacgaatttagatgtcatgatgggaaatgtatatcgcgccaatttgtgtgtgactccgatcgagactgcctggatggctcggatgaagcctcgtgcccagttcttacctgcggtcctgcatcatttcaatgtaactcgagcacctgtatacctcaactttgggcatgtgataatgaccccgactgtgaagatgggagcgatgagtggccccaaagatgccgcggactctacgtgttccaaggagactcatccccttgttcagcgtttgaatttcattgtctttcaggtgaatgtattcattccagctggaggtgtgatggaggacccgattgcaaggataagtcggatgaagaaaactgcgcggtagcaacctgcagaccagatgaatttcagtgctccgacggaaattgcatacacggatcgagacaatgtgatagagaatacgattgtaaggatatgtccgacgaggtcggttgtgtgaacgtgactttgtgtgagggacctaacaagtttaagtgccactcaggggagtgtatcactctggataaagtttgtaacatggccagagattgtagagattggtcggatgagcctatcaaggaatgtgggactaacgaatgtctggataacaacggcggttgctctcacgtgtgcaacgatcttaagattggctacgaatgtctttgccctgatggattccaactcgtggcacaacgtcgctgtgaggatattgatgaatgtcaggatcccgacacctgcagtcagctgtgtgtcaacttggaaggcggctacaagtgtcaatgtgaagaaggattccaattggatcctcacactaaagcatgtaaggcagtgggttcgattgcgtacctcttcttcactaatcgccatgaggtgaggaagatgactctcgacaggtccgagtacaccagcctcatccctaacctgcggaatgtggtggcgctcgatacggaggtcgcgtccaaccgcatctactggagcgatctgagccagcgcatgatttgttctacccaattggatcgcgcacatggcgtgtcctcgtacgatactgttatttcgcgggatatccaggcacctgatggtcttgctgtggactggattcacagcaatatctactggactgacagcgtcttgggcaccgtgtcagtggcggataccaagggtgtcaagagaaagaccctgtttcgagagaacggttccaaacctcgtgcaatcgtcgtggacccagtgcacggctttatgtattggactgattggggaactcccgcaaagatcaaaaagggcgggctgaatggtgtggatatctatagcttggtgaccgagaatattcaatggccaaacggtatcactctcgacctgcttagcggacggctttactgggtggattcgaaactgcactccatttcgtccatcgacgtcaacggaggcaatcggaaaaccatcctggaagatgaaaagcgactggcacatccattctctctggcagtgtttgaagataaggtcttttggactgacataatcaatgaagcgatcttcagcgccaaccgcctcactggttccgatgtcaacttgctggcagaaaatctgctgtcccctgaggacatggttctgtttcataacttgacccaacctagaggtgtcaactggtgcgagcgtacgaccctgtcaaatggcgggtgccaatatctttgtctgccagcgcctcagatcaaccctcattcaccaaagtttacctgtgcctgtcctgacggtatgcttttggctcgcgacatgagatcatgcctgacggaagcagaggcagccgtggcaacgcaagaaacctcaactgtgagactgaaagtgtcatcgactgccgtgcggacccaacatactaccacgcgacctgtgcccgatacttcaaggcttcctggtgcaaccccaggtcttaccaccgtggaaatagtgaccatgtcgcatcaagcacttggagatgttgcaggacgaggaaatgagaagaagccttcttcggtgcgcgcactgtcgatagtgcttcctatcgtcctgcttgtgtttctctgcctcggtgtctttctgctgtggaagaactggagactcaagaacattaactccatcaacttcgacaaccctgtctaccaaaagaccactgaagatgaagtccatatttgccataaccaggatggttacagctaccccagccggcagatggtgtccctcgaagatgatgtggca

SEQ ID NO: 15936 - DNA, 2580 bp, synthetic construct
  misc_feature 1..2580: note = source = /note="Description of Artificial Sequence: Synthetic coding sequence"
  source 1..2580: mol_type = other DNA
atgggcccttgggggtggaaacttcgatggaccgtggccctgttgttagccgcagccggaactgccgtgggagacaggtgcgagcgaaacgagttccaatgtcaggacgggaagtgtatcagctacaagtgggtgtgtgatggtagtgcagaatgtcaggacggatcagacgagtcccaggagacctgcctgtcggttacgtgcaaaagtggggacttttcctgcgggggtcgggtaaaccggtgtataccacagttctggaggtgtgacggccaggtcgattgcgacaatggttctgacgagcaagggtgtccacccaaaacttgtagtcaggatgagttcagatgtcacgacggaaaatgcatctcccgtcaatttgtgtgtgattccgatcgagattgtctggacggcagcgatgaggccagctgtcctgttctgacctgcgggcccgccagcttccagtgtaacagtagcacttgtatcccccagctgtgggcatgtgataatgatcctgactgtgaggacggatctgacgagtggcctcagagatgccgaggtctctatgtatttcaaggcgattcctcaccatgttccgcctttgaatttcattgtttgtctggtgagtgtattcacagctcatggcgatgcgacggcgggcccgattgtaaggataagagcgatgaggagaactgtgctgtcgctacttgtcgacccgacgaattccagtgctccgatggcaactgcatccacggaagccggcagtgcgaccgcgagtacgattgtaaggacatgtcagatgaggtcgggtgcgtaaatgtgacactgtgtgagggcccaaacaaatttaagtgccactcgggagagtgtattacactggataaggtttgtaatatggcacgggactgtcgtgattggtcagatgagcctataaaggagtgcggcaccaacgaatgtttggataacaatgggggctgcagtcacgtgtgcaatgacctgaaaataggctatgaatgcctttgtccggatggattccagctggtggcccagaggagatgtgaagacatagatgagtgccaggatccggacacttgctcacagctgtgcgtaaacctggagggcggctacaaatgtcagtgcgaggaaggattccagctagaccctcataccaaagcttgcaaggctgtcggatccatcgcttatttgttcttcacaaaccgtcatgaggtgcgaaagatgacgttggaccgctcagagtatacctcccttatccctaacttacggaacgtggtggcgcttgacacagaggtggcctccaacagaatttactggtctgatctgagtcagcgaatgatttgttctacccagcttgaccgagcacatggggtcagctcctatgataccgtgatctcgagagatatacaggctccagacgggctagctgtggattggatccacagcaacatctactggaccgacagtgtcctgggaaccgtatctgtggccgatacaaagggcgtcaagcggaaaacactgtttagggagaacgggtctaaacctagggctatcgtggtcgatccagttcacggattcatgtattggaccgactggggaacccccgctaaaattaagaagggggggctgaatggggtcgacatctatagcttggtcacagagaatatccaatggcccaacggcatcaccctcgacctactctccggaagactgtactgggtggacagtaaactgcattccatttctagcatcgatgttaatggaggtaaccggaagacaatcctggaagacgaaaagagacttgctcatccgttttctctggctgtattcgaggataaagtgttttggacagatatcattaatgaagcgattttcagtgctaatagattaacaggcagcgacgtcaaccttctagctgaaaatctcctctcaccagaggacatggtgctatttcacaacctcacacagcccagaggagtgaattggtgcgaacgaactaccctgagtaacggaggctgtcagtacctgtgcctgccagcgccacagattaatccgcactcccctaagttcacatgcgcttgtccagatggcatgctgcttgcccgggatatgaggtcttgcctaacagaagctgaggcggctgtggccacccaggagacgagtacggtaagactaaaagtcagctcaacggccgtgagaactcaacataccacaacccgccccgtgcccgacacatccagactcccgggcgccacccccgggttaaccacagttgaaatcgtgactatgtcccatcaggccctcggagacgtggccggcagaggcaacgagaagaagcccagttctgtaagggctctatctatcgtcttaccaatcgttcttctcgtgtttctgtgccttggcgtcttcctgctgtggaagaattggcgcctaaaaaacatcaatagtatcaattttgacaaccctgtttaccaaaagaccaccgaagacgaagtgcatatttgccacaaccaggatggctattcctatccgagtcggcagatggttagcctggaggatgatgtagca

SEQ ID NO: 15937 - DNA, 2580 bp, synthetic construct
  misc_feature 1..2580: note = source = /note="Description of Artificial Sequence: Synthetic coding sequence"
  source 1..2580: mol_type = other DNA
atgggaccatggggttggaaacttcgttggacggtggcacttcttcttgcagcagcaggaaccgctgtcggcgatcgctgcgaacgaaatgaatttcagtgccaagatgggaagtgcatctcctacaagtgggtgtgtgatggttccgcagaatgtcaagatggaagcgatgaaagccaagaaacctgcctttcggtgacctgcaaaagtggggatttcagctgtggcggaagagtgaatagatgtatcccccagttttggcggtgtgatggtcaagtggattgtgataacggatctgacgagcaaggttgtcctcccaagacttgctcacaggatgagttccggtgtcacgacggtaagtgtatctcacggcagttcgtctgcgattccgatagagactgccttgatggatcagatgaagcctcgtgtccagtgcttacttgtggaccagcatcctttcagtgcaactcatcgacctgcatcccccagttgtgggcatgcgataatgatcccgactgtgaagatggatccgatgaatggccacaaagatgccgcggactttacgtgtttcaaggagacagctcgccatgttcagcgtttgaatttcactgtcttagcggggagtgtattcattcctcgtggaggtgtgacggtggacctgattgtaaagacaagtccgacgaggagaactgcgcggtggccacctgccgtcctgatgagtttcagtgctcggatgggaactgtattcatggatcgagacaatgcgacagagaatacgattgtaaggacatgtcagacgaagttggttgtgtgaacgtgaccctctgtgaaggtcctaacaaattcaagtgtcatagcggtgaatgtataacccttgataaggtctgtaacatggcaagagattgtcgagactggtcagatgagcctatcaaagaatgtggaactaatgaatgtctggacaacaatggcggatgcagccacgtgtgtaacgatctgaaaattggatacgagtgtctttgtcctgacggattccaattggtcgcgcaacggcgctgcgaggacatcgatgagtgtcaggacccagacacctgctcacagttgtgcgtcaatcttgagggaggttacaagtgtcaatgtgaggagggattccagcttgacccgcatactaaggcatgcaaggcggtgggttctatagcatacttgttctttactaaccggcacgaagtgcgcaagatgacccttgaccgcagcgagtacacctccctcattccaaaccttagaaacgtggtggcacttgacactgaggtggcctcgaatcgcatttactggtcggacctgtcgcaacgtatgatctgttcgacccagctggatagagcacatggagtgagctcgtacgatactgtgatttcccgggatattcaagcaccagatggacttgccgtggactggattcattccaatatctactggacggattcggtccttggtactgtgtccgtggcggacacgaagggcgtgaagcgaaagaccctgttccgcgaaaatggttccaaaccacgcgcaattgtggtggatcctgtgcacgggtttatgtactggactgactggggtacccctgcaaaaatcaaaaagggaggactgaatggtgtggacatatactccctcgtcactgagaatatccaatggccaaacggcattactctggatcttctgtcggggcggctttattgggtggacagcaaactgcactctatctcatcaattgacgtcaacggcggaaaccgcaagaccattcttgaggacgagaagcgtcttgcccatcccttttcactggccgtctttgaggataaggtgttctggaccgacatcatcaacgaagcaatcttttcggcgaatcggctgaccggttccgatgtgaatctcctggcagaaaacctgctttccccagaagatatggtcctgtttcataatctgactcagccgaggggtgtcaattggtgtgagcgcacgaccctgtccaacggtggctgtcaatacctttgcttgccagcacctcagatcaaccctcacagccctaaattcacctgtgcctgtcctgatggtatgcttttggctagagatatgcgatcctgcctgaccgaggcagaagcagcggtggcaacgcaggagacttcgaccgtgaggctgaaagtgtcctcgaccgcagtgagaacccaacatacgactaccaggccagtgcctgacacttcacggctgccaggggcaacccctgggttgactacggtggagattgtgactatgagccatcaagccctgggggatgtggcaggccggggtaacgaaaagaagccatcgtccgtgcgcgcccttagcattgttctgcctatcgtcttgttggtctttctttgcctgggtgtgtttctgctgtggaaaaactggaggctgaagaatatcaactcgattaactttgacaatcctgtgtaccagaaaaccactgaagatgaagtccatatttgtcacaaccaagacggatactcctacccatcgaggcagatggtgtccctggaggacgatgtggca

SEQ ID NO: 15938 - DNA, 2580 bp, synthetic construct
  misc_feature 1..2580: note = source = /note="Description of Artificial Sequence: Synthetic coding sequence"
  source 1..2580: mol_type = other DNA
atggggccctggggttggaaacttcgttggaccgtcgcacttctgcttgcagccgcaggaaccgcggtcggtgacagatgtgaaaggaatgagtttcaatgtcaagacggaaagtgtatttcatacaagtgggtgtgtgatggtagcgcagaatgtcaggatgggtcagacgagtcgcaggaaacgtgtctgagcgtgacgtgtaaatccggtgatttttcgtgtggaggccgtgtgaaccggtgtattccacaattttggaggtgcgatggtcaggtggattgtgataacggatccgatgagcaaggttgtcctccgaaaacgtgctcccaagacgaattccgttgtcacgacggtaagtgcattagccgccaatttgtgtgtgattcggatcgtgattgtcttgatggtagcgacgaggcaagctgccctgtccttacttgtggtcctgcctcctttcaatgcaactcttcgacctgcatccctcagctttgggcatgcgacaatgatccagattgcgaggatggttccgacgagtggcctcaacgctgtagagggctttacgtgtttcaaggagacagctcgccttgtagcgcgtttgagtttcactgcctttccggcgaatgcattcactcatcctggagatgtgatggcggaccggattgtaaggataaaagcgatgaagagaattgtgctgttgctacttgtcggccggacgaatttcaatgtagcgatggtaattgtattcatggatctcgccagtgcgatagggaatacgactgtaaggacatgagcgacgaggtgggttgtgtgaatgtcaccctctgtgagggacctaacaagttcaaatgtcattcgggagagtgcattactctcgataaagtctgtaatatggcaagagactgtcgcgactggagcgatgagcccatcaaggagtgtgggactaatgagtgtcttgataacaatggcgggtgctcccacgtgtgtaacgatctgaagataggctacgagtgtctttgcccggacggatttcagcttgtggcccaaagacggtgtgaggacattgatgagtgccaggatccagatacctgctctcagctttgtgtgaacctcgagggcgggtacaaatgccaatgcgaggaaggttttcaattggatccacacactaaggcatgtaaggccgtcggtagcatagcttacttgttctttacgaacagacacgaggtccgtaagatgacccttgatagaagcgaatacacctccctgattcctaatctgcgtaatgtggtcgctctggacactgaagtggcgtcgaataggatttactggtccgatctctcgcagcgcatgatctgttcaacccagttggatcgagctcatggggtcagctcgtacgatactgtcatttcaagagatatacaggcacctgatggactcgcagtggattggattcattcaaacatctactggactgatagcgtcttgggtactgtgtccgtggcagataccaagggagtgaagagaaagaccctttttagagaaaacggttccaagccacgagcaattgtggtcgaccccgtccatgggtttatgtactggaccgattggggtaccccggccaagattaagaagggcggactcaatggagtggatatctactccctggtgactgaaaacattcagtggcccaatggtattacccttgacctgctgtcaggcagactctactgggtggacagcaaactgcattcaatatcgtcaatcgacgtgaacggcggaaatcggaaaaccatactggaagatgaaaaaaggcttgcgcacccattttcgcttgcggtgtttgaagataaagtgttttggactgacattatcaatgaggcaatcttttcagcgaacaggctcaccggatcggatgtcaatctgctcgcagagaatctcctctcgccggaagatatggtgcttttccataacctgacccaacccagaggggttaactggtgtgaaaggaccactctgtcaaacggcggatgtcaatacctttgcctgcctgcgccacagataaacccccactcgccaaagtttacctgtgcctgtcctgatgggatgctgctggcgcgggatatgcgatcgtgcctgactgaagcggaggcagcagtggcaactcaggaaacctcaaccgtgagactgaaagtctcctccactgcagttcgcacccagcataccaccacccgccccgtcccagataccagtagactgccaggagcaactcctggtcttactaccgtcgagatagtcaccatgtcacatcaagcactgggagatgtggcaggcagagggaacgaaaagaagccttcgtccgtgcgagcactctcgattgtgctgcctattgtgttgcttgttttcctttgccttggtgtctttcttctttggaagaactggaggttgaagaacataaacagcattaacttcgacaacccagtctaccagaaaacgacggaagatgaggtccatatctgccataaccaggatggttactcgtacccatcgcgccagatggtgtcgctggaagatgatgtcgcg

SEQ ID NO: 15939 - DNA, 2580 bp, synthetic construct
  misc_feature 1..2580: note = source = /note="Description of Artificial Sequence: Synthetic coding sequence"
  source 1..2580: mol_type = other DNA
atgggcccttggggttggaaactccggtggactgtggctttgttgctggcggcggccgggaccgccgtgggagacaggtgcgaacgcaacgagttccagtgtcaagatggaaaatgcatctcatacaagtgggtgtgcgacggatcggctgaatgtcaggacggctcggatgaatcccaagaaacttgcctgtcggtcacgtgcaagtcaggtgacttctcctgtggcggaagggtaaaccgctgtatcccccagttctggcgctgcgatggccaggtggattgtgataacggatcggacgagcaaggatgcccgccgaaaacctgttcacaagacgaattccggtgtcacgacggaaagtgcattagtcggcagttcgtgtgcgactcggatcgcgactgtctggatggatccgatgaagcatcgtgcccggtgctcacttgcgggccggcgtcctttcaatgcaactcatctacctgcatccctcagttgtgggcctgcgacaatgacccagactgcgaggatggctccgacgagtggccccagcggtgccgcggcctgtacgtattccagggagatagctcaccatgctcagcctttgaattccactgtctgagcggtgagtgcatccacagcagctggcggtgcgacggtggaccagactgcaaggacaagtcggacgaggaaaactgcgccgtggcgacctgccgcccggatgaatttcagtgctcggacggaaactgcatacatggatcgcgccaatgcgacagggaatacgattgcaaagacatgagcgacgaagtggggtgcgtgaatgtcactctgtgcgagggcccaaataaattcaagtgtcatagcggcgaatgtatcactcttgacaaggtctgtaatatggcccgcgactgccgagactggtctgatgaaccaatcaaagaatgcggaactaatgaatgccttgacaacaatggaggctgttcccacgtgtgcaacgatctgaagatcggatacgaatgcctgtgcccggacgggttccaactcgtggcacagagaaggtgcgaagatattgacgagtgtcaggaccccgacacctgctcacaactttgcgtgaacctcgaaggaggatacaagtgccagtgtgaggaggggtttcaacttgacccacacaccaaggcctgtaaggcggtgggaagcatcgcatacctgttcttcaccaaccggcacgaggtgcggaaaatgaccctggatcgctcggaatatacctcgctgatcccgaacctgagaaacgtcgtcgccctggacaccgaagtcgcttcgaacaggatctactggtccgatctgtcgcagcggatgatctgttcaacccagctcgaccgcgcgcatggtgtgtcgtcctacgatacggtcatctcgagagacatccaagctccggatggcctcgctgtggactggattcacagcaacatctactggaccgacagcgtcctgggaaccgtcagcgttgcagacaccaagggcgtgaaacgtaagaccctcttcagagaaaatggctccaagcctcgggccatcgtggtggacccggtccacggattcatgtactggactgactgggggacccctgccaagatcaagaaaggaggactgaacggggtggacatctacagcctggtgactgagaacattcagtggcctaatggcatcacgctggatctgctgagtgggcgcctgtactgggtggactcgaagctgcactcaatttccagcatcgacgtgaacggtggcaatagaaagactatcctggaggatgaaaagagactggcgcacccgttctcgctcgccgtctttgaggataaagtgttttggactgatatcatcaatgaagcaatcttctcagctaaccgcctgactggaagcgatgtgaatctcctcgcagaaaacctgctgtccccggaggacatggtgctcttccataatctgactcagccaagaggcgtgaactggtgcgagcgaactacgctttcgaacggcggatgccagtacctttgcctcccggcacctcaaattaatccgcattccccaaagttcacttgcgcgtgcccggatggtatgctcttggccagggatatgcggtcgtgtttgacggaagcagaggccgccgtcgccacccaggagacttcaactgtccggctgaaagtgtcctcaaccgcagttcgcacccaacataccacgacccgccccgtgcctgacacctcccgcctcccaggagcgactcccggactcaccactgtcgaaatcgttactatgagccatcaggccctgggagatgttgcggggagaggaaacgagaagaagccatcaagcgtgcgggccttgtccattgtcttgccgatcgtcctgctggtgttcctttgcctgggtgtgttcctgctctggaagaattggagactcaagaacatcaactccatcaactttgacaatcctgtgtaccaaaagaccactgaggatgaagtccatatctgccacaaccaggatggatattcttacccgtcccggcagatggtgtccctcgaggatgacgtggct

SEQ ID NO: 15940 - DNA, 2580 bp, synthetic construct
  misc_feature 1..2580: note = source = /note="Description of Artificial Sequence: Synthetic coding sequence"
  source 1..2580: mol_type = other DNA
atgggaccctggggctggaagttgagatggacagtggccctcctgctcgcagccgcgggcacagccgtgggcgacaggtgcgagagaaacgagttccagtgccaggacggtaagtgcatctcttataagtgggtctgcgatggtagcgccgagtgccaggacggttctgacgaaagtcaggaaacatgcctgagcgtcacatgcaagagcggtgacttttcctgcggaggtagagtgaataggtgcatcccccaattctggcgctgcgacggacaggtggactgtgacaacggtagcgatgagcagggttgccccccaaaaacgtgctctcaagacgagttccgctgtcatgacggtaagtgcatctctaggcaatttgtttgtgacagtgacagggactgtctggatggaagcgacgaagcttcatgtcctgtactgacgtgcggtcctgcctctttccagtgtaactcctcaacctgtatcccacagctgtgggcgtgtgataacgatccagattgcgaggacggatccgacgagtggccacaaaggtgtcgcggactgtatgtttttcagggagacagttccccctgttccgctttcgaattccactgcctgtctggtgagtgcattcattcttcttggcgctgtgacggaggtccagattgcaaggataagtcagacgaagagaactgtgcggttgcgacatgcagacctgacgagttccaatgtagcgatggaaactgcattcatggtagcagacagtgcgaccgcgagtacgattgcaaggacatgtccgacgaagtaggctgtgttaacgtgactctttgtgagggacctaataaattcaaatgccacagcggagagtgcattaccttggataaggtgtgcaatatggctagagactgccgcgattggtcagatgaacccatcaaggagtgcggcactaacgagtgcctggataataacggtggctgttcccatgtgtgcaacgaccttaagattggatatgagtgtctgtgccccgatggttttcagttggtcgctcagaggaggtgtgaagatatcgatgaatgtcaagatccagatacatgttcacaactttgcgttaacctggaaggaggttataagtgccaatgcgaggagggttttcagcttgatccccacacgaaggcctgcaaggccgtgggctccatagcgtacttgttctttacgaaccgccatgaggtgcgcaagatgactttggatcgcagtgagtacacaagcctgattcccaacttgagaaacgttgtcgccttggacacagaggttgcctcaaatcgcatctattggtctgacctgtctcagaggatgatctgctcaacccaactcgaccgcgcacacggcgtgagctcctacgatactgtgatttcaagggatatccaggcccctgacggcttggctgtagactggatccacagcaatatttattggactgattcagtgctgggcaccgtgagcgtcgccgacacgaaaggtgtgaagcgcaaaacactgtttagagaaaatggctcaaagccccgcgctatcgtcgtggaccctgtacatggttttatgtattggaccgattggggcacacctgccaaaatcaaaaagggcggactgaacggcgtggatatttactccctggtgacagagaacatccagtggcctaacggtattacattggacctgcttagtggccgcctctactgggtcgattcaaagctgcacagtatctcctccattgacgtaaacggtggcaatagaaagacgatcttggaggatgagaagaggcttgcacaccccttctcactggctgttttcgaggacaaagtcttttggaccgacattattaatgaggcaattttcagcgccaatagacttaccggtagcgacgtgaatttgctggccgagaacttgcttagccccgaggacatggttttgttccataacctcacacagcccaggggtgtaaactggtgtgagagaactaccctgagcaacggcggttgccagtacctttgccttcctgcgccacaaattaatccgcattccccaaagtttacctgcgcctgccccgacggtatgttgctcgccagagacatgcgctcatgcctcactgaagcagaggctgccgttgccacacaggaaacctctactgtaagattgaaggtctctagcactgctgtcaggacccagcacacgactacccgccctgtgcctgatacctccaggctgcctggcgccaccccaggcctgacgaccgtggaaatcgtgactatgagccatcaggccttgggcgatgttgccggtcgcggtaatgagaaaaaaccatcctccgtgcgcgccctgagcatcgtgctgcccattgtgctcttggtcttcctgtgtctcggagtgttcctgctctggaagaactggcgccttaaaaatatcaacagcattaacttcgataacccagtctaccagaaaactacagaggacgaggtgcacatctgccacaatcaggacggctactcttacccttcccgccagatggtaagtctggaagacgacgtcgct

SEQ ID NO: 15941 - DNA, 2580 bp, synthetic construct
  misc_feature 1..2580: note = source = /note="Description of Artificial Sequence: Synthetic coding sequence"
  source 1..2580: mol_type = other DNA
atggggccgtgggggtggaaattacggtggactgtggcacttttgctcgctgctgccggcacagcagtgggcgacagatgtgagcgcaatgagtttcaatgtcaggatgggaaatgtatcagttataagtgggtctgtgatggaagtgcggaatgccaggacgggagcgacgaatcacaggaaacgtgtctgagtgtgacatgcaagtcaggtgacttcagctgtggcggaagagtgaatagatgcattcctcagttctggcgatgtgatggccaggtggattgcgacaatggatctgatgagcagggctgtccgcctaagacctgtagccaggatgagttccggtgccacgatggcaaatgtatctcacgacagtttgtttgcgactccgatagagactgcctggatggcagtgacgaagctagttgccctgtgctcacttgcggaccggccagtttccagtgcaactcctcaacatgcataccgcaactttgggcttgcgataacgatcccgattgtgaggatgggtcagatgaatggccacagcgatgccggggactctacgtatttcagggagactcatcgccctgttccgccttcgagttccattgcttgtcaggggagtgcattcattccagttggcgctgcgacggaggacccgactgcaaggacaaaagtgacgaagagaattgtgcggtggctacttgccgccctgacgaattccagtgttctgacggcaactgtatccacgggtctaggcaatgcgacagggaatatgattgtaaagacatgtctgacgaagtgggctgcgttaatgtcactctgtgtgagggacccaacaagtttaagtgccacagtggggagtgtatcacattagacaaagtatgcaacatggcccgagattgcagagattggagcgacgaacctataaaggagtgtggaacgaatgaatgcctggacaataacggcggctgcagtcacgtgtgcaacgatctcaagatcggttatgagtgtctgtgtccagatggatttcagcttgtagcacagcgtcgatgtgaagatatcgatgagtgccaggatcctgacacatgttcccaactgtgcgtgaatcttgaaggagggtacaagtgccagtgcgaagaaggctttcagttggatccccacactaaggcctgcaaggccgtgggctccatagcgtacctgtttttcacaaatcgccacgaggtgagaaagatgaccctcgacagatcagagtacactagcctaatccccaacttgaggaatgtggtggctctggacactgaagtggcctccaaccgcatttattggagtgatttatctcagcggatgatttgtagcactcagctggatcgagcacacggtgtgtcaagctatgatactgttattagcagggacattcaggcgcctgacggtctggcagtggattggatacattctaacatttactggaccgactccgttctagggactgtctccgttgcagataccaaaggtgtcaagcggaagaccctgttcagagagaatggctcgaaacctcgcgccattgtcgtcgatcccgtacacggcttcatgtattggactgattgggggactccagctaaaataaagaaaggtggactgaatggggtggacatctactctttggtaactgaaaacatacagtggcccaacgggataactctggacctgctgtcgggacggctgtattgggtcgatagtaaactccactctatcagctccatcgatgtgaatgggggtaatagaaagaccatcctggaggatgaaaagcgcttggctcacccgttttccttagcggtgttcgaagacaaggttttttggacagatattatcaatgaagccatattctctgctaataggttgaccggttccgacgtcaatttactggctgagaatctgctgagtccggaggacatggtgctgtttcacaaccttacccagcctcggggggtgaactggtgcgagaggaccacactctcaaacggtgggtgccagtacctttgcctccccgctccccagatcaacccccattcccctaagtttacctgcgcctgtcctgatggaatgctactggcccgggacatgaggagttgccttaccgaggccgaggcggccgtcgccacccaagagactagcaccgtccgtctgaaggtaagttccactgccgtgagaacccagcacactacaaccagacccgtgccagatacaagtcggctgcctggagctacgccaggactgacaaccgttgaaatcgttactatgagccaccaggccctgggggatgtagccgggagaggcaatgagaagaaaccttcttctgttagggctttgagcattgtactgcctatcgtgcttctcgtctttctgtgcctcggggtctttcttctgtggaaaaattggcgattgaaaaatatcaattccattaatttcgacaatccggtgtaccagaagaccactgaggacgaagtgcacatttgtcacaatcaagatggctactcctacccatcccgccagatggtgtctttggaggacgacgttgca

SEQ ID NO: 15942 - DNA, 2580 bp, synthetic construct
  misc_feature 1..2580: note = source = /note="Description of Artificial Sequence: Synthetic coding sequence"
  source 1..2580: mol_type = other DNA
atgggcccttgggggtggaagctccgttggaccgtcgcattgttgctggcagccgcaggcactgcagtcggagacagatgtgagcggaacgagtttcagtgtcaagacggtaagtgcatttcatacaagtgggtgtgtgacggatcggctgaatgccaagacggaagcgatgaatcacaggaaacctgtctctcggtgacctgcaagtcgggcgactttagctgcggcgggcgagtgaatagatgtatcccacagttctggaggtgtgacggacaggttgactgtgataatggaagcgatgagcagggttgtcctcctaaaacctgttcacaggatgaattcaggtgtcatgatggcaaatgcatctcccgccaattcgtgtgtgactcggatcgcgattgcctcgatggatcagatgaagcatcatgtcctgtgcttacttgcggacctgcgtcgtttcagtgtaactcaagcacttgtatcccacaactttgggcctgtgacaatgaccccgattgcgaagatggcagcgatgaatggccccagaggtgtaggggtttgtacgtgtttcagggagattcttccccatgttcagcctttgaattccattgcctgtccggcgaatgtatacatagttcctggcggtgtgatggtggacctgactgtaaggataagtcggatgaggaaaactgtgcagtggccacttgtcgaccagatgaatttcagtgttcagatggtaactgtatccatgggtcgcgccaatgcgatcgcgagtacgattgtaaagatatgtccgatgaagttgggtgcgtgaacgtaaccctctgtgagggacctaataagtttaagtgtcatagcggcgagtgcattaccttggataaagtgtgtaacatggcaagagactgtcgtgattggtcggacgaacccattaaggaatgcggaaccaacgagtgtctggataacaacggaggatgcagccatgtgtgcaatgacctgaagatcggctacgagtgcctgtgtcctgatgggttccaactggtcgcgcaacgcagatgcgaggacatagacgagtgtcaagaccctgacacttgttcacagttgtgtgtgaacctcgaaggaggatataagtgccagtgcgaggaagggtttcaacttgatccgcatactaaagcgtgtaaggcagtgggatcaattgcatacctgttctttaccaatcgtcacgaagtgcgaaaaatgacgctcgatcggtccgaatacactagcctgattccgaacctgagaaatgtcgtcgcactcgatactgaggtcgcatcgaaccggatttactggtcggatctgtcacaaaggatgatctgttcgactcaacttgaccgagcacacggtgtctcttcgtacgacaccgtcatttcccgtgatattcaagcacctgatgggctcgcggtggattggattcatagtaacatatactggactgatagcgtccttggcactgtgagcgtggcagataccaaaggcgtgaagcggaaaactctgttccgcgaaaatggatcgaagcctcgagccatcgtcgtcgaccccgtgcatgggtttatgtactggaccgactggggaaccccagccaagattaagaaaggtggtcttaacggcgtcgacatctactctctcgtgactgagaatattcaatggccaaatggtattacgcttgatctgctgtccggacgcctctactgggtggattccaagctgcattccatttcatcaatcgacgtgaacggggggaatcgaaagaccatcctggaggacgaaaagcgactggcgcaccctttttcgctcgcagtattcgaagataaggtgttctggacggacattatcaacgaggcaatcttttcggccaatcgactcaccggaagcgatgtcaatctgctcgctgaaaaccttctttcgcctgaagatatggtgctgtttcacaacctcacgcagcctagaggagtgaactggtgcgaaagaaccaccctctccaacggcggttgtcagtatctgtgtctgcccgccccccagattaatccacacagccctaagtttacctgtgcctgtcctgatggaatgctccttgcgagagatatgagatcctgtctgaccgaagcggaagcagccgtggcaacgcaagagacgtcgactgtgaggctgaaggtgtcgagcaccgcagtccgtacccagcacactaccacccgccctgtcccagacacctcgcgcctccctggtgctacccccgggcttaccactgtcgaaatagttactatgtcccatcaggctcttggggacgtggcaggacggggaaatgagaaaaaaccttcgtccgtgagagccctttcgattgtgctgcctattgtgttgctggtctttctgtgtctcggtgtctttctgctgtggaagaattggagactgaagaatatcaactccatcaacttcgacaaccccgtgtaccagaaaaccactgaggacgaggtgcatatttgtcataaccaagatggatactcatacccgtcgcggcaaatggtatcgcttgaagatgatgtggca

SEQ ID NO: 15943 - DNA, 2580 bp, synthetic construct
  misc_feature 1..2580: note = source = /note="Description of Artificial Sequence: Synthetic coding sequence"
  source 1..2580: mol_type = other DNA
atgggcccctggggttggaagctgcgctggaccgtggcgttgcttctcgcggcggccggaaccgctgtgggcgaccgctgcgaaagaaacgaatttcagtgccaggatgggaagtgcatcagctacaaatgggtgtgcgacggaagcgcagagtgccaggacggttctgatgagtctcaggaaacttgcctcagtgtgacatgcaagtcaggcgacttctcctgcggcgggcgggtcaatcggtgtattccccagttttggaggtgtgacgggcaggtggactgtgataacgggtccgatgagcagggatgcccccctaagacctgtagtcaagatgagttccgttgccacgatgggaaatgcataagcagacaattcgtctgtgatagtgacagggattgtctggatggaagcgatgaggcttcctgtccggtcctgacgtgtggccctgccagcttccagtgcaatagttcaacttgtataccgcagctttgggcgtgcgataatgatcccgactgtgaggacggctctgacgaatggcctcaaaggtgcagaggcttgtatgtgttccagggtgattcaagcccctgctcagcgtttgaattccactgtctctctggtgaatgcatccatagctcatggcgctgcgacggaggacctgattgtaaagataagtccgacgaagagaactgcgctgtggccacctgtaggcctgatgaatttcaatgttccgacgggaactgtatccacgggtcccggcagtgcgatcgagagtacgactgcaaggacatgagcgatgaggtggggtgtgttaatgtgacactatgcgaaggtcctaacaagttcaaatgccactcgggggaatgtatcacactagacaaagtgtgcaatatggcccgagattgcagagattggtccgatgagccgataaaggagtgcgggacaaatgagtgtctggacaataacggaggctgttcccacgtgtgtaacgacctgaaaataggctatgagtgcctatgtccagacggatttcagttggttgcgcaacggcgatgtgaagacatagatgaatgccaagatcccgatacctgctcccagctgtgtgtgaatctggaaggcgggtataaatgtcagtgcgaggagggctttcagctggatcctcacacaaaagcctgcaaggcagtcggctctatcgcttatttgttctttactaatcggcatgaagtgaggaaaatgaccttggatcgttctgagtacacatcactgatccccaatttacggaatgtggtcgccctagataccgaggtcgcgagtaacagaatctactggtccgatctaagccaaagaatgatctgtagcacacaattggaccgagcccacggtgttagttcgtacgacacggtgatctcaagagatattcaggcgccggacgggctggccgtggactggatacattccaacatatattggaccgactccgtcctggggactgtctctgtggcagacacaaagggggtgaagaggaagacactctttcgcgaaaacgggtcaaagccacgggctatcgtggtggatcctgtgcatgggttcatgtactggacagattgggggacacccgccaagatcaagaagggcggcctgaatggtgtggatatttactctttggtgaccgaaaatattcagtggcccaacgggattacactggacctgttgagcggtcgcctctattgggtggattcgaaattgcactccatctccagcatagatgtcaatggcgggaaccggaaaactattttggaggacgaaaagcggctagcccaccccttttctctggccgtctttgaggacaaagtcttctggacggacatcatcaatgaggccatctttagcgccaataggcttaccggcagcgatgtcaatctgcttgccgagaatcttctgtcccccgaggacatggtgttattccacaacctaacccagccaagaggggtgaactggtgtgagcggaccacgctgagcaatggtggttgccaatacctgtgcctgcctgcaccacaaatcaacccacacagtcccaagttcacctgcgcttgtccggacggcatgctgttggcaagagacatgcggtcttgtctgacagaggccgaggccgccgtggccacccaggagacaagtacggttcggctgaaggtgtcctcaacagctgtgcgcacgcagcatacgaccacgagacccgtgccagatacgtcccgcctgcctggtgccacccccggcctcaccaccgtggaaatcgtcactatgagccatcaagctctcggcgatgtcgccggaagggggaatgagaagaaaccttcatctgtccgggccctctcaatcgtcctgcctatcgtgctgctcgtcttcctgtgtctcggagtgtttctcctctggaagaattggcggctgaagaacatcaatagcatcaacttcgataatccagtctaccagaaaacgacagaagatgaggtacacatctgtcataatcaggacggatattcatacccctcacgacagatggtgtctttagaagatgacgtggca

SEQ ID NO: 15944 - DNA, 2580 bp, synthetic construct
  misc_feature 1..2580: note = source = /note="Description of Artificial Sequence: Synthetic coding sequence"
  source 1..2580: mol_type = other DNA
atgggtccttgggggtggaaactgaggtggactgtcgcactgcttctggcagccgcaggcactgcagtgggggacagatgtgaaagaaacgagtttcaatgtcaagatggaaagtgtatctcgtacaagtgggtgtgtgatggatcagctgagtgccaagacggttcggacgaatcgcaggaaacttgcctctccgtgacctgtaagtcaggcgatttttcgtgtggtggtcgtgtgaatcgctgcattcctcaattttggcggtgtgacggacaagtggattgtgataatggatcggatgagcagggatgtccacctaaaacttgctcgcaagacgaatttagatgtcacgacggtaagtgcattagcagacaatttgtgtgtgactcggatagggattgcctcgatggtagcgacgaagcaagctgccctgtgctcacctgcggccctgcctcatttcagtgtaactcctccacttgtataccacaactctgggcctgcgataacgatccagactgtgaggatggatcagatgaatggccacaaaggtgccgcggcttgtacgtgtttcaaggtgattcgtcaccctgttcagcatttgaatttcattgtctgtccggagaatgtattcatagcagctggcggtgcgatggaggaccggactgcaaggataagagcgacgaagagaactgtgcagtggcaacttgcaggccggacgaatttcaatgtagcgatggcaattgtatacatggttcgagacaatgtgatcgtgaatacgattgcaaggacatgagcgatgaagtgggatgtgtgaatgtgaccctttgtgaaggtcctaataagtttaagtgccattctggagagtgcattacgcttgataaggtttgtaacatggcccgggattgcagagactggagcgacgaacctattaaggaatgcggcaccaatgaatgcctcgacaataatggaggctgttcgcacgtgtgtaacgatctgaagattggttacgagtgtctttgtccggatggatttcagcttgtcgcacaacgcaggtgtgaagatatcgacgaatgtcaagacccagacacctgctcgcagctctgtgttaacctcgaaggtggctataagtgtcaatgtgaagaaggttttcagctggatcctcatactaaagcctgcaaggcagtggggtcgattgcttacctgtttttcactaatcggcatgaggtgcgcaagatgaccttggacagatcagaatacacttccctcattccaaaccttaggaatgtcgtcgccttggacacggaggtggcctccaaccggatttactggtccgatctctcgcagagaatgatctgctccacccaacttgatcgcgcccacggagtcagctcgtacgataccgtcatttcccgtgatatccaggcaccagacggtctggccgtcgattggattcactccaacatctactggaccgattcggtgctgggaactgtttccgtcgcggacactaagggtgtgaaaagaaagaccctttttcgggaaaatgggtccaagccccgcgcgattgtggtcgatccggtgcacggttttatgtactggactgattggggcacccctgcaaagattaagaaaggcgggctcaacggagtcgacatttactcgcttgtgaccgaaaacatacaatggcctaatggcattactcttgatctgctgtctggcagactttactgggtggactcaaaacttcactccattagcagcattgatgtcaatggaggaaaccgcaagactatcctggaggatgaaaagcgccttgcacatccattctcacttgcagtgttcgaagataaagtgttttggaccgacataatcaatgaagcgatattcagcgccaacaggctgaccggctcagatgttaatctgcttgcagaaaacctgcttagccctgaggatatggtgctctttcataaccttactcaacctcgaggtgtgaattggtgtgagagaaccactctttccaacggaggctgtcagtacctctgcttgcccgcaccacagattaacccgcatagccccaaattcacctgtgcgtgtcctgacggtatgcttctggcccgcgacatgcgctcctgcctcactgaagccgaagcagcagtggctacccaagaaaccagcaccgtgaggctgaaggtgtcgtcgactgcagtccgtacccaacacacgaccacgcgacctgtgccagataccagccgtttgcctggggcaacgccggggttgaccaccgtggagatagtgactatgtcccatcaggccctcggagatgtcgcaggaagaggaaacgagaaaaaaccttcaagcgtgagggccctctcaatagtgctgcctattgtgctgctggtgttcttgtgtcttggggtattcctgctttggaagaattggcggctcaagaacatcaactccataaactttgataatcctgtgtaccaaaagaccactgaagatgaggtccacatttgtcataaccaggatggctactcgtacccttccagacaaatggtgtcgctcgaagatgatgtggcg

SEQ ID NO: 15945 - DNA, 2580 bp, synthetic construct
  misc_feature 1..2580: note = source = /note="Description of Artificial Sequence: Synthetic coding sequence"
  source 1..2580: mol_type = other DNA
atgggcccatggggatggaaattgagatggaccgtggctctgttgctggccgcggcgggaaccgccgtgggagacaggtgcgaacggaacgaattccagtgccaggatggaaaatgtatttcgtacaaatgggtctgtgacggctcggccgaatgtcaagacggctctgacgagagccaagagacttgcctgagcgttacctgtaagagcggagacttcagctgcggcggacgggtaaatcggtgcatcccgcagttctggcgatgcgacggccaggtcgattgtgataacggatcagatgaacaagggtgtccgcccaagacttgctcgcaggatgagttcaggtgccatgacggaaagtgcatttcgcgccagttcgtctgtgactccgaccgggactgtctcgatgggtccgacgaggcgtcatgccccgtcctgacttgtgggcccgcctccttccagtgcaacagctcaacctgcatcccccagctgtgggcctgtgacaacgatccggactgcgaggacgggagcgacgaatggcctcaacggtgccgcggactttacgtgttccaaggggatagcagtccatgctcggcgttcgagtttcactgcctgtctggtgaatgtatccactcgagctggcgctgcgatggaggaccggattgtaaggacaagtccgatgaagagaattgcgccgtcgctacctgtcgccccgacgaatttcagtgctccgacggaaactgtatccatggatcgcgtcagtgcgatcgggaatacgattgcaaggacatgagtgacgaggtgggatgtgtgaatgtgactctttgcgaaggcccaaacaagtttaagtgccactccggagaatgcatcaccctggataaggtctgcaatatggcgagagactgcagagactggtcggatgaacccatcaaggagtgcggaaccaacgagtgcctcgataacaatggcggatgttcccatgtgtgcaacgacctcaagattgggtacgagtgtttgtgccctgacggtttccagctcgtcgcacagagacggtgcgaggatatcgatgaatgccaagatcctgacacttgttcccaactctgcgtcaatctcgagggtggctacaaatgccaatgtgaagagggattccaactggaccctcatacgaaagcctgcaaggctgtgggaagcatcgcgtacctgttcttcacgaaccgccacgaagtgagaaaaatgaccctggaccggtccgaatacactagtctcatccccaatctgaggaacgtggtcgcgctcgacaccgaagtggcgtccaacaggatctactggtccgatttgagccagcggatgatctgctccacgcagctggacagggcgcacggcgtctcttcttacgacaccgtgatttcgagagacattcaggcccccgatggtcttgcggtggattggatccactcgaatatctactggactgactcggtgctcggtactgtgtcggtggcggatactaaaggagtgaagcgcaagactctttttagagagaatgggtccaaaccaagggccatcgtggtggatccggtccacggcttcatgtattggaccgattggggtaccccggccaagataaagaaggggggactgaacggtgtggacatttactccctggttaccgagaatatacagtggcccaacggaatcactcttgacctcctgtccggacgcctgtactgggtcgattcaaagctgcactccatctcgtccatcgatgtgaatggagggaaccgcaaaacgattttggaggacgaaaagcgcctggcccatcctttcagcctcgcggtgttcgaggacaaagtgttttggaccgacatcatcaacgaggccatcttctccgccaaccgccttactggttcggatgtcaatctcttggccgaaaacctgctctcacctgaagatatggtgttgttccacaacctgacccagcccaggggcgtcaattggtgcgaacgcaccactttgtctaatggagggtgccaatacctgtgcctcccggcaccgcagattaatccgcattctccaaagttcacctgcgcctgcccggatggtatgctgctggcccgggatatgagatcctgcctgaccgaggccgaggccgcagtggccacccaggagacgtcaaccgtgcggctcaaagtgtcgtcgaccgccgtccggactcaacatactacgaccagacctgtgcctgacaccagccgactgccgggcgctacgccaggactgactaccgtcgagatcgtgactatgtcgcaccaggcactgggcgacgtggccggccggggaaacgagaagaagccgtcctcggtgagagctctgtcaatcgtgctgcccatcgtgctcctcgtgtttctgtgcctgggcgtgttccttctctggaagaattggagactgaagaacatcaattcaatcaacttcgataacccagtctaccagaaaactactgaagatgaagtgcatatttgccacaaccaggacggctattcttacccgagcagacagatggtttccctggaagatgacgtcgcc

SEQ ID NO: 15946 - DNA, 2580 bp, synthetic construct
  misc_feature 1..2580: note = source = /note="Description of Artificial Sequence: Synthetic coding sequence"
  source 1..2580: mol_type = other DNA
atgggcccttgggggtggaagctgagatggaccgtggccctgcttctagctgcagccggcacggcagtgggggatagatgcgagcggaacgaattccaatgtcaagatggaaaatgcatttcatacaagtgggtgtgtgatggaagcgcagagtgccaagacggctctgatgagtcccaggagacctgtctgtccgtgacctgcaaaagtggagacttctcatgcggtgggagggtgaatcgttgcattcctcagttttggcgctgtgacggccaggttgactgcgataatggctccgatgaacaagggtgccccccaaaaacctgcagccaggacgagttcagatgccacgacgggaagtgcatctcaagacaatttgtgtgcgactcagatagggattgtctggacgggagcgacgaggccagttgtccagtactgacatgtggtcccgcctcgttccaatgcaattcaagcacatgtattccgcagctttgggcctgtgataatgaccccgattgcgaagacggttctgacgaatggccacagcgttgccggggcctttacgtctttcagggcgactcctctccctgctcggcatttgagtttcattgcctatcaggtgaatgtattcattcctcatggagatgcgatggtgggcctgattgtaaagataaaagcgatgaggaaaactgtgcggtggcaacctgccgaccggacgagttccagtgtagcgatgggaattgcatacacggctccagacagtgtgaccgcgagtacgattgtaaggatatgagtgatgaagttgggtgcgtgaatgtgacactgtgcgaggggccaaataagtttaaatgtcattccggcgaatgtattacgctggataaagtttgtaatatggcccgggactgtcgggactggtcagatgagccgatcaaggaatgtggtactaacgagtgcctagacaataacgggggctgctcccacgtgtgtaacgacctgaagatcggctatgagtgcctatgtcccgatggctttcagttagtggcccagcgccggtgtgaagatattgatgagtgtcaggatcccgacacctgttcccaattatgtgttaaccttgagggaggatacaaatgccagtgtgaggaaggctttcagctcgatccccacacaaaggcatgtaaggcagtggggagtattgcatacttgtttttcaccaacagacatgaagtgcggaagatgaccctggatcgcagtgagtacacctctttaatccctaatctcagaaatgtagtggccctcgacactgaggtagccagtaaccgaatctattggagtgatctgagtcagaggatgatttgctccactcagttggatcgggcgcatggcgtctcgtcttacgacaccgtcatctctagagatatccaggcccccgacgggctggcagtggactggattcactcaaatatctactggaccgactctgtgctgggcacggtttcagttgccgacaccaagggtgtgaaaaggaaaaccctcttccgagaaaacggaagcaagccacgcgcaatcgtggttgatccggtacacgggttcatgtactggaccgattgggggactcccgcaaagattaagaagggtggtcttaacggagtagatatctattcactggtgaccgagaacatccagtggcccaatggcatcaccctggatctgctgtcaggtcgcctctactgggtggacagcaagctccattctatctcttccattgacgtcaacggcggcaatagaaagaccattttggaagacgagaaacgcctggcacaccccttctctctggcagtgttcgaagataaagtgttctggacagatatcattaatgaggccatcttctcggccaatcgcctaacagggagcgacgtgaatttgctggctgagaacttgttatctccggaagatatggtcctgttccataacttgacacagccacgtggggtaaactggtgcgagaggacaacactttccaatggtgggtgccagtacctgtgcctacccgccccacagatcaatccacattcccccaagtttacatgtgcctgcccagatggaatgctgttggcccgggatatgcgttcttgtctcacagaagcagaggcagctgtggcaacccaggagacgagcaccgtgcgcctcaaggtgagctccactgcggtacggacacagcacaccacaactagacccgtgccagacacttctcgccttccgggcgcaacccctggcctaactaccgtggaaattgtgaccatgtctcaccaggctctgggggatgttgctggccgcggcaacgagaaaaaaccatctagtgtacgggccttgtccatagtgttaccaattgtactgctggtctttctctgcctgggggtgttcttattgtggaaaaattggaggttaaagaacattaactctattaattttgacaatcctgtatatcagaagacgacagaggacgaagtgcacatctgccataatcaggacggttatagctatccgtcacgccagatggtgtctttggaagatgacgtggca

SEQ ID NO: 15947 - DNA, 2580 bp, synthetic construct
  misc_feature 1..2580: note = source = /note="Description of Artificial Sequence: Synthetic coding sequence"
  source 1..2580: mol_type = other DNA
atgggaccgtggggttggaagctccggtggacggtggctctgctgctcgcggcagctgggaccgccgtgggcgaccgctgtgaacggaatgaatttcaatgccaggacggcaagtgtatctcgtacaaatgggtctgcgacggatcggcggaatgtcaagacggctctgacgaatcgcaagagacttgtctcagcgtgacttgtaagtcaggcgacttctcctgcggaggacgggtgaaccgctgcatcccgcagttttggagatgcgacggacaggtggattgtgataatggcagcgacgaacaggggtgcccgcctaagacttgctcgcaagacgagttccgctgccacgacggtaagtgtatctccagacagttcgtgtgtgatagcgatagggattgcctggatggaagcgacgaagccagctgtccagtcctgacctgcggaccggccagcttccagtgcaactcaagcacctgcatacctcagctctgggcgtgcgataacgacccagattgtgaggacggatcggacgaatggccacagaggtgccgaggactgtacgtgttccagggagactcgtctccgtgttcggcatttgagtttcattgcctgagcggggagtgcatccactcatcgtggcggtgcgacggaggaccagattgcaaagacaagtcggatgaagagaactgtgcggttgcgacttgccgccctgatgagttccaatgctcggacggtaattgcatccatggttcgaggcaatgcgaccgagaatacgattgtaaggacatgtcagacgaggtgggatgcgtgaacgtcactctgtgtgagggacctaacaaattcaagtgccattcgggcgaatgtatcaccctcgataaggtgtgcaatatggccagggattgtcgagattggagcgacgagccaatcaaagagtgcgggactaatgaatgcctggacaacaacggaggctgctcccacgtgtgcaacgatttgaagatcggatacgagtgcctctgccccgacgggttccagcttgtggcacagcgccggtgcgaagatattgatgaatgtcaggacccagatacttgctcccaactttgcgtgaatctggagggcggttacaaatgtcaatgcgaggaaggattccagctggatccgcacaccaaagcatgcaaagccgtggggagcatcgcttacttgttcttcactaatagacatgaggtgcggaagatgactttggaccgcagcgaatacactagcctcatcccaaacttgagaaacgtggtggcgcttgacactgaggtcgcgagcaatagaatctactggtcagacctttcccagcggatgatttgctcgactcagctggatagagcacacggagtgtcgtcgtacgacaccgttatctccagggacatccaggcaccggatgggctggcagtggactggatccactccaacatctactggactgattcggttctcgggaccgtgtccgtggccgacaccaagggggtcaagcgcaagaccctcttccgggaaaacggatctaagccgagagcgatcgtggtggaccctgttcatggtttcatgtactggactgactggggcaccccagccaaaatcaaaaagggaggacttaatggagttgatatctactcgctcgtgaccgagaatattcagtggcccaatggaatcacgctggatctgctgagcggccgtctgtactgggtggactcaaagctccattcaatctcgtcgattgatgtgaatggcggaaatcgcaagactattctcgaggatgaaaagcggctggcgcacccattttccctggccgtgttcgaggacaaggtgttctggactgacatcatcaacgaagcgatcttttccgccaaccggcttacggggtccgatgtgaacctccttgccgaaaatctcctgtccccggaagatatggtcctgtttcacaacctgactcaacctcgcggcgtgaattggtgcgaacgcaccactttgtctaatggcgggtgccagtacctgtgtctgccggccccacagatcaacccccattccccgaaattcacttgcgcgtgccctgatggtatgctgctcgctcgtgatatgcgatcctgcctgaccgaagccgaggcagcagtggccacccaagagactagcaccgtcaggcttaaggtgagctcaactgccgtacgcacgcaacacacgactaccagacctgtgccggacacttcccggctcccaggtgcaacccctggcctgaccaccgtggaaatcgtgactatgtcccaccaagccctcggagacgtcgccgggcgaggaaacgaaaagaagccatcctcagttcgggcattgtcaatcgtgctgccgatcgtgctgttggtgttcctgtgtctcggtgtttttctgttgtggaagaactggcgacttaagaatatcaactcaatcaacttcgacaatccagtgtatcagaaaaccaccgaagatgaggtacacatttgtcacaaccaggacgggtactcatatccctcgcggcaaatggtgtctttggaagatgatgtggcg

SEQ ID NO: 15948 - DNA, 2580 bp, synthetic construct
  misc_feature 1..2580: note = source = /note="Description of Artificial Sequence: Synthetic coding sequence"
  source 1..2580: mol_type = other DNA
atgggcccttgggggtggaagctgaggtggaccgttgcactgctactggcggctgcgggaacagccgtgggagatcgctgtgaacgtaacgagttccagtgccaggatggtaagtgcataagttacaagtgggtgtgtgatgggagcgccgagtgccaagacggatccgacgagagccaggagacttgcctttcagtaacttgcaaatctggcgactttagctgcgggggccgggtaaacagatgtataccgcaattctggcgatgtgacggccaggtcgattgtgataacggatccgatgaacaaggttgtcccccgaagacctgctctcaggacgagttcagatgccacgatggaaaatgcattagcaggcaatttgtatgcgattcggaccgcgactgtctagatggcagtgacgaggctagctgtcctgtcctgacctgcggaccggcatctttccaatgtaacagttcaacatgcataccccagctttgggcctgtgataacgaccctgactgcgaggatggctctgatgagtggccccagagatgccgaggcctgtatgtttttcagggggatagtagcccttgcagtgccttcgagttccattgcctgtccggagaatgtatccatagttcttggaggtgcgacggcggacccgattgtaaagataaatccgatgaggagaactgtgccgttgccacctgccggcctgacgaattccagtgtagtgacgggaattgtatccacggttctcgacaatgcgatagggaatacgattgcaaggacatgagcgatgaggtgggctgtgtgaatgtcaccctgtgcgaggggcctaacaagttcaaatgccactcaggcgagtgtatcaccctggataaggtctgtaacatggctcgcgattgtcgcgactggtcagatgaaccgatcaaggagtgcggcaccaatgagtgtcttgacaataacggagggtgtagtcatgtctgcaatgatttgaaaatcggttatgagtgcctctgtccagatggcttccaacttgttgcccagcgtcgctgcgaggatatcgacgagtgccaagaccccgacacttgctctcagctgtgcgtgaacctggaaggcggctacaaatgccagtgtgaagaagggtttcaacttgaccctcatacaaaagcttgtaaagctgtggggagcatcgcctacttattttttactaacagacacgaggtccggaaaatgactctcgatcgaagtgagtacaccagcctaatacccaaccttaggaacgtggtggcacttgatactgaagtggcaagcaataggatttactggagcgacttgtctcagcgcatgatatgctcgacccagttagaccgggcacacggcgtgtctagttatgacacagtgatctctcgggacatacaggcgcccgacgggctggccgtggattggattcacagtaatatatattggactgacagcgtgttaggcactgtctcagtggcagatacaaaaggcgtgaagaggaagacattattcagagaaaacgggtcaaagccgcgcgcgatcgtggtggacccagtgcacggttttatgtattggactgattggggcactcctgctaaaattaagaaagggggactgaatggggtagacatatatagcctggtgaccgaaaacatccagtggcccaacggcataaccttggatctgctgagcggcagactatattgggtggactcaaagctgcactccatctcgagtattgatgtgaacggcgggaatcgcaaaaccattctggaagacgagaaacgcttggctcatccgtttagcctcgcagtgttcgaggacaaagtcttttggaccgatatcatcaatgaggcgattttcagcgccaaccgtctgactggcagcgatgtcaacctactggcagagaacctactttccccagaggacatggtgttattccacaatctaactcagccacgaggcgtgaactggtgtgaacggaccacactgtcaaatgggggctgtcagtacttgtgccttccggcaccacagatcaatccccacagccctaaattcacatgcgcatgtccagacgggatgctcctagcacgagacatgcgatcatgcctcactgaagccgaagcagccgtagccacacaggaaaccagcaccgtgaggctgaaggtgagcagtaccgccgtgagaactcagcacaccaccactcggcctgtgccagacacctcaagactcccaggcgccacacctgggctgactaccgtggaaattgtcaccatgtctcaccaggccctcggtgatgtggctggccggggaaatgagaaaaagcccagttcagttcgggcactgagtattgtattgcctatcgtcctgttggtcttcctgtgcctgggagtgttcttgctgtggaagaactggcgactcaaaaatatcaatagcattaatttcgataatcccgtgtaccagaaaactactgaggatgaggtgcacatttgtcataaccaggacggctacagctacccttctcgtcagatggtgagcctggaggacgatgtagca

SEQ ID NO: 15949 - DNA, 2580 bp, synthetic construct
  misc_feature 1..2580: note = source = /note="Description of Artificial Sequence: Synthetic coding sequence"
  source 1..2580: mol_type = other DNA
atgggcccttgggggtggaaactgaggtggaccgtcgcgttgctgctcgctgcagccggcacagccgtgggcgaccgatgcgagcggaatgagttccagtgtcaggacggcaagtgcatttcttacaaatgggtgtgtgacggctcagctgagtgtcaagatggttccgacgagtcccaggagacctgcttaagcgtgacttgcaaaagcggggacttctcttgcggcggacgtgtgaatcgctgcattcctcagttttggcgttgcgacggccaggtggattgcgacaacggcagcgatgagcaagggtgcccacccaaaacctgtagtcaagatgagttcaggtgccatgacggcaagtgcatttcccgtcaattcgtatgcgacagcgacagggattgcttggatggctctgacgaagcgagttgtccagtcctcacttgcggcccagcgtcattccagtgcaatagcagcacctgcattccacagctgtgggcatgtgacaatgatcctgattgcgaggacggatctgatgaatggcctcagcgatgtaggggcctctacgtgttccaaggcgactcttcaccttgtagcgcttttgagtttcattgtctcagcggagagtgtatccatagttcttggcgctgtgatgggggccctgactgcaaggacaagtctgacgaggaaaattgcgctgtagctacttgccggccagacgagtttcagtgctcagatgggaactgcatccatggatcccgccagtgtgaccgagagtatgactgtaaagacatgtctgatgaggttgggtgcgtaaacgtcacactctgtgaaggccccaataagtttaagtgccatagcggagaatgcataaccctggataaagtgtgtaacatggcgcgggactgtagggactggtctgacgagccaattaaagaatgcggcaccaacgagtgcctagacaataatgggggatgctctcatgtttgcaacgacctgaagatcggttacgagtgcctgtgcccagacggtttccagctggtggcccagcgccgatgtgaggacatcgacgaatgtcaagatccggacacctgctcccagctgtgcgtgaacctcgaaggcggctacaagtgtcagtgcgaggagggctttcaactcgatccccacactaaagcctgcaaggcagtcgggtctatcgcgtatctattttttaccaataggcacgaggtgcgaaagatgacattagataggagcgagtacacaagcctgattcctaatctgcgaaacgtagtggccctggatactgaagtcgctagtaaccggatatattggagcgatctgagccagagaatgatttgttcaacacagttagatagggcccatggcgtgtcgtcttacgatacagtaatctcacgagatattcaagcgcctgacgggttggccgtcgactggattcattcaaatatttactggactgattccgtgcttggcactgtgtcagttgctgataccaaaggcgttaagcgtaagacactctttagagagaatggaagcaaacccagagccatagtggtagatcccgtccacggtttcatgtattggaccgactggggaacccctgcgaagattaagaaggggggcctgaacggagttgatatatactccttggtcacagaaaatatacagtggcctaatggtattacgcttgaccttttgagcggccggctgtattgggtggattctaagctgcacagcatttcaagcattgacgtaaacgggggcaaccgcaaaacaatcctagaagacgagaaacgcctggcccaccctttctccctcgctgtgtttgaggacaaggtcttctggacagatatcatcaatgaagctatcttcagcgctaatcggctgaccgggtctgatgtaaacctactggcagagaacctcctatccccggaggacatggttctgttccacaaccttacccaacctagaggggtcaactggtgcgaaagaacgactctttcaaacggagggtgtcagtatctgtgccttcccgccccccagattaacccgcacagccctaagtttacatgcgcttgccctgatggaatgttgcttgccagggatatgcggagctgcctcactgaggccgaagcagctgtggctacacaggagacgtccactgtgcgcctgaaggtttcgagtactgctgtgcggacccagcacacaactacaagacctgtgccggacaccagtaggctgcccggggctacccccgggctcactacagtcgagattgtgactatgtcccaccaggcccttggtgacgtcgcaggaagagggaatgagaagaagccaagtagcgtgcgcgccctcagcatagttcttcccattgtgctgcttgtatttctgtgcctaggcgtgttcctactatggaagaactggcgcctgaagaacataaatagcatcaactttgataatcctgtgtaccagaagaccaccgaggacgaggtccatatttgtcataatcaggatggttacagctacccaagccgccaaatggtcagcctggaggatgacgtggct

SEQ ID NO: 15950 - DNA, 2580 bp, synthetic construct
  misc_feature 1..2580: note = source = /note="Description of Artificial Sequence: Synthetic coding sequence"
  source 1..2580: mol_type = other DNA
atggggccgtggggttggaagctgcgctggaccgtcgccctgcttctggccgccgctggaaccgccgtcggcgaccggtgcgagcggaacgaatttcaatgccaggatggaaaatgcatctcgtacaagtgggtctgcgacggatccgcggaatgtcaagatggatcagatgaatcacaggaaacctgcctctccgtcacttgcaaatcaggggacttttcatgcggcggacgcgttaaccggtgtatcccacaattctggagatgcgatggacaggtggattgtgataacggctcggacgagcaaggatgcccaccaaagacctgcagccaagacgaattccgttgtcatgacggaaagtgcatctcgcgccagttcgtgtgcgattccgacagagactgcctcgacggatcggacgaagcctcctgcccggtcctgacttgcggtccagctagctttcaatgtaattcgagcacgtgtattcctcagctctgggcgtgcgataatgacccggattgcgaggacggctcagacgagtggcctcagcgttgtaggggcctgtacgtctttcaaggcgactcatcgccgtgctccgcgttcgaattccactgcctttcgggggaatgcatccactcgtcttggagatgtgacggaggccctgactgtaaggacaagtcggatgaggagaactgcgcggtggccacctgtcgcccggacgagttccaatgttcagatggcaactgcattcatggctctcggcagtgcgacagagagtacgattgtaaagacatgtcagacgaagtgggatgcgtgaacgtgactctctgcgagggccctaacaaattcaagtgccactcaggagaatgcatcacgctggacaaagtctgtaatatggcacgcgactgccgggactggtccgacgaaccgatcaaagaatgtggaaccaacgagtgtttggacaataacggcgggtgctcacatgtgtgcaatgatctgaaaatcggatacgagtgcttgtgcccggacggattccagctcgtcgcgcagcgcagatgcgaggacattgacgaatgccaagaccctgatacctgctcccagctctgcgtgaatctggaaggaggctacaagtgccagtgcgaagaaggatttcagctggatcctcacaccaaggcatgcaaggccgtcggttcgatcgcttacctgtttttcaccaatcgccacgaggtgcggaagatgaccctcgaccggtcggaatacacgagcctgatcccaaaccttagaaatgtcgtcgccctcgacaccgaagtcgcatccaaccggatctattggtcagatctgtcgcagcgcatgatctgctcgactcagctggatcgagcacacggagtctcctcgtacgacactgtgatatcacgggacatccaggccccagacggactcgccgtggactggatccacagcaatatctactggactgattcagtcctcgggaccgtgtcggtggcagacacgaaaggggtgaagaggaaaaccctcttcagagaaaacggttccaagccgcgagctatcgtcgtggacccggtgcacggttttatgtactggactgactggggcacgcctgctaaaatcaaaaagggaggactgaacggcgtggacatctactcgctggtgaccgaaaacattcagtggccgaacggtatcaccctggacctgctttcgggacggctgtactgggtggactccaagctgcactcgatcagctccatcgatgtgaacggcggaaaccgaaagaccatcttggaggacgagaagcggctcgctcacccgttctctcttgccgtctttgaggacaaggtgttctggaccgatatcatcaatgaggcgatattcagcgccaacagactgactggatctgatgtgaacctgcttgcagagaacctcctttccccagaagatatggtgctgtttcacaatcttactcagccacggggtgtgaattggtgcgagcgcaccaccctgtccaacggaggatgccaatacttgtgtctcccggcgccacagatcaatccgcactcgcccaagttcacctgcgcttgccctgatggaatgctgctggcacgggatatgcgatcctgtctgactgaggctgaagctgccgtggcaactcaagaaacctcgactgtcaggttgaaggtttcgagcactgcggtgcgcacgcagcatactactaccagacccgtcccggacacgtcgcgcctccccggagccaccccgggactgactaccgtggagattgtgactatgtcccatcaggcgcttggcgatgtcgccggaagaggaaacgagaagaagccatcaagcgtgcgagccctcagcatcgtcctcccaatcgtgctgctcgttttcctgtgtctgggtgtgtttctcttgtggaaaaactggagactgaagaacatcaactccatcaactttgacaacccggtgtatcagaaaaccaccgaggacgaagtgcacatttgccacaatcaagacggatactcgtacccctctaggcagatggtgagccttgaagatgacgtggcc

SEQ ID NO: 15951 - DNA, 2580 bp, synthetic construct
  misc_feature 1..2580: note = source = /note="Description of Artificial Sequence: Synthetic coding sequence"
  source 1..2580: mol_type = other DNA
atgggtccatggggatggaaacttcgttggactgtcgccctgctgctggcagcagcaggaaccgcagtgggggacaggtgcgagcggaatgagttccagtgtcaagacggtaaatgcatctcgtacaagtgggtctgcgacggttcagccgaatgccaggatggatccgacgagtcacaggaaacgtgtctgtccgtgacttgtaaatcaggcgatttttcatgcggtggtcgggtgaacagatgtattccacagttctggcgatgtgatggacaggtcgactgtgacaacggatccgatgaacagggttgtccaccaaaaacctgcagccaagacgaattccgctgtcacgatggaaagtgcatctccagacaatttgtgtgtgattcggatagagactgccttgatggaagcgatgaagcatcctgtccagtgcttacgtgtggtccggcgtccttccaatgtaacagctcaacgtgtatcccgcagctttgggcgtgcgataatgaccccgattgtgaggatggatcagatgaatggcctcagagatgtaggggcctctatgtgtttcagggagattcgtccccttgctcagcttttgaatttcattgtctttctggtgaatgtatacatagctcctggcggtgtgacggtggacctgactgcaaggacaagtccgatgaggaaaactgcgcagtggccacctgtcgacctgatgaatttcaatgtagcgatgggaattgtattcatgggagccgccaatgcgatcgagaatacgattgtaaggatatgagcgatgaagtgggatgtgtcaacgtgactctttgtgagggacccaacaagttcaaatgtcactccggggaatgtatcactcttgataaagtttgcaatatggcaagagactgtcgggattggtcagatgaacctatcaaggaatgcggcaccaacgagtgtctggataacaacggcggatgttcacacgtctgcaatgatcttaagattggctacgagtgtctgtgtcctgatggatttcagctggtcgcgcagcggcgatgcgaggatatcgatgaatgtcaagatccggacacctgttcccagctctgcgtgaacctggaaggaggctataagtgccaatgtgaggaaggttttcagctggatccgcatactaaggcctgtaaggcagtgggaagcattgcatacctgttctttactaatcgtcatgaagtgcgcaagatgacccttgatcggtcagaatacacgagcctgattccgaacctgagaaatgtcgtggcgttggatactgaagttgcgtcaaaccgaatctactggtctgacctgtcgcaaagaatgatttgtagcacccagcttgatagagcgcatggggtttcttcttacgataccgtgatttcccgtgacattcaagcacctgatggtttggccgtcgactggattcactctaacatatactggacggattcggtcctgggtaccgtgtcggtcgcagacaccaagggggtcaaacgtaagactctgtttagagaaaacgggtccaagcctcgtgcaattgtcgtggatcctgtccatggttttatgtactggactgattgggggaccccagcaaagatcaaaaaaggaggccttaacggtgtcgatatctactcccttgtgactgagaacattcaatggccaaacggaattaccctcgatctgctttcaggacgactttactgggtcgactcaaaactccatagcatttcgagcatagatgtcaacggtgggaatcgcaagacgatcttggaggacgagaagcggcttgcacatccttttagcctggctgtgtttgaggataaagtgttttggacggacataatcaatgaggccattttctccgccaaccggcttactgggtctgatgtgaatcttttggcagagaatcttctttccccagaagatatggtgctgtttcacaatctgactcaaccccggggtgtgaactggtgtgagcgcactactctttccaacggtggctgtcaatacctttgccttcctgcaccacagattaatccacacagccctaagttcacctgtgcctgcccagatggaatgctgctggccagagacatgagaagctgtcttaccgaggcagaagcagcagtggcgactcaagaaaccagcactgtccgtctgaaggttagttcgacggcagtgcggactcagcataccactacccggcccgtgcctgatacttcgcgactgccgggcgccaccccaggacttacgaccgtggaaatcgtgaccatgtctcaccaggccctgggggacgtggcaggaaggggtaatgagaagaagccttcttcggtgagagccttgtccatagtcctgccaattgtgcttctggtgttcctctgtttgggagttttccttctgtggaagaattggaggctgaagaacatcaactccatcaattttgacaacccagtctaccaaaagaccactgaggacgaggttcatatttgtcacaaccaggacggatattcgtacccatcgagacagatggtgtcgctggaggacgatgtcgcc

SEQ ID NO: 15952 - DNA, 2580 bp, synthetic construct
  misc_feature 1..2580: note = source = /note="Description of Artificial Sequence: Synthetic coding sequence"
  source 1..2580: mol_type = other DNA
atgggaccctggggttggaaacttaggtggaccgtggccttgctgttagcggccgcaggtactgctgtgggcgaccggtgcgagcgaaacgagttccaatgtcaggatgggaaatgtattagttataaatgggtctgtgacgggagcgccgaatgccaggacgggagtgacgaatcacaagagacctgtcttagtgtgacctgtaagagcggcgattttagttgcggaggtagagtcaacaggtgcattcctcagttctggaggtgcgatggccaggtagattgcgacaacggctctgatgagcagggctgccccccaaagacttgttcccaagacgagttcaggtgccacgacggcaagtgcatctctcggcagtttgtgtgcgattccgatcgcgactgtctcgacggttctgacgaagcctcgtgtccggtcctaacttgtggtccggcgtcttttcaatgcaactctagtacttgcatccctcagctgtgggcttgcgacaatgaccccgactgtgaagacggttcagatgagtggcctcagagatgccgaggcctttatgtgttccagggtgattcatctccatgctcagcctttgagttccattgtctgtcgggggagtgcattcattcaagctggcggtgcgatggaggccccgactgcaaagataagagcgacgaggagaactgcgccgtcgccacctgcagacccgatgaatttcagtgctctgacggcaactgcatccacggtagccggcaatgtgaccgcgaatacgactgtaaagacatgtcggatgaagtgggatgcgtaaatgtaaccctctgtgaaggtccaaacaaattcaagtgccactccggagaatgcattacgctcgataaggtttgtaatatggcacgagactgtcgggattggtctgacgaaccaataaaggaatgcggcactaatgagtgtttggacaataatggagggtgcagtcatgtgtgcaatgacctgaaaataggatatgaatgtttatgcccggatgggtttcagttggtcgcacagcgcagatgcgaagacattgatgaatgccaggacccagacacatgtagccagctctgtgtaaatctggaagggggttacaaatgccaatgcgaagagggcttccagctggaccctcacacaaaagcgtgcaaagcggtgggttccatcgcctacttgttctttactaatcggcacgaggtgcgcaagatgaccctggaccgcagcgagtacacatcgctcattccaaatcttaggaacgtggtcgcccttgacacagaggtggcctccaacaggatatactggtccgacttgagccagcgcatgatctgttccacacaactggaccgcgctcatggcgtctcgagctacgacacagttatcagcagggacattcaggctccggatggtctcgccgtagattggatacacagtaacatatactggacagactccgtgttgggaacggtatctgtggcagacacaaagggggttaagaggaaaacgctctttcgtgagaatggatcaaagccgcgcgctatagtagtggacccggtgcacggattcatgtattggactgactggggcacacccgcgaagatcaaaaaggggggactgaacggggtcgatatctactccctcgttaccgagaacatccagtggcctaacggcattactttagacttgctgtctggtcgcctgtactgggtcgacagtaagttacatagtataagcagtattgatgtgaacggcgggaacaggaagaccatcctcgaggatgaaaagcggctggcccatcccttcagccttgccgtcttcgaggacaaggtcttctggaccgatatcataaacgaggccatcttctccgcaaacagattgacggggtctgacgtgaaccttctcgctgaaaatctcctgtcacccgaagatatggttctctttcacaacttgacccagccacggggggtaaactggtgtgagaggacaactttgagcaatggtgggtgccagtatctctgtctcccagctccccaaatcaatccccacagccccaagttcacctgcgcatgcccggacggcatgctcttggccagggacatgcgaagctgtcttaccgaggctgaagccgccgtcgccacccaggagacctcaactgtcaggcttaaagtttcttccacggcggtgcggacccaacacaccaccacgaggcccgtgccagacacttcgcgccttccgggagccacaccagggctgacgactgtcgagattgtcacaatgtctcaccaggccctcggtgacgtggccgggagaggtaacgagaaaaaaccaagctcagtgagagccctgtccattgttttgccaatcgttctgcttgttttcctgtgtcttggtgtcttcctgctgtggaagaattggcgtcttaagaacatcaattccatcaacttcgataacccagtgtatcagaagactacagaagatgaagtccatatttgtcataatcaggatggctacagttatccaagtagacagatggtaagcctcgaagatgacgtagcc

SEQ ID NO: 15953 - DNA, 2580 bp, synthetic construct
  misc_feature 1..2580: note = source = /note="Description of Artificial Sequence: Synthetic coding sequence"
  source 1..2580: mol_type = other DNA
atgggtccctgggggtggaaactgcgttggaccgtggctctattgctcgcagctgctggtacggccgttggcgaccgctgcgagcgcaacgagttccagtgtcaagatgggaagtgcatctcatacaagtgggtctgtgacggtagtgcagagtgtcaagatggctcggacgagtcccaggaaacatgcctctctgtcacttgtaagagtggtgatttttcctgtggcggtcgcgtgaaccgctgtatccctcagttctggcgttgcgacggccaagtcgattgcgacaacggcagcgacgagcagggttgcccccccaagacttgttcacaggatgagttcaggtgtcacgatgggaagtgtatatcccgccagttcgtgtgtgattccgatcgcgattgtctcgacggtagcgatgaggcctcctgtccggttctcacctgcggacctgcgtcctttcagtgtaactcctccacctgcattccacagctttgggcctgcgacaatgacccggattgcgaggacgggtcggatgaatggccccagcggtgccgtggtctctacgtgttccagggcgactccagcccatgttccgcgttcgagttccactgtctctcgggtgagtgtatccattcctcatggagatgtgacggtggtcctgattgcaaggataagtccgatgaagagaactgtgcggtggctacctgtcggcccgatgaattccaatgtagcgacggcaactgcattcacggttcaaggcagtgcgaccgtgagtacgactgcaaggacatgtccgatgaggtcgggtgcgttaatgtcaccctctgtgagggacccaacaagttcaagtgccattcaggagagtgcattaccctcgataaggtctgtaatatggctcgcgattgtcgtgactggagcgacgaacccatcaaggagtgcggtactaatgaatgcctggataacaacggcggatgctcgcacgtctgcaacgacttgaaaatcggttatgagtgtttgtgtcccgacggctttcaactggttgcccagcggcgctgcgaggacattgacgaatgtcaggaccccgatacctgctcccagttgtgtgtcaacctcgagggcggttacaaatgtcaatgcgaggagggcttccaacttgaccctcacactaaggcttgcaaggcagtgggttctatcgcttaccttttcttcaccaaccgtcacgaggtccggaagatgacccttgacaggtccgagtacaccagcctgatccctaacttgcgcaatgtcgtcgctctcgacaccgaggttgccagcaaccgcatttactggagcgatctcagtcagcgcatgatctgctccactcaactcgacagagcccacggcgtgtcttcctatgacaccgtcatcagcagggatatccaggcccctgatggtctcgctgtggactggatccattcgaacatatactggaccgactcagtcctgggaaccgtatccgttgctgacactaagggcgtcaagcgtaagacgcttttccgcgagaacgggtcaaagccccgggctatcgtcgtggacccagttcacggctttatgtactggacggactggggtaccccagctaagattaagaagggcggcctgaacggtgtcgacatctacagtctagtcaccgaaaacatccagtggcccaacggcattaccctcgaccttctttcgggaaggctgtattgggtcgactctaagttgcactctatatccagcatcgatgttaatggtggcaatagaaagaccatcctcgaggacgagaagcgtctcgcccaccccttcagtctcgctgtgttcgaggacaaggtgttttggacggacatcatcaacgaggctattttcagcgctaatcgtctcacgggtagcgatgtgaacctgttggccgagaaccttctaagccccgaggacatggtactcttccataatctcacacagcctagaggcgtcaactggtgcgagcgcaccacactcagcaacgggggctgtcaatacttgtgtcttcctgcaccccagattaatccacattcacctaagttcacatgtgcgtgccccgatggtatgctgctggcacgggatatgaggtcttgtctgaccgaagccgaggcggcggtggccacccaggagacttctaccgttcgcctgaaggttagcagtaccgctgtccgcactcagcatacgacgactcggccagtccctgatacctcgcggctgcctggcgctaccccgggtctcaccactgtggaaatcgtgactatgtcccaccaggcactcggagatgtcgctggccggggcaacgagaagaagcccagctccgtgcgggcactgtccattgtactccccatcgtcctccttgtcttcttgtgcctcggcgtttttctgctgtggaagaactggcgtctcaagaatatcaattctatcaacttcgataacccggtctaccaaaagacgaccgaggatgaggttcatatctgccataaccaagatggatactcctacccatcccgccagatggtctccctcgaggacgacgtggct

SEQ ID NO: 15954 - DNA, 2580 bp, synthetic construct
  misc_feature 1..2580: note = source = /note="Description of Artificial Sequence: Synthetic coding sequence"
  source 1..2580: mol_type = other DNA
atgggcccctggggttggaagctgaggtggactgtggccttgctgctcgcagctgctggcacagcagtgggggacagatgcgaacgaaatgagttccaatgccaggacggcaagtgcatctcctataagtgggtgtgtgatggttcggctgaatgccaggacggttctgatgaaagtcaagaaacctgtctgtcagtgacctgtaaatctggcgacttctcttgtggaggtagggtgaatcgttgtattccgcagttctggagatgtgatggccaggtggactgcgataatgggtcagacgaacagggctgtcctcctaagacatgcagccaggatgagtttagatgtcacgacgggaagtgtataagtcgccaattcgtgtgcgactctgaccgagactgccttgatgggtccgatgaagcgagctgccctgtgctgacttgcgggcccgccagcttccaatgtaattcatccacttgcataccccagctttgggcctgcgataacgaccctgattgcgaagacggatcagacgaatggccccaacgttgtcgcggcctgtacgttttccagggcgattcatcgccctgcagcgcgttcgaatttcattgtctttccggtgaatgtatccacagcagctggcggtgcgacggaggaccagattgcaaggataagtccgatgaagaaaactgtgcggtggctacctgcaggcccgacgaatttcaatgttccgatgggaattgcatccacggttcacggcagtgcgaccgagaatatgattgcaaggatatgagtgacgaagtcggctgcgtgaacgtgaccctttgtgaaggaccaaacaaatttaaatgccactcaggtgagtgcataactcttgacaaggtgtgtaacatggcccgggactgccgagactggtctgatgagcccatcaaggaatgcggaacgaatgaatgtctggacaataacgggggctgttcgcacgtgtgtaatgacctgaagattggatatgaatgcctgtgtcccgatggattccagctggtagcccagaggaggtgtgaagacatcgatgaatgccaggaccctgacacttgcagtcagctgtgtgtcaacctcgagggcgggtacaagtgtcagtgtgaggagggatttcagttagatccccataccaaggcttgcaaggctgttggatccatagcatatctcttcttcactaaccggcacgaggtgcgaaagatgaccttagaccggtcagaatatacaagtctgatacccaatctgcggaatgtagtcgctcttgacaccgaggtggcatccaaccggatttactggagcgatctatctcaacgcatgatttgttccacacagctcgatagggcgcatggggtcagttcatacgacacggtgatctcgcgcgatatccaggcgccagatggcctggccgttgattggatccacagtaacatttactggactgacagtgtgctgggcacagtttccgttgccgacaccaagggggtcaaaaggaagaccctgttccgagagaatggaagcaagccccgcgccatcgtggtggatcctgtccacggattcatgtactggaccgattggggaacgcccgctaagataaaaaaggggggcttgaacggcgtggacatatattcactagtaactgaaaatatccagtggcccaacgggatcacactggatttattgagcggtaggctgtactgggtggactccaagctgcactcgatttctagtatagacgtaaatggaggaaatagaaagacgatcctggaagacgaaaagagactggcccatccttttagtctggctgtgtttgaggataaagtcttctggaccgacatcatcaatgaggccattttctctgcgaaccggctcacggggagtgatgttaacttactggctgagaatctgttatcaccagaagatatggttctattccacaacctgacacagcccaggggcgttaattggtgcgagcgaaccacactgtctaatggaggttgtcagtacttgtgcctgcccgccccgcagattaacccccacagccccaagttcacctgtgcctgtccggatggcatgctgctcgctcgcgacatgcggtcctgcctgacagaggccgaggcagccgtggctacccaagaaacttccactgtgcgactaaaggtgtcctctaccgccgtgcgcacccagcataccaccacacggcctgtccctgacaccagccgactcccgggggctacccccgggttaacaaccgtggagatcgtgacaatgtcccatcaggcattgggcgatgtggctggtcgcggcaatgagaaaaaaccaagctccgtgagagcgctgtcaatcgtgctacccatcgtcctcctggtttttctctgcctgggcgtttttctattgtggaaaaactggcgcttaaagaacatcaacagcattaacttcgataatcctgtctaccagaagactactgaggatgaggtgcatatctgccataaccaggatggctacagctacccttcacgacagatggtgtcattggaggatgacgttgca

SEQ ID NO: 15955 - DNA, 2580 bp, synthetic construct
  misc_feature 1..2580: note = source = /note="Description of Artificial Sequence: Synthetic coding sequence"
  source 1..2580: mol_type = other DNA
atgggcccatggggatggaagctcagatggaccgtcgcgctgctgctggccgcagcgggcactgcggttggtgaccgatgcgaaagaaatgaattccagtgccaggatggcaaatgtatctcttataagtgggtgtgtgacgggagcgccgaatgtcaggatgggagcgacgagtcccaagagacgtgtctctccgttacctgcaagtccggagattttagctgtggtggcagggtcaatcggtgcataccccagttttggagatgcgatggccaagtagattgcgacaatggtagtgatgagcagggatgtccccctaagacatgctcccaagatgagttcaggtgtcacgatggcaaatgcatttcacggcagtttgtgtgtgactctgatcgcgattgcttagacgggtctgatgaagcatcttgccctgtcttaacatgcgggccggcctctttccagtgtaattcaagcacttgcatcccacaactatgggcttgtgacaatgatcccgattgtgaagacggatctgacgagtggccacaacggtgcagggggctctatgtgttccagggcgacagcagtccctgcagcgcgttcgagtttcactgcctgtcaggtgagtgtatacacagttcctggaggtgcgacggagggccagactgcaaagacaaatccgatgaagagaactgcgctgtggcaacatgcagaccagacgaattccaatgcagcgatggcaactgcatccatgggtcaaggcaatgtgacagagaatatgactgtaaggacatgtcagacgaggtcgggtgtgtgaacgtgaccctgtgcgaggggccgaacaagtttaagtgtcactctggcgaatgtatcacgcttgacaaggtgtgcaacatggctagggattgtcgggactggagcgacgagcccattaaggagtgtgggaccaatgagtgcctggacaataatggcggatgtagccacgtctgtaatgatctgaaaatcggctatgaatgcctctgccccgatggattccagctggtggcccaacgacgttgtgaagatatcgacgaatgccaggatcccgacacctgctcccagctgtgcgttaacctagaggggggatacaagtgccagtgcgaggagggattccaattggatcctcataccaaagcttgtaaggccgtagggtctattgcctatctattctttacaaaccggcacgaagtacgtaagatgactctcgaccgcagcgagtacacaagcctgataccaaatctccggaatgtggtggccttagacaccgaagttgcatctaatcggatctactggagcgatctgtcacagagaatgatttgctccacccaactagatcgggcacatggtgtttcctcgtatgacacagtgatctctagagatattcaggccccggacggcctagcggttgactggattcactcgaatatttactggacagactctgtcctggggacggtttccgtggccgacactaaaggcgtgaaacggaaaacactgttccgcgagaatggctccaaaccaagagctatcgtggtcgatcccgttcacgggtttatgtattggaccgactggggcacccctgctaagatcaagaagggcggccttaatggcgtggacatatatagccttgttaccgaaaacatccaatggccaaacggcatcaccttagacctcctgtccgggcggctctactgggtcgattccaagctccattccatctcctctattgatgtcaacggcggcaatcggaagaccatcctggaagacgaaaaaaggttggcgcatcctttttccttagcggttttcgaagataaagtcttttggacagatataattaacgaagctatcttttctgccaacaggctcactgggtcagatgtgaatttactggcagaaaatctactgtctccagaggacatggtgcttttccacaacctgactcagcctcgaggcgtgaattggtgcgagcgcaccactttgtccaatggcggttgccagtacctgtgccttcctgcccctcagataaatcctcactcccccaaatttacatgtgcctgtccagacggaatgctccttgctagagacatgcgatcctgcttaacagaggccgaagccgcagtggcaacacaagaaacatccacagtccgcttgaaagtgagctctactgctgtgcgcacccagcacacaaccactaggccagtccccgacacctctcgtcttcctggtgccacacccggtctcacaacagtggaaatagtgacaatgagtcaccaggctctgggagatgttgcagggcggggaaatgagaagaaacctagtagcgttcgggctctgtcaatagtactgcctattgtgctcctggtcttcctatgcctgggggtttttctgctgtggaagaattggcgcctgaagaacatcaattccatcaactttgacaacccggtgtatcagaaaaccactgaggatgaagtgcacatatgtcacaaccaggatggttacagttacccatctagacaaatggtctctctcgaggatgacgttgcc

SEQ ID NO: 15956 - DNA, 2580 bp, synthetic construct
  misc_feature 1..2580: note = source = /note="Description of Artificial Sequence: Synthetic coding sequence"
  source 1..2580: mol_type = other DNA
atgggtccttggggttggaaactgaggtggactgttgcactgcttctggccgcggctggtactgctgtgggagacagatgcgagcgcaatgagtttcaatgtcaggacggtaaatgtatcagctacaaatgggtttgcgacggctctgccgaatgccaggacggcagcgacgagtcccaggagacgtgcttgagcgttacctgtaaatcaggcgacttcagctgcgggggtcgcgtgaaccggtgtattccccaattttggcgctgtgatggtcaggttgactgcgataatggtagtgatgagcagggttgtcctcccaagacttgctcccaggacgagtttcgctgccacgatggtaaatgcattagcaggcaattcgtttgtgattccgatagagactgcctggatggttccgacgaagcaagctgtcctgtgttaacgtgcggtccggccagctttcaatgtaatagctctacgtgcatccctcagctgtgggcgtgcgataacgaccctgactgcgaggacggtagtgatgaatggcctcagcgatgtcgaggcctgtatgtatttcagggtgacagcagcccatgcagcgccttcgaattccactgcctgtctggagaatgcattcatagctcatggcgctgtgacggtggccctgactgcaaggataaaagcgatgaggaaaattgcgcggtggccacgtgtcgcccagatgagttccagtgttctgatggtaactgcattcatggttcaagacaatgtgacagggagtatgattgcaaggatatgagcgacgaggttggctgtgtgaacgttaccctgtgcgagggaccgaataaattcaagtgccacagcggcgaatgtatcacgcttgataaagtgtgtaacatggctagggattgccgcgactggtctgacgaaccaattaaagagtgcggaaccaatgaatgtctggataacaacggcggatgcagccacgtgtgcaacgacctgaaaataggttacgagtgtctgtgccctgacggattccaattggtagcgcaacgacggtgtgaagatattgacgagtgccaggatcctgatacctgttctcaattatgcgtcaatcttgaaggcggctataagtgccaatgcgaagagggatttcagcttgatccacacacgaaggcctgtaaggcggtggggagcatcgcctatttgttctttacgaaccgccatgaggtgcgtaaaatgactctggacaggtcggagtatacgagcctgatccctaatctgcggaacgtggtcgcgctggacaccgaagttgcgtcaaacagaatctattggagcgacctgagccagcgtatgatttgctctacccagctcgaccgggcgcacggagtctctagctatgatacagtaattagccgcgacatccaagccccggacggactcgcagtggactggatccactcaaatatatactggaccgatagcgtccttggcacggttagcgtagcagataccaagggtgttaagcgcaaaaccctatttagagagaacggaagcaaacctcgtgctatcgtcgtggatcctgtgcatggctttatgtactggaccgactggggcacccctgcaaaaatcaagaaggggggccttaatggagtggacatctatagccttgtgaccgaaaacatccagtggccgaacggtatcacccttgacctgctgtccggccgtctgtattgggttgattctaagctgcactctattagctccattgatgtgaatggaggtaatcgcaagaccattctggaggatgaaaagcgtttggcgcaccctttcagcttggcagtgttcgaggacaaagtattctggactgacattatcaatgaagccattttcagcgctaatcgccttacaggttccgatgtgaacctcctggcagaaaacctgcttagccctgaggatatggtgctgttccacaatctcacccagccacgcggtgttaattggtgtgagcggacgaccctgtctaatggcggttgtcagtatttgtgcctgcctgccccacagattaacccacatagcccaaagttcacgtgtgcctgtccggacggcatgctgcttgctcgcgacatgcgctcctgcctgactgaggcagaagccgcagttgccacccaagagaccagcaccgtgcgcctgaaggtttcgtcaacggcggttcgcactcagcacaccactaccaggccagttccggacacgagcagattgcccggtgcgacacctggtctgactaccgtcgagatcgtgaccatgagccatcaggcgctgggtgatgttgcgggtagaggtaacgagaagaagcctagcagcgtgcgcgccctgtctatcgtcctgccgatcgtacttctggtgttcctgtgcctgggagtatttctgctgtggaagaattggcggctgaaaaatatcaactctataaacttcgataacccagtttatcagaagaccactgaggatgaggtgcatatctgccataatcaggacggttactcctaccctagcaggcaaatggtgtctttggaggatgacgtcgcg

SEQ ID NO: 15957 - DNA, 2580 bp, synthetic construct
  misc_feature 1..2580: note = source = /note="Description of Artificial Sequence: Synthetic coding sequence"
  source 1..2580: mol_type = other DNA
atgggcccttggggatggaaactgaggtggacagtagcgctcctgctggctgcagctggcactgctgtgggcgacagatgtgaaagaaacgagttccagtgtcaagacggcaagtgcatcagttacaagtgggtatgcgacggctctgctgaatgccaggacggttccgacgaatctcaagagacttgtctgtccgtgacttgtaaaagcggagacttttcttgcggaggccgcgtgaacaggtgcatcccccagttttggcgctgtgatggacaggtcgactgtgataacggttccgacgagcagggttgtccccccaagacgtgcagccaggatgagttccgctgtcacgacggcaaatgcatctccaggcagtttgtttgcgacagtgatcgcgactgccttgatggatctgatgaggccagttgtccggtgctgacctgtggacccgcctctttccagtgtaatagttctacctgtatcccacaactctgggcgtgtgacaatgatcccgattgcgaggatggctccgacgaatggcctcaaaggtgcaggggactgtatgtgtttcaaggcgactcttcaccctgtagcgctttcgagtttcactgtttgagcggtgaatgcattcacagtagctggagatgcgatggcggccccgattgcaaggacaagtctgacgaagaaaattgtgctgtggctacctgcaggcccgacgaattccagtgtagtgacggtaactgtattcacggtagcaggcaatgcgatagggagtacgattgtaaggatatgagcgacgaggtcggatgtgttaacgtcactctctgcgagggccccaacaagttcaaatgtcacagcggtgaatgtataaccttggataaagtgtgcaacatggcccgcgactgtagagattggtccgacgaaccaatcaaagagtgcggaacaaacgaatgcctcgataataatggcggttgttctcacgtctgtaatgaacttaagatcggctacgaatgcctttgcccagatggtttccagctcgtcgctcaaagaaggtgcgaggatatcgacgagtgtcaggacccagacacatgcagccagctgtgcgtgaacctggaaggcggttacaagtgtcagtgtgaggagggattccagctggaccctcatacaaaggcttgtaaggccgtcggatccatcgcgtacctgttcttcacaaataggcacgaagtacgcaaaatgacgttggataggtctgagtatacctcactgattcctaacctgagaaacgtggtcgccttggataccgaggtagcttcaaaccgcatctactggtctgatctttcccagcgcatgatctgttccacgcagctggatagggctcatggtgttagttcatacgatacagtcatctctagagacatccaggcccccgacggccttgctgtggactggatacacagcaacatttactggacggacagcgtcctcggtacggtgtccgtggcagacaccaagggcgtgaaaagaaagacactcttcagagagaatggtagcaaaccaagggcgatcgttgtggatccggtacacggcttcatgtattggacagactggggtacacccgccaagatcaagaaaggtggattgaacggcgtggacatctactctctcgttacagagaacatccaatggccgaacggaatcacactcgacctgctttccggcaggctgtactgggtggatagcaagctgcattccatatcttccatcgatgtgaatggcggcaaccgcaagaccatcctcgaagacgagaagaggctggcccatcccttcagcctcgctgtgttcgaagacaaggtgttctggactgacatcatcaacgaggcaatctttagtgcaaacagactgactggctctgacgttaacttgcttgctgagaaccttctgagcccggaggacatggtgctctttcataatctgactcaaccgagaggagtgaattggtgcgagcgcactacgttgtccaatggaggctgtcagtatctttgcctccccgctccccagatcaacccacattccccaaagtttacttgcgcctgtcccgacggcatgctgctcgcaagagacatgaggtcttgccttaccgaggccgaagcagctgtggctacacaggagacttcaaccgtaaggcttaaggtcagcagtacggctgtgagaacgcagcatacaactaccaggccggtgcccgatacctcaagactgccaggcgccacaccaggactcacgaccgtggagattgttaccatgtcacaccaggccttgggagacgtagcaggcaggggcaacgagaagaagccctcatccgtaagggccctgtctatcgttctgcccatcgtgctgctggtgttcctctgtttgggcgtgttccttctttggaagaattggagactcaagaacatcaatagcatcaacttcgataaccctgtgtaccaaaagacaaccgaagacgaggtgcacatctgtcacaaccaggacggttacagttacccttctagacaaatggtctccctcgaggatgatgtcgca

SEQ ID NO: 15958 - DNA, 2580 bp, synthetic construct
  misc_feature 1..2580: note = source = /note="Description of Artificial Sequence: Synthetic coding sequence"
  source 1..2580: mol_type = other DNA
atgggaccatggggttggaaactcagatggacagtagcattgttgctggcggcggcaggcactgcagtaggagacagatgcgaacggaacgaattccaatgccaagacggaaaatgcatttcgtacaaatgggtctgcgacggatctgcagaatgccaagatggaagtgatgaatcacaggaaacttgcctgtccgtaacctgtaaatccggagatttttcatgcggaggaagagttaatcgatgtattccacagttctggagatgtgatggtcaagtcgattgtgataatggtagtgacgaacaaggatgccctccaaaaacatgttctcaggacgaattcaggtgtcacgacggaaaatgtatttctagacagttcgtatgcgacagtgaccgagattgcttggatggatcagacgaagcttcatgcccagtgttgacatgtggtcctgcatcttttcaatgcaattcgtcaacatgcattccccaactatgggcctgcgataatgatccagactgtgaagacggtagtgatgaatggccacagcgatgtaggggactatatgtgtttcagggtgattcttcgccgtgttcagcttttgagtttcattgcctatccggggaatgcatacattcttcgtggcgatgtgacggcggaccagattgtaaggacaaatctgacgaagaaaactgcgcagtggcaacgtgcagaccggatgaatttcaatgctcagatggaaactgcattcatggaagccgacaatgcgatcgagaatatgactgtaaagatatgagtgacgaggtgggttgcgtgaatgttacgctctgtgaaggaccaaataaattcaaatgtcattctggagagtgcattactttggataaggtctgcaacatggcacgcgattgtcgggactggagcgatgagccgattaaggaatgtggtactaacgaatgtctcgacaacaacgggggatgttcgcatgtttgcaatgaattgaaaataggatacgagtgtttatgtccagatggctttcagctcgttgcacaacgtcgttgcgaagacatcgatgagtgccaagatccagatacctgttctcagctttgtgtaaacctggaaggtggctacaagtgtcaatgtgaagagggttttcaattagatccacacaccaaagcctgcaaagccgttggatctatcgcttatttgtttttcacaaatcgtcatgaggtccgtaaaatgactcttgatcgctctgaatatacctcactcataccaaatttaagaaatgtcgttgctttagacacagaggttgcgtctaaccggatttactggtccgatttatcacaaaggatgatctgttctacgcagttagaccgagcacatggagtttcctcatacgataccgttatttctagagacatccaagctcctgatggtctcgccgtcgattggatccattctaacatatattggacggattcagttctaggaaccgtttcagtcgccgatacaaagggggtgaaacgcaagacactttttcgtgaaaatgggagtaagccacgggccattgtagtggatccagttcatggattcatgtattggaccgactggggaaccccggctaaaattaagaaaggcggactcaatggagtcgacatctattcgttggtaacggaaaatattcagtggccaaacgggattactctggacttgttgagcggacgactgtattgggtagattcaaagttgcactctatcagtagcatcgacgtgaatggaggaaatagaaaaacgatactcgaggatgagaaaagacttgcccacccattttcactagcagtttttgaagacaaggtgttctggactgacatcataaacgaagcaattttctcagcaaatcgccttaccggatcagatgttaatctactcgctgaaaatcttctctcgccagaggatatggttcttttccataatttaacccaaccacgaggagtaaattggtgcgaacgaactacattatcaaatggaggatgtcaatatctttgcctcccagcacctcagatcaatccacactctccaaaatttacatgtgcctgcccagatggtatgttattggcgcgtgatatgcgttcgtgccttacagaagcagaagctgcggtggcaacccaggaaacgtctacagttcgactcaaagtctcttcaactgccgtcagaacccaacacacgactacaagaccggtaccggatacatctcgtcttccgggggcaaccccaggactaacaacggttgagattgtcacgatgagtcatcaagcattgggagacgttgcagggcgtgggaacgaaaaaaagcctagctcagtccgagccttatccattgttttgccaatagttcttctagtctttctttgtttgggagtttttctgctttggaaaaattggagacttaaaaatatcaactcgatcaacttcgataatccagtttaccagaaaaccacagaggatgaagtgcacatttgccataatcaggacggatactcctatccgtctagacagatggtttcgttagaggatgacgttgcc

SEQ ID NO: 15959 - DNA, 2580 bp, synthetic construct
  misc_feature 1..2580: note = source = /note="Description of Artificial Sequence: Synthetic coding sequence"
  source 1..2580: mol_type = other DNA
atgggcccgtggggctggaaattaagatggaccgtagccctgttactggccgccgctggaacagctgtgggtgataggtgtgaacgaaacgaattccagtgccaggatggaaaatgtattagctacaagtgggtgtgtgatggctctgcagaatgccaggacggttcggacgagagccaggaaacatgcctttctgtgacatgcaaaagtggcgacttcagctgcggcgggcgagtcaaccgttgtatcccacagttctggcggtgtgatggtcaagtggattgcgacaatgggtccgatgagcagggttgccccccgaagacgtgtagtcaggacgagttccgctgtcacgacggcaagtgtatttcccgccagttcgtgtgcgattcggacagggactgtctagacgggagtgacgaggcctcttgccccgtgttaacttgtgggcccgcatctttccagtgcaattctagcacctgcattccacagctatgggcgtgcgataatgacccagactgtgaggatggaagtgacgagtggccgcagcgatgccgtggcctctacgtgttccaaggagatagttccccctgctcagcctttgaattccattgcttatcaggcgaatgcatccattcaagctggagatgcgacggaggaccggattgtaaggataagagcgacgaagaaaactgtgcagtggccacgtgcaggcccgacgagtttcagtgcagcgatggtaactgtatacatgggtcaagacagtgcgatcgcgaatacgattgtaaagatatgtccgacgaggttggctgtgtaaacgtgaccctctgtgaaggacccaacaagttcaagtgccactctggcgagtgcattacactggacaaagtgtgcaacatggctcgggactgtcgtgattggagcgacgagcccattaaagagtgtggcactaatgaatgtctagataataatggaggttgttcacacgtatgtaatgaactgaaaatcggttacgagtgtctgtgtcccgacggtttccagctggtggcgcagcgaaggtgcgaagatattgatgagtgtcaagaccctgacacatgcagccagctatgtgtgaatctggagggcggctacaagtgccagtgcgaggaagggtttcagttagacccacacaccaaggcctgtaaagcagtcggctcaattgcctacttgtttttcaccaaccgacacgaagtgaggaagatgacccttgatcgctcagaatatacatctctgatccccaatctcagaaacgtagtggccctggacaccgaagttgcgtccaatagaatttattggagcgacctaagccagcgcatgatctgctctacacaactggatcgcgcgcatggagtgagtagttacgatacagttatcagtcgagacatacaagcccccgatggcctggccgttgattggattcatagtaacatctattggaccgacagcgtgctgggcacggtatccgttgcagacaccaaaggcgtgaaacgcaaaaccttattccgcgaaaacggatcaaagcctcgggccatagtggtcgaccccgtgcatggctttatgtattggacggactgggggacccccgccaagatcaaaaaggggggactgaacggagtcgacatctactctcttgtgaccgagaatattcagtggccgaacgggattacattggacctgcttagcgggcgtctgtactgggtcgacagcaaactgcactctatttcctccattgatgtgaatggaggaaatagaaaaacgatccttgaagatgagaaaagactcgctcaccctttttcacttgccgtcttcgaagataaggttttttggactgacatcatcaacgaagcaatctttagtgccaatcggctcacaggaagcgatgtcaacctgctcgctgaaaatttgctctcaccagaagatatggttttgttccataaccttacacaacccagaggggtgaattggtgtgaacggacgacattgagcaatggcggttgccagtatctgtgcctgccagccccacaaatcaatcctcacagcccaaagttcacttgcgcctgccccgacggtatgctcctggcacgagacatgcgtagctgtctgacagaggcagaagccgccgttgccacacaggagacaagcacggtccgtcttaaggtgtcctctaccgctgtgcgcacccagcatactaccacgcggccggtacccgacacttcaaggctaccgggagccaccccaggcttaacaacagttgaaattgtgacaatgagtcatcaggccttgggagatgtggcgggacgaggcaacgaaaagaagccgtcctccgtgagagctctatctatcgtactacctattgtgcttctcgtgttcctttgcctaggagtttttctgctgtggaagaactggcgattgaagaacataaactcgataaatttcgataaccccgtctatcagaagacgactgaggacgaagtgcacatctgtcacaaccaggacgggtacagctatccaagtaggcagatggtaagcctagaggacgacgtggct

SEQ ID NO: 15960 - DNA, 2580 bp, synthetic construct
  misc_feature 1..2580: note = source = /note="Description of Artificial Sequence: Synthetic coding sequence"
  source 1..2580: mol_type = other DNA
atgggcccctgggggtggaaactgcgatggacggttgccttgttactggccgccgctggcactgctgtcggagatagatgtgagcggaacgaatttcagtgccaggacggaaaatgtatctcgtataaatgggtatgtgacggcagcgctgagtgtcaagacggttctgatgaatcgcaggagacatgcctgtccgtcacttgtaaatcgggggacttttcttgtggaggccgtgtgaaccgctgcatcccgcagttttggaggtgcgatggccaagtcgattgcgataatggatctgatgaacagggatgcccacctaaaacgtgtagccaagacgagtttcgttgccatgatggcaaatgtatcagccggcagtttgtatgcgattcagatagggattgccttgacgggagcgatgaagcatcttgcccggtgcttacctgtggtcctgcttcattccagtgtaactctagcacgtgtattccgcaattatgggcctgcgataatgacccggattgcgaggatggctcagatgagtggccacagcgatgtcgcggattgtatgtattccaaggagactcaagcccttgttcggcgtttgaatttcactgtcttagtggtgaatgtatacatagttcttggcggtgcgatggcggaccggactgtaaagacaaatcagatgaagaaaattgtgctgttgcgacgtgcaggccggatgagtttcagtgtagcgatggaaactgtattcacggcagcagacagtgcgatcgcgaatacgattgcaaggatatgtcagacgaggtcggctgtgtcaatgtaacattatgcgagggtccaaacaagtttaagtgtcattcgggtgaatgcatcacgcttgataaagtatgcaatatggctcgagattgccgggattggagcgatgaacctataaaagaatgcgggacaaatgagtgtctagataacaatggcggctgcagccatgtgtgtaatgagttaaaaattggatatgagtgtttatgcccggatggattccaactggtcgcgcagcgccgatgtgaagatatcgacgaatgtcaagatccggacacatgcagtcagctctgcgtaaatttggaaggcggctacaaatgtcagtgtgaggagggatttcagctagatccacacacaaaagcatgtaaagccgtgggtagcattgcctatcttttttttacgaatcgtcatgaagtaagaaagatgacactggatagatcagaatatacatcgcttattcctaaccttcgcaacgtagtagctctggataccgaagtggcctccaatcgtatatattggtcagacctgtctcaacgcatgatttgtagtacacaacttgatagggcccacggcgtctcatcctatgatacggtgatcagccgggatatccaggcgcctgatggtcttgcggtagactggattcacagcaatatttactggacggatagcgtcctgggcactgtgtcagttgctgacacaaaaggcgtaaagagaaaaactctctttcgggaaaatggctcaaagcctcgcgccattgttgtagatcctgtacacgggtttatgtattggacggactggggtacaccggctaagatcaaaaaagggggccttaatggagtggatatttattccttggtgacggaaaatattcaatggccaaacgggataactctcgatctactgtcaggtcggctttattgggtggatagtaaacttcatagtattagctctattgatgtcaatggcggaaatagaaaaacgatcctggaagacgaaaagcgtctggcacaccctttctccttagcagtattcgaagataaagtgttttggacagatattatcaatgaagccatctttagcgcgaatcgacttactggcagtgacgtaaaccttcttgctgaaaacttgttatctccagaagatatggtcttatttcataacttaacacagccacgcggagtcaattggtgcgaaagaacaacgctttctaacgggggatgccaatacctttgcttacctgcacctcagattaacccgcattcccctaagtttacatgtgcgtgccctgatgggatgcttttggcgagagatatgcgctcctgtctcactgaagctgaagctgctgtagcgacacaggagacgagcacagttagattgaaggtgagctcgacggcagttagaacacagcatacgaccacaagacctgttccggataccagccgtttgccgggcgcgacccctggtctgaccacggtcgaaatcgttacaatgtcccaccaggcgttgggtgatgttgccggaaggggcaatgagaaaaaaccgtcttccgtgcgtgccttatcgatcgtcctgcctatcgtgttgttagtatttctttgccttggtgttttcttgctttggaaaaattggagactcaagaatattaactcaattaactttgacaatcctgtataccagaagacaacggaagatgaagttcatatttgccataatcaagatggctattcttacccttctagacagatggtgagccttgaagatgatgtcgct

SEQ ID NO: 15961 - DNA, 2580 bp, synthetic construct
  misc_feature 1..2580: note = source = /note="Description of Artificial Sequence: Synthetic coding sequence"
  source 1..2580: mol_type = other DNA
atgggaccgtggggatggaagctgagatggaccgtggcgctgctcctcgctgcggctggcaccgctgtcggcgaccgctgcgaaagaaacgaatttcaatgtcaggacggaaagtgcatctcgtacaaatgggtttgcgacggtagcgctgaatgccaggatggctccgacgagtcccaggaaacttgtctgagcgtcacctgcaagagcggcgatttctcatgcggaggcagggtcaacaggtgcatcccacagttctggaggtgcgacggacaggtggactgtgacaacggctcagacgaacagggatgtcctcccaaaacctgttcccaggatgaatttcggtgccatgatgggaagtgtatttcacggcagttcgtctgcgactcagaccgggattgcctggacggatccgatgaggcgtcctgccccgtcttgacctgtggacctgcctcatttcaatgcaattcttcaacttgcattccgcagctgtgggcatgcgacaacgaccctgactgcgaggacgggagcgacgaatggccgcaacggtgtaggggtctgtatgtctttcagggagactcgtccccttgcagcgcctttgagttccattgtctgagcggggaatgtatccactcgagctggcgctgtgacggaggacctgattgtaaggacaagtcagacgaggagaactgtgcggtggctacgtgtcggccggatgaattccagtgctcggacggcaactgcatccatggatcccgccagtgcgaccgcgaatacgactgcaaggatatgtcggacgaagtggggtgcgtgaatgtgactctctgtgaaggccccaataagtttaagtgccactcgggagagtgcatcactctcgacaaggtctgcaacatggcccgggattgccgggactggtcggatgagccaatcaaggaatgcggaaccaatgagtgtcttgataacaacggaggatgctcccacgtctgcaacgaactcaaaatcggatacgagtgcctctgcccggacgggttccaactcgtggcccagagacgatgcgaagatatcgatgagtgccaggatccggacacctgctcccaactctgcgtgaacctcgagggcggatacaagtgccagtgtgaagaagggttccagctcgatcctcatacgaaggcgtgtaaggctgtcgggagcatagcctacctcttcttcacgaaccgccatgaggtgcgcaagatgaccctcgaccgcagtgagtacacctcccttatcccgaacttgcggaatgttgtggctttggacaccgaagtggcctccaatcggatctactggagtgatctctcacagagaatgatctgctcgacgcaactcgaccgcgcccacggtgtgagctcgtacgatactgtgatctctcgggatatccaagcaccggatggcctggcggtggactggatccactcgaacatctactggactgactcagtgctggggaccgtgtctgtggcggacaccaaaggagtgaagcgtaaaaccctcttccgagaaaacgggtcgaaaccacgagcgatcgtggtggatccggtccatggattcatgtactggactgattggggaacgccggctaagattaagaaaggaggactgaatggagtggacatctactcactggtgaccgaaaacattcagtggccgaatggtattactctggacctgctcagcgggcgcctgtactgggtggactcgaagctgcacagcatctcctccatcgatgtgaacggaggaaatcgcaaaactattttggaggatgaaaagagactggctcaccctttcagcctcgcagttttcgaggacaaagttttctggactgacattatcaatgaggccatcttttccgccaaccgactgactgggtctgacgtcaacctgctggccgaaaatctgctgtcgccggaagatatggtcctctttcacaatctgacccaaccccgcggcgtgaactggtgcgagaggactactcttagcaacggcggatgtcagtacctgtgcctgcctgcgccccagattaacccacatagtccgaagttcacctgcgcctgccctgacggaatgttgctggctagggacatgagatcgtgtctgactgaggccgaggcggcggtggcgactcaagagactagcaccgtccgcctgaaggtcagttccaccgccgtgagaactcagcatacgaccacccgcccagtgccggataccagccggcttccgggagcgactccaggcctgactaccgtggaaatcgtaacgatgtcacatcaggccctgggggacgtggcaggccggggaaacgaaaagaagccatcatcagtgagggcactgtcaatcgttctccctatcgtccttctggtgtttctgtgcttgggcgtgtttctgctgtggaagaattggaggttgaaaaacatcaactcgatcaatttcgacaacccggtgtaccaaaaaactactgaggacgaagtccacatctgtcacaatcaagatggatactcgtacccatcgagacagatggtcagtctggaagatgatgtggcc

SEQ ID NO: 15962 - DNA, 2580 bp, synthetic construct
  misc_feature 1..2580: note = source = /note="Description of Artificial Sequence: Synthetic coding sequence"
  source 1..2580: mol_type = other DNA
atgggcccgtgggggtggaaacttaggtggaccgtcgcccttctgctagccgccgccgggaccgcggtaggagatcgatgtgagcgtaacgagtttcagtgccaggatggcaagtgtatttcctacaagtgggtgtgtgacggttctgcagagtgccaggacgggtctgacgagagccaagagacatgcctttcagttacctgcaagtcaggggatttttcctgtggggggagggtgaatcgctgcattccccaattttggagatgtgacggtcaggtggactgcgataacggatccgatgagcaggggtgtcctcctaagacctgttcgcaagatgagttcaggtgtcatgatggtaagtgtatatcccgccagttcgtgtgcgactccgatcgggattgtctggatgggagtgatgaggccagttgccctgtcctcacatgcggccctgcgtccttccaatgcaacagctccacgtgtatcccgcagctctgggcctgtgacaacgaccctgattgcgaagacggcagcgacgaatggcctcagcgctgtcgcggcctatacgttttccagggcgatagctctccatgttctgctttcgaatttcactgcctgagcggagagtgcatccatagcagttggagatgcgacggcgggccagattgcaaggacaaatccgacgaggaaaactgtgccgttgccacgtgtcggccggacgaattccagtgtagcgacggaaactgcatccatggaagtcgtcagtgtgaccgtgagtatgactgcaaagatatgtcagacgaggtggggtgcgtaaatgtcactctctgcgaagggcctaataagttcaagtgccacagcggggagtgcattaccctagataaggtatgcaatatggcgcgggactgcagagattggtctgatgagcctattaaagagtgtgggaccaacgagtgtctcgataataatggaggatgcagccatgtatgtaatgagctgaagataggctacgagtgcctatgtcctgacggcttccagctggtcgctcagagaaggtgcgaggacatcgatgagtgccaggaccctgacacttgtagccagctctgcgtgaatctggaaggtggatataagtgccagtgcgaggagggtttccagcttgacccccacacaaaggcgtgtaaagctgtcggatctatcgcttacctgttttttactaacagacatgaagtgcggaagatgactctggaccgctccgaatacacaagcctgatccctaacctgcgcaatgtggtggccctggacaccgaagttgctagcaacaggatttattggtctgacctctcccagcgcatgatctgttccactcagctggatcgggcccatggggttagctcctatgacacggtgatctctcgagatattcaggcgcctgacggcctggctgtggattggattcattcaaatatctactggacagactcagtccttggtaccgtcagcgtggctgacactaagggagtcaagaggaaaaccctgttcagggagaacgggtccaagcctagggccattgttgtggatcccgtccatggctttatgtactggaccgactggggcacacctgctaagattaagaaagggggcttgaatggagtggatatttacagtctggtcaccgaaaatatacagtggcctaacggcattaccttagacctgctgtccgggcgactgtattgggttgattccaagctccacagcattagctccattgacgtgaatggaggcaatcggaaaaccattctggaggacgaaaagaggctggctcacccgttctcactcgcagtgtttgaggacaaagtgttctggacagatatcataaacgaagcgatctttagcgccaaccgacttacaggttctgacgtaaacctgctggccgaaaatctcctgtctcctgaggacatggtcttgttccataatttgactcagccgaggggcgtgaactggtgcgagaggaccacattaagcaacggcggctgccagtatctttgcctgccggcaccacagatcaatccccacagccctaaatttacatgcgcctgtcctgatgggatgctgctcgcccgcgacatgagaagctgcctcacagaggcagaggcagcggtggccacccaggagacatccactgttagactgaaagtaagctcaactgctgtgagaactcagcatacgactacgagacctgtgccagatacatcccgcttacccggagcgacccctggcctgactacagtcgaaatagttacgatgtcccaccaggctcttggagacgttgcggggcggggaaatgagaagaagcctagctccgtccgggccctgtcaatcgtactgcccattgtcttgctcgtgttcctttgcctgggcgtgtttctgctgtggaaaaattggcgacttaagaacatcaactcaatcaatttcgataatcccgtgtaccaaaagacaacagaggatgaagtgcacatttgccataaccaggatggatatagttacccatctagacagatggtcagcctggaagatgacgtcgca

SEQ ID NO: 15963 - DNA, 2580 bp, synthetic construct
  misc_feature 1..2580: note = source = /note="Description of Artificial Sequence: Synthetic coding sequence"
  source 1..2580: mol_type = other DNA
atgggcccatggggatggaagctacggtggaccgtagcgttgctcctggcggcagcagggaccgcagtgggagatcggtgcgagcgaaatgagttccagtgccaggatggcaaatgtatcagctataagtgggtgtgtgacggttcagccgaatgccaggacggcagtgacgagtcacaggaaacctgtttatccgtcacttgcaaaagtggcgactttagctgtggggggagggtgaatcggtgtatccctcagttttggcgatgtgacggtcaagtcgactgcgataacggttccgacgagcagggatgcccacccaagacatgctcccaggatgaatttagatgtcatgacggcaagtgcatatccagacagttcgtgtgtgattcagatcgggactgcctggatggtagtgatgaggcatcctgcccagtccttacatgtggtccagcctcatttcagtgtaatagcagcacttgcatcccacagctgtgggcttgcgataatgaccccgactgtgaggacggatccgatgaatggccccagcgctgtcgtggcctttatgtgttccagggcgatagcagcccatgctctgcatttgaatttcattgcctgtctggggaatgcatacatagctcctggaggtgtgacggagggccagattgtaaagacaagtcagacgaggagaattgcgccgtcgcaacatgcagacctgatgagtttcaatgcagtgatggaaactgtattcatggcagcaggcaatgcgaccgggaatatgactgcaaagacatgtccgatgaagtcggatgcgtcaacgttacgctgtgtgaaggccccaacaaatttaaatgtcacagtggggaatgcatcacactggataaagtttgtaatatggctcgagattgtcgcgactggagcgacgagccgattaaggaatgtggaacgaatgagtgcttggataataatggcggatgtagccatgtctgtaacgagctgaagattggctacgaatgcttgtgcccggacggcttccaactggtagcccagaggcgctgcgaggatatcgacgaatgtcaagaccccgacacgtgctcgcagttgtgtgtgaatctggaaggtggatacaaatgtcaatgcgaggagggctttcagctggaccctcacaccaaggcatgtaaggctgtaggcagtattgcgtacctctttttcacgaacagacacgaggtccgaaaaatgacgcttgacaggtcagaatatacttccttgattcccaatttgcgaaatgtcgtggcgcttgataccgaagtcgcatctaatcgcatttattggagtgatctcagtcagagaatgatctgctccactcagctggatagagcccatggcgtgagctcatacgacacagtgatttcccgtgacatacaggcaccagatggactggcagtagactggattcatagcaatatttactggacggactctgtcctggggactgtgagcgtagccgataccaagggcgtcaagaggaagactctgtttagggagaatggttccaagcctagggcaatagtggtggatccggtccacgggtttatgtactggactgattggggaacccctgctaaaatcaagaagggcggcttgaatggggtggacatctactcactggttacggaaaacattcaatggcctaacgggattacacttgatctgctgtctggccgattgtactgggtggattctaaacttcactccattagttctatcgacgtgaacggagggaatagaaagactatactagaggacgagaagcggctggcccaccccttcagcctggcagtgttcgaggataaggttttctggacggatatcataaacgaagcaatttttagtgctaaccggctgacaggcagcgacgtgaatctgctggctgaaaacctactgagcccagaggatatggtgttatttcacaacctgacgcagcctcgcggcgtgaattggtgcgaacgcaccactctttccaacggcggctgccagtacctctgtctgcctgccccacagatcaaccctcacagcccaaagtttacatgcgcctgcccagatggaatgttgctggcacgcgacatgcggagctgtttgaccgaggccgaggcagctgtggctacccaggagacatcaaccgttaggttaaaggtgtctagtaccgcggttcggacgcagcacaccactactcgaccagttcccgatacatcccgactgccaggggcaacgcctggattgaccacagttgaaattgtcaccatgagccatcaagccctgggcgatgtagccggccgggggaacgagaaaaagccgtccagcgtgcgtgccctgagtatagtgctgccaatagtgttacttgtgttcctctgcctcggggtctttctcttatggaaaaactggcgcctcaagaacatcaactcaatcaacttcgacaatccagtctatcagaagacaaccgaggatgaagtccatatttgtcataatcaggatggatacagctacccttcacgccaaatggtttcgctggaggacgacgtcgct

SEQ ID NO: 15964 - DNA, 2580 bp, synthetic construct
  misc_feature 1..2580: note = source = /note="Description of Artificial Sequence: Synthetic coding sequence"
  source 1..2580: mol_type = other DNA
atgggaccgtggggatggaaattacgttggaccgtcgccctgctgctagccgccgccgggaccgccgtgggagacagatgcgagcggaatgagtttcagtgccaggacggcaagtgcatctcctacaaatgggtctgcgacgggagcgcagagtgccaagacgggtcggatgagtcacaggagacgtgtctatccgtgacgtgcaagagtggtgacttcagctgcgggggcagggtcaatagatgcatccctcaattctggcgctgtgatgggcaggttgactgcgacaacgggagtgatgagcaggggtgcccaccgaaaacctgttctcaggatgaattccgatgccacgatgggaagtgtatctctcggcaatttgtgtgcgatagcgatcgagattgtctggatggcagcgatgaagccagctgcccggtgctaacctgtggccctgcctcatttcagtgcaattcatctacgtgcatcccacagctgtgggcgtgcgataatgatccagactgtgaggacggctccgacgaatggccacagcgttgcagaggactctatgtgtttcaaggtgactcctcaccctgtagcgcgtttgaattccattgccttagtggcgagtgtatacactcctcatggcggtgtgatggcggtccagactgcaaggacaagtcagacgaggaaaattgtgccgtcgccacgtgcagaccggacgagttccagtgtagcgacggaaactgcatacacggtagcagacagtgtgacagggagtatgactgtaaagatatgagcgatgaggtaggatgtgtaaacgtcaccctctgcgaggggcccaataaatttaagtgccacagcggggaatgcattacgctggataaggtttgcaatatggcacgcgactgtcgtgattggtccgacgagcccataaaggagtgcggtacaaacgagtgcctagacaacaatggtggctgcagccacgtttgtaatgagctgaagataggttacgaatgcctctgtcctgacggttttcagctggtggcccagcgcaggtgcgaagatattgacgagtgccaagaccccgacacttgtagtcagctgtgcgtgaacctggaaggcggctataaatgtcagtgcgaggagggattccagctggacccacacacaaaagcatgcaaagcagtgggaagtattgcgtatttattcttcacaaatcgacacgaggttaggaaaatgacgttagaccgatcagagtacaccagtctaattcccaaccttcgtaatgtggtggcactggatacagaggtcgcatctaaccgcatctactggagcgatttgtctcaaaggatgatctgcagcacgcagctggaccgtgcacatggtgtgtccagctatgatacggtcatatcaagagacattcaggctccagatggcctcgcagtggattggatccacagcaacatttattggacagattccgtactcgggaccgtcagtgtggcggacacaaagggcgtgaaacggaagacccttttccgggaaaatgggtctaaaccacgagctattgtcgtagatcccgtacacggctttatgtattggaccgactgggggacacctgcgaaaatcaagaagggcggacttaacggagtcgacatatatagcctggtcaccgaaaatatccagtggcctaatgggatcacactcgatctgctgtccggtcggctatattgggtcgactccaagctgcatagcatcagttccattgatgtgaatggcggcaaccgtaagaccatcttagaagacgagaagcggctagcacacccattttcattagctgtgttcgaggataaggtgttttggacagacatcatcaacgaagccatattctcagccaatcgtctgactggatccgacgttaacctgctggctgagaaccttctatctccagaggatatggttctgttccataacctgactcagcccagaggagtcaattggtgtgagcggaccacactatcaaatggcggatgtcagtacttgtgcctgccagcgccccagataaatccgcactcacccaagtttacctgtgcctgcccggatggcatgctgctggcccgagacatgaggtcctgcctgacagaagctgaggccgccgtggccacgcaggaaacctccactgtgcgattaaaggtaagcagcaccgcagtcaggactcagcacaccacaacccgcccagtacctgatacctccaggctccctggtgccacgccgggcctgaccactgtggaaatcgttaccatgagccaccaggcattgggcgacgtagcgggacgggggaatgagaagaagccttccagtgtgcgcgcactgtccatcgtgcttccaattgtccttctggtctttctgtgtctcggggtattccttctctggaaaaactggagactgaagaatataaattctattaattttgacaacccagtatatcagaagaccaccgaggacgaggtgcacatctgccacaatcaggacggctactcatatccttcccgccagatggtgagcctggaggacgatgtggca

SEQ ID NO: 15965 - DNA, 2580 bp, synthetic construct
  misc_feature 1..2580: note = source = /note="Description of Artificial Sequence: Synthetic coding sequence"
  source 1..2580: mol_type = other DNA
atgggaccatggggttggaaactccgatggactgtggccttgctcctggcggctgcaggaacagcggtgggcgatcgctgcgagcgaaacgagtttcagtgccaagatgggaagtgtatttcctacaagtgggtgtgcgatggaagcgctgaatgccaggacggtagcgacgagtctcaggaaacttgcctgtctgtaacctgcaaatccggcgattttagctgtggagggagggtgaatcgatgtattccgcagttttggcgctgtgacggacaggtcgactgtgacaatggcagcgatgagcaaggttgccctccaaagacctgttcccaggacgagttcaggtgccatgacggcaagtgcatcagtcggcagttcgtatgcgacagtgaccgcgattgcctggacggttctgacgaagccagctgtccagttttgacctgcgggcccgcaagtttccagtgtaattcctcaacctgcatcccccagctgtgggcgtgcgacaacgaccccgactgcgaggacggatcagacgaatggccccaaaggtgccggggcctgtacgtgtttcagggggactccagcccatgttctgccttcgagtttcactgcctgtcaggggagtgtattcacagctcttggcgctgtgatgggggtccagattgcaaggacaaatccgatgaagaaaactgcgccgttgctacctgtcgacctgacgaattccagtgttccgatggcaattgcatacatgggagtcggcaatgtgaccgcgaatacgattgcaaagacatgtcagatgaagttggttgtgtaaacgtcaccctgtgcgaagggcccaacaaattcaagtgccacagtggcgagtgtattactctggataaggtctgcaacatggccagagactgtcgagattggtccgatgagccgatcaaggaatgcggcaccaatgaatgtctggataataatggagggtgcagccacgtgtgcaatgaactgaagattgggtacgagtgcctgtgtcctgatggattccagctggtagctcagcggaggtgcgaggatattgacgaatgtcaggaccccgatacatgttcacaactgtgtgttaatctggagggcgggtacaaatgtcagtgcgaagaaggtttccagctcgatccccacaccaaggcgtgtaaggcggtggggtctattgcatacctcttctttacgaaccggcatgaagtgcggaaaatgactctcgacaggtccgaatatacatccctcataccaaacctgcgcaacgtggtcgcgttggatactgaggtggcttctaatcgcatttactggtccgatctgagtcagcgcatgatctgttcaacccaattggacagagcgcatggcgtgtcttcatacgacacagtcatttccagggacatccaggcgcccgatggtttggcagtcgactggatccattcaaatatctattggactgactccgtattgggtaccgtgagtgtcgccgatacaaagggagtcaaaaggaagaccctgtttagggaaaatggctccaagccacgcgctatagtcgtggacccagtgcacgggtttatgtactggaccgattggggaactcccgccaagatcaagaaaggaggcctgaacggtgtcgatatttattccctcgtgacagaaaatatacaatggcctaatgggatcaccttggacctgctgtccggccggctctattgggttgattccaagctgcactccatttcaagcatagatgtcaatgggggcaaccgcaagaccattcttgaggacgagaagcgcctcgcccaccctttctcactggccgtctttgaggataaggtgttttggaccgacatcattaatgaggcaattttcagcgcaaatcggctgacaggcagtgatgtgaacttgctggcagaaaatttgttgtcaccagaggacatggtgctgtttcacaaccttacgcagccccgaggggtgaactggtgcgagcgcacaaccctgtccaatggcggctgccagtacctttgccttcccgccccccagataaatcctcactctccgaagttcacatgcgcatgtcccgacgggatgctcctcgcgagggacatgcgctcctgcctcaccgaagccgaggctgcagtcgccacgcaggagactagcactgtcagactcaaagtgtcttccacagcagtgcgcactcagcacaccacaacccggccagtccccgataccagtagactgccgggtgccaccccaggccttacaaccgtcgagatcgtgaccatgtctcatcaggctctcggagacgtcgcaggaagaggaaatgagaagaaaccaagttccgtgcgagccctttccattgtcctgccgatagtgctgctggttttcctgtgtctgggggtattcctcttgtggaaaaattggagactcaagaatataaactctattaatttcgacaatcccgtctaccagaagacaaccgaagacgaagtacatatctgtcacaaccaggacgggtattcctatccatctaggcagatggtgagtctggaagatgacgttgca

SEQ ID NO: 15966 - DNA, 2580 bp, synthetic construct
  misc_feature 1..2580: note = source = /note="Description of Artificial Sequence: Synthetic coding sequence"
  source 1..2580: mol_type = other DNA
atgggcccttggggctggaagctgaggtggacggtggcgctcctgctcgcggcggcgggaaccgccgtcggcgaccggtgcgagcgcaacgaatttcagtgtcaggacgggaaatgcatcagctacaagtgggtctgcgatggatctgcagagtgccaggatggctcagacgagagccaagaaacctgtctttccgttacttgtaaatcgggcgacttcagctgcggaggacgggtgaaccggtgcatcccacagttttggcggtgcgacggacaggtggattgtgacaatgggtccgacgaacaaggctgcccgccaaaaacttgctcccaagacgagttccgctgccatgatggaaagtgcatctcacgacaattcgtgtgcgattcggatcgggattgtctcgacggatcggatgaagcgtcgtgcccggtgctcacttgcggaccggccagctttcaatgcaattcgtcaacctgcatccctcagctgtgggcctgcgacaacgatccggactgcgaggatggatcggacgaatggccccaaagatgccgcggtctgtacgtgttccaaggtgactcctcaccgtgttcggcgttcgagttccactgtctcagcggggaatgcatccactcgtcatggaggtgcgacggtggtccagactgtaaggacaagtcggatgaagagaactgcgctgtcgccacgtgcaggcctgatgagtttcagtgctcggacggaaactgcattcacggaagccggcagtgcgaccgggagtacgattgcaaagacatgtccgatgaggttggttgtgtcaatgtcacgctctgtgagggaccgaataagttcaagtgccattccggagaatgtatcaccttggataaggtctgcaatatggcgagagactgccgcgactggagcgatgagccgatcaaagaatgcggaactaacgaatgtttggataacaatggcggctgtagccacgtgtgcaacgagctgaagattggatacgagtgcttgtgccctgatggatttcaactggtcgcacagagacggtgcgaggacatcgatgaatgccaggatcctgacacctgcagccagctctgtgtcaacttggagggaggatacaagtgccagtgtgaggagggctttcagctggacccgcacaccaaggcatgcaaggccgtggggtccatcgcctacctctttttcaccaataggcatgaagttcggaagatgacccttgaccggtcggaatatacttcgcttatcccgaatctccggaacgtggtggccctggatactgaggtggcatcgaaccgcatctactggtctgacctgagccagcggatgatctgctcgacccagctggaccgggcccacggagtgtcctcctacgacactgttatatcccgagacatccaggctccagacggactcgcggtcgattggatccattccaacatctactggaccgattccgtgctgggaactgtgtccgtggccgatactaaaggggtgaagcgcaagaccctgttccgcgagaacggatcgaagccgcgcgcgattgtggtcgaccctgtgcacggatttatgtattggaccgactggggtactccagccaagatcaagaaggggggactcaacggtgtggacatctactcacttgtgaccgaaaacatccaatggcccaacggcatcactcttgacctgctctcgggcagactgtactgggtggacagcaaactccatagcatatcctcaatcgacgtcaacggcggaaataggaaaacgatccttgaagatgagaaaagactcgcacacccattctcactcgcggtctttgaggataaagtgttctggaccgacatcattaacgaagcaatcttttcggccaaccgcctgactggatccgacgtgaacctgctggcagagaacttgttgtccccggaggacatggttctcttccataacctcacccagccccggggtgtcaactggtgcgaaagaaccactctctcgaacggtggctgtcaatacctgtgcctgcccgctccccagattaacccgcactctccgaagttcacttgtgcctgccccgatggaatgctcctggctcgcgacatgagatcatgcctcacggaggccgaggctgccgtggcaacgcaggaaacctccactgtcagactgaaggtgtcgagcaccgccgtgcggacccaacatactacgactagaccagtcccggacacctcgagactgccgggagctaccccgggcctgaccaccgtggaaatcgtgacgatgtcccaccaggcactgggagacgtggcgggacgcgggaatgagaaaaaaccttcgtcagtcagagctctcagcatcgtgcttcctatcgtgctgttggtgttcctttgtctgggagtgttcctcctttggaaaaactggagactcaagaatatcaattcgatcaattttgacaatccagtgtaccaaaaaacgactgaggatgaggtccacatctgccacaaccaggacggctactcatatcctagccgccaaatggtttcgctggaagatgacgtggcg

SEQ ID NO: 15967 - DNA, 2580 bp, synthetic construct
  misc_feature 1..2580: note = source = /note="Description of Artificial Sequence: Synthetic coding sequence"
  source 1..2580: mol_type = other DNA
atgggcccatggggttggaagctgagatggaccgtggcgctgcttctcgcagcagcagggactgcagtgggtgacaggtgtgagcggaatgaattccaatgccaagatggaaaatgcatttcatacaaatgggtgtgcgacggaagcgcagagtgtcaagacgggtcagatgaaagccaggaaacttgcctttcggtcacttgtaagagcggagatttttcctgtggaggacgcgtgaacagatgtatccctcaattctggagatgcgacggtcaagtggactgcgataacgggtcggatgaacaaggatgtccacccaaaacttgcagccaggatgaatttaggtgtcacgatgggaagtgtattagcagacagttcgtgtgtgattccgatcgtgattgcctggatggtagcgacgaagcctcgtgcccggtgttgacttgtggacccgcctcatttcagtgtaactcgtccacttgtatacctcaactgtgggcatgcgacaacgatccagattgtgaggacggatcggacgaatggcctcaaaggtgcaggggactctacgtgtttcagggagactcaagcccatgctcagcattcgaatttcactgtctgtcgggtgaatgtatccatagctcgtggcgatgtgacggcggtcccgattgcaaggataagtccgatgaggaaaattgtgccgtcgcaacctgcaggccggatgagtttcaatgttccgatggtaactgtatccatggttcgcgccagtgtgatcgggaatacgattgtaaggacatgtccgacgaagtgggttgtgtcaatgtgaccctgtgtgaaggacctaacaaattcaagtgccattcaggagaatgtattaccttggacaaggtgtgcaacatggcacgcgactgcagagattggtcagatgaaccaataaaggagtgtggaaccaacgagtgcctggacaacaatggaggatgttcccacgtctgtaatgagcttaagatcggatacgaatgcctctgccctgatgggtttcagcttgtggcccaacgaagatgtgaagatatcgatgaatgtcaagaccctgatacttgcagccaactgtgtgtcaatctggaaggtggctacaaatgtcaatgtgaggaaggatttcaacttgatccacataccaaagcatgcaaggccgtgggctcgattgcatatctcttctttactaacagacatgaagtgaggaagatgacccttgatagatccgaatacacctccctcatacctaacctccgaaacgtcgtggccctcgacaccgaagttgcctcgaacagaatatactggtcggatcttagccagagaatgatctgttcaactcaacttgatagggcacatggcgtttccagctacgatactgtgatatcgcgggatattcaggcgcccgacggtcttgcggtggattggattcacagtaacatatactggactgattctgtgttggggactgtctcggtggctgatactaagggagtgaaacgtaaaaccctgtttcgcgaaaatgggtctaaacctcgggccatcgtggtggatcccgtgcatggttttatgtactggaccgactgggggactcctgcaaagataaagaagggcgggctgaatggcgtcgatatctacagccttgtgaccgagaatatccaatggccgaacggaatcacccttgatctgctttcggggagactctactgggtggatagcaaacttcattccatttcctctattgatgtgaatggtggcaaccgcaagaccatcctcgaagatgaaaagcgtctcgcacaccccttctcactggcagtattcgaggataaggtgttttggactgacattatcaatgaagctattttctcggccaacaggttgaccggaagcgacgtgaacttgctcgccgaaaatctcctttcccctgaggacatggtcctgtttcataacctcactcagcccaggggggtgaactggtgcgagcgcacgaccctttccaacggtggatgccagtacctttgtctgccagcaccccagataaaccctcattcgcccaagtttacctgtgcatgtcctgatgggatgcttctggctagagacatgcgtagctgtctgactgaggctgaggccgccgtggccacccaagaaaccagcactgtgaggcttaaggtgtcgtccactgcagtcaggacccagcataccactaccagacctgtgccagataccagcagactgccaggggccacccccggccttacgactgttgagatcgtgactatgtcgcaccaggcgctgggggatgtggccggaagagggaacgagaaaaagccatcctccgtcagggcactctccattgtgttgccaattgtcctgctggtgtttctctgtcttggcgtctttctcctttggaagaactggcggttgaaaaacattaactccatcaatttcgacaatccagtgtaccagaaaaccacggaggacgaagtgcacatatgtcataatcaagacgggtactcatacccttcgaggcagatggtgtcgctggaagatgatgtggca

SEQ ID NO: 15968 - DNA, 2580 bp, synthetic construct
  misc_feature 1..2580: note = source = /note="Description of Artificial Sequence: Synthetic coding sequence"
  source 1..2580: mol_type = other DNA
atgggtccatggggatggaaactgaggtggacagtggccctcctccttgccgccgctggcacagcagtcggcgaccgatgtgagagaaacgaatttcagtgtcaggacggaaagtgtatctcttacaagtgggtctgcgatggatccgccgagtgccaggatggatcagacgaatcccaggagacctgcctgagtgtgacctgcaagtcaggagatttctcctgtggggggcgtgtcaaccgctgtatcccgcagttctggcgttgtgatggacaggtggattgtgacaacggctcggatgagcaaggatgtccacccaaaacatgctcacaggacgaatttagatgtcacgacgggaagtgcatctccaggcagttcgtatgcgatagcgatcgggattgtctggacggtagcgacgaggcgtcttgtcctgtcttgacctgtggcccagcgtcttttcagtgcaattccagcacctgtattcctcagttgtgggcttgcgataacgacccagactgtgaagacggctctgatgagtggccacagaggtgccgtgggctgtatgtgttccaaggagattcctccccgtgcagcgccttcgaattccactgcctgtccggcgagtgtattcattccagctggcgatgtgatggggggcccgactgtaaggataagagtgatgaagagaattgtgccgtggccacatgcagaccagacgaatttcagtgttctgacgggaattgcatccatggctctcgccagtgcgacagggagtatgactgcaaggatatgagcgatgaagtcggatgtgtcaacgtcaccttatgcgaaggtcccaataagttcaagtgtcattctggcgaatgcattacactggacaaggtatgtaatatggcacgtgactgtagagattggagcgacgagccaattaaggaatgcgggaccaacgagtgcctggataacaacgggggctgcagccacgtgtgtaatgagctgaaaataggatatgaatgcctgtgccctgatggtttccagctcgtggcgcagcggaggtgcgaagacatcgacgagtgtcaggatccggacacatgtagccaactctgcgtcaacttggagggcgggtataagtgccagtgcgaggagggcttccagctcgacccccacaccaaagcttgcaaagccgtaggctcaatcgcatacttattcttcacgaacaggcatgaagttcgaaaaatgaccttagaccggtccgaatacactagccttatcccaaatctgcgcaacgtggtggcgcttgacacagaagtggccagcaaccgtatatactggagtgacttgtcgcaaagaatgatttgctccacccagttggaccgggcccatggggtaagttcatacgacaccgtcatcagcagagacatacaggcacctgatgggctggcggtcgactggatacattctaacatctactggaccgattccgtcctcgggaccgtgtctgttgcagataccaaaggtgtaaagcgtaaaacactttttagagaaaatggctcaaagcccagagccatcgtcgtcgatccagtgcatggattcatgtactggaccgactggggaaccccagccaaaattaaaaagggcggcctgaacggggtggacatctactcactggtaaccgaaaacatccagtggccaaacggcattaccttagatctgctgtctggccgcctgtactgggttgattcaaagctccatagtatctctagtattgatgtcaatggggggaaccgtaagaccatcctggaagacgagaagcgcctcgcccaccctttcagtttggcagtgttcgaggataaagtcttttggacagacatcataaatgaagctatattcagcgctaatcgcttgaccggtagtgatgtgaatttgctggccgaaaacctactctcgcctgaagacatggtgctgtttcacaatctgacacagcctcgcggggttaattggtgcgagcgcacgacattgtccaatgggggctgccagtacctctgtctgcccgctccccagatcaatccacactctccaaaatttacatgcgcttgcccagacggcatgctcttagcacgggatatgaggtcttgtttgactgaagcggaagccgctgtagccacacaagagacatcaactgttcgactcaaggtcagctccactgcagtccgcacccagcataccacgactagacccgtcccagatacaagtcggttacccggcgcgacacccggtctgaccaccgtggagattgttactatgtctcaccaagcgcttggggatgtggcggggagggggaacgagaagaaaccgagttctgtgcgtgctctaagtatcgtgctccccattgtcctccttgtgttcctgtgcctcggagtctttcttttgtggaaaaactggcgccttaaaaacataaacagcatcaactttgacaatcctgtgtaccagaaaacaaccgaggacgaagtccacatatgtcataatcaggacgggtatagttacccatccaggcaaatggtgtcattggaggacgacgttgca

SEQ ID NO: 15969 - DNA, 2580 bp, synthetic construct
  misc_feature 1..2580: note = source = /note="Description of Artificial Sequence: Synthetic coding sequence"
  source 1..2580: mol_type = other DNA
atggggccctggggctggaaactgaggtggactgttgcacttctgctcgcggcagccggtacagcagtaggagatcgatgcgaacgaaacgagtttcaatgccaggacggcaaatgtatatcatataaatgggtctgcgacggaagcgcagagtgtcaagatgggtcagatgagtctcaagaaacatgcctgagcgtgacctgtaagagcggcgatttctcctgcggcggaagggttaataggtgtatcccccagttctggagatgcgatggccaagttgattgtgataacggttccgatgaacaaggatgtccacccaaaacctgctcccaggacgaattccgttgccatgacggaaaatgtatttcacgacaatttgtttgtgatagtgaccgtgattgtttggatggctcagatgaagcttcgtgtccagttcttacttgcggaccagcgtccttccagtgtaactcgagcacctgtattccgcagctttgggcatgcgacaacgatcccgattgcgaggatggctcagacgagtggccacagaggtgcaggggactatacgtgttccagggggattccagtccatgttctgcctttgaatttcactgtctgtcaggggaatgcattcactccagttggaggtgcgatgggggaccagattgcaaagataagagcgatgaggagaattgtgccgtggccacttgccggcccgacgagtttcaatgtagtgatggaaattgtattcacggatctcgacagtgtgaccgagagtatgactgcaaggatatgtccgacgaggtgggatgtgtaaacgtcaccctgtgtgaaggtccaaacaaattcaagtgccacagcggcgaatgtatcacactggacaaggtatgtaacatggctagggattgccgagattggtctgacgagccaattaaggagtgtggcacaaacgagtgcctggataacaatggtgggtgcagtcatgtgtgcaatgaactgaaaatcgggtacgaatgcctttgcccagatggctttcagctagtggcccagaggagatgcgaagacatcgatgagtgtcaagacccagatacatgtagccagctgtgtgtaaacctcgaaggaggatacaagtgtcagtgtgaggaaggcttccagctggacccgcacaccaaggcttgtaaggccgttggatctatagcttacctcttttttaccaataggcacgaggtacggaagatgaccctggacaggagtgaatatacatccttgatacctaacctcaggaatgtggtagcgttggacacagaggtggcttccaaccgtatttactggtccgacctgtcccagcgcatgatttgtagtacccagctcgacagggcccatggagtctcaagttatgataccgtcatttctagggatatacaggctcccgatggcctggcggttgattggattcattcaaacatctactggaccgattccgtcctcggcaccgtgagtgtcgccgacacgaagggggtcaagcggaagactctgttcagggagaacggttccaaaccgcgtgccattgtagtggaccccgtgcacggttttatgtactggacggactggggcaccccagcaaaaattaagaaaggcggattgaacggtgtggatatctacagcttggttaccgaaaatatccagtggcctaatggcattacattggacctccttagcggcaggctctattgggttgatagcaaactccacagtattagctccatcgatgtgaacgggggcaatcgaaaaacaatccttgaggatgagaaaagattggcccatcctttcagtctggctgtttttgaagataaagtcttctggacagatattatcaacgaagctatattctccgcgaatagattgaccggcagcgacgttaacctattagccgagaaccttctgagccccgaagacatggtcctatttcataacctcacccaacccagaggcgtgaattggtgcgaacgtacgactctctctaacggcggctgccagtacctttgtctcccagctccacaaatcaacccccactctccaaaatttacgtgcgcatgtcctgacggcatgttgctggctcgtgacatgcgaagctgcctgacagaagccgaagctgcagtggctacacaggagacgagtacagtgcgactgaaggtgtcttcaacagccgtcagaacgcagcacaccactacccggccagtgcccgatacttccagactgcccggcgccactccaggcctgaccaccgttgaaatcgtgacgatgtcacatcaggccctgggggatgttgcagggagaggaaacgaaaagaagccctccagcgtgcgtgctctcagcattgtgttacctatagtactcctagtcttcttatgtctgggtgttttcttactatggaagaactggagacttaaaaacatcaactcgatcaacttcgacaacccggtgtaccaaaaaactacagaggatgaggttcacatctgtcacaaccaagatggctactcctacccctcacggcagatggtttcgttggaggatgatgtcgct

SEQ ID NO: 15970 - DNA, 2580 bp, synthetic construct
  misc_feature 1..2580: note = source = /note="Description of Artificial Sequence: Synthetic coding sequence"
  source 1..2580: mol_type = other DNA
atgggtccgtggggttggaagctgcgttggactgtagctctgctcttggcagcggctggcacagcagtaggtgacagatgtgagcgtaatgaatttcaatgtcaagatggtaagtgcatatcttataagtgggtctgcgatggtagcgcagagtgccaagatggttctgatgagagccaggagacctgcttgtccgttacctgcaagtccggggattttagctgcggtggccgcgtcaatcgttgtataccgcagttttggcgatgcgacggtcaggtcgattgcgataatggctctgatgagcagggctgccctcccaagacctgtagccaagatgagtttaggtgtcatgacggcaagtgcataagccgccagttcgtgtgcgactctgatcgtgactgtctggacgggtccgacgaagccagctgtccggtccttacctgcggcccggctagcttccagtgcaacagcagcacctgtatcccccagttgtgggcgtgcgacaatgatccagactgcgaggacggtagcgatgaatggcctcagcgttgtcgcggtctgtatgttttccagggcgattcgtccccatgtagtgcattcgagtttcattgcttgtcgggtgagtgcatccacagctcgtggcgttgcgacgggggtccggattgcaaggataagagcgacgaggagaattgcgcggtggcgacctgccgcccggatgaattccagtgcagcgacggcaattgtatccatggctctcgccaatgcgaccgcgagtatgactgtaaagatatgagcgacgaggtcggctgcgtgaatgttaccctgtgtgaggggcccaataagttcaagtgtcacagcggcgaatgtatcaccctggataaggtatgtaatatggcgcgtgactgtcgcgactggagcgatgaaccgatcaaggagtgcgggactaatgagtgcctcgataataatggtggttgtagccacgtctgcaatgagttgaagattggatacgagtgtctctgccctgatggctttcagctggtggcacaacgtcgctgtgaggacatcgatgaatgtcaggacccagatacttgcagccagctgtgcgtcaatctggaaggcgggtataaatgtcagtgtgaagaaggcttccaattggaccctcacacaaaagcatgtaaggcagttggttcgatcgcgtaccttttctttacgaaccgccacgaagtaaggaaaatgacgttggatcgatcagaatatacctcactgattcctaatctgcgcaacgttgtggccctcgacaccgaggtggctagcaaccgcatttattggtctgacttgagccaacgcatgatttgcagcacccagttagaccgtgcccacggtgttagctcctatgacacggttattagccgcgacatccaagctcctgatggtctggctgtggactggatccattccaatatttactggacggactctgtcctcggcaccgtcagcgtagcagacaccaagggcgtcaaacggaaaacactgtttcgcgaaaacggcagcaagccgcgcgcgatcgtggttgaccctgtccacggcttcatgtactggacagactggggtacccctgctaaaattaagaagggtggtctgaatggtgtcgatatttacagcctggtaacagagaacattcaatggcctaacggcatcaccctggacctgctgagcggccgcttgtactgggtggattccaagctgcactccatttcttctattgatgtcaatggcggcaatcgcaaaacgattctggaggatgagaaacgcctcgcccacccatttagcctggccgttttcgaagataaagtgttctggactgatataatcaatgaagctattttcagcgcaaatcgactgactggtagtgacgtgaatttgttggcagagaatctgctgagccctgaagacatggtgctgttccataacttaacccaaccgcggggtgtgaattggtgcgaaagaactaccctgtccaacggtggctgtcagtacctgtgcctccctgccccccagattaatccacactctcccaagtttacctgtgcatgcccggatgggatgctgctggcaagggatatgcgctcctgcctgaccgaagccgaggcagccgttgctacccaagagacgagcaccgtgcgcctgaaagtcagctccactgcggttaggactcagcacacgactacgcgccctgtcccggacacgagccgcttgcctggtgcgaccccaggcctgaccactgtggagattgtgaccatgagccatcaagcgttgggggacgtggccggccgcggcaatgagaagaagccttcctcagtgcgcgctctgtctattgtgctgcctattgtgctcctggtcttcttgtgccttggcgtgttcctactgtggaaaaactggaggcttaagaacatcaacagcattaatttcgacaatccggtgtaccagaaaacgaccgaggatgaagttcacatttgccataaccaggatggctactcataccctagccggcaaatggtgagcctggaggatgatgtggct

SEQ ID NO: 15971 - DNA, 2580 bp, synthetic construct
  misc_feature 1..2580: note = source = /note="Description of Artificial Sequence: Synthetic coding sequence"
  source 1..2580: mol_type = other DNA
atggggccttgggggtggaaactacgctggacagtcgccctgctgttagctgccgccggaactgcagtgggagacaggtgcgaacggaatgaatttcagtgccaggatgggaagtgtatatcttataaatgggtgtgcgatggatcagcagagtgtcaggatggaagtgatgagtctcaggaaacatgtttaagtgtcacgtgcaaatccggagatttctcatgcggggggcgggttaatcgatgtatcccacagttctggcgctgtgatggacaagttgattgtgacaacggatctgatgaacaggggtgcccaccaaaaacatgctctcaggatgaattccggtgtcatgacgggaagtgcatctcacggcagtttgtttgtgattctgacagagattgtcttgacgggtctgatgaggcttcgtgtccagtactgacttgtgggcctgcttctttccagtgcaattcttcaacatgcatcccacagctgtgggcttgtgataatgatccagattgtgaagatgggtcagatgaatggccccagcgatgtaggggactctatgtatttcagggggattcttcgccatgttccgcattcgagtttcactgtctgtcaggggaatgtatacactcttcctggagatgtgatgggggacctgattgcaaagataagagtgatgaggaaaattgcgccgtggccacttgcaggcctgacgaatttcagtgttcagatgggaactgtattcatgggtcaagacagtgcgatcgggaatacgattgtaaggatatgtctgatgaggtgggatgcgtaaacgtgacattatgcgagggacctaataaattcaaatgtcactcaggggaatgcataacacttgacaaagtgtgcaatatggcccgggactgtagggattggtcagatgaacctatcaaggagtgcgggactaatgaatgtctcgataacaatggagggtgctctcatgtatgcaatgaacttaaaataggatacgaatgcctatgcccagatggatttcagctggttgcccagaggcggtgtgaagatatcgacgaatgtcaggaccctgatacgtgttctcagttatgtgtgaacctcgagggaggatataaatgccagtgcgaagaaggattccagctcgacccccatacaaaagcatgtaaagctgtcgggagtatagcttatctgttttttacaaacaggcatgaagtccggaaaatgacattagatcgctccgaatatacatccctgataccaaatcttcgaaatgtggttgccctcgatactgaagtggcatcgaatcgcatctactggtccgatctgtctcaaaggatgatctgcagtacacagctagatcgggcccacggagtgtcaagttatgatactgtgatttctagggatattcaggcgccagatggactagctgtcgattggatacactcaaatatctattggactgattcagtattgggaacagtgtccgtagcagatacaaaaggggtcaaaaggaaaactcttttcagagaaaacgggtcaaaaccccgagccatagtggtggatccagttcatggattcatgtattggacagattggggaacaccggcgaaaatcaaaaaaggaggactcaacggagtggatatctattcacttgtcactgaaaatatacagtggccaaatggaataacactagatctactctctgggcggttatattgggttgattcaaaactacacagtatctcatccatcgatgtgaatggaggaaatagaaaaacaatcctcgaggatgagaagaggctggctcacccattttcattagccgtttttgaagacaaagttttctggacagacattatcaatgaggctatattctctgccaatagactgacaggatctgatgtgaacctccttgcagaaaacttattgtctcccgaggacatggtgctgttccataatttgactcagcctcggggggttaactggtgcgaacgaacaactctgtccaacggggggtgtcagtatctttgtttgcccgctccacagatcaatccccactccccaaaattcacatgcgcatgccctgatggaatgctactagcccgggatatgagaagttgcttgacagaagctgaagccgctgttgctactcaggaaactagtacagtcaggcttaaagtgtccagtactgccgtgcggactcagcacacaactactagaccagtgccagatacttctaggttacctggggctacacctgggctaactactgtagaaattgtgacaatgtcacaccaggctctaggggacgtggctgggcgcgggaacgaaaagaaaccttcatccgtgagagcactatctatagtattaccaatagtccttttagttttcctttgccttggagtgttcctcctctggaagaactggaggctgaaaaacattaactctatcaactttgacaatccggtgtatcagaagacaacagaagatgaggttcacatatgtcacaatcaggatggatattcctatccatcacgtcagatggtaagtctcgaagatgatgtagcc

SEQ ID NO: 15972 - DNA, 2580 bp, synthetic construct
  misc_feature 1..2580: note = source = /note="Description of Artificial Sequence: Synthetic coding sequence"
  source 1..2580: mol_type = other DNA
atgggaccgtggggctggaagctgcgctggaccgtcgctctgctcctcgctgcagcaggaaccgctgtgggagatcgttgcgaaagaaatgaattccagtgccaggacggtaaatgcatctcgtacaagtgggtgtgcgacggatccgcggagtgtcaagacggctcagacgaatcacaagaaacctgtctgtcagtgacgtgtaagtcgggggatttctcctgcggcggaagagtcaacagatgcatacctcagttttggaggtgcgatggacaggtggattgcgacaatggctccgacgagcaaggctgtccgcccaagacgtgctcccaggacgagttccgctgtcacgatggaaagtgcatctcgcggcaatttgtctgtgatagcgatcgggactgcctcgacggaagcgatgaggcctcgtgcccagtgctgacttgcggtcctgctagcttccagtgcaacagctcgacttgcatcccacagttgtgggcctgcgacaacgatccggattgcgaggacggatccgacgaatggccgcaacgctgcagaggactgtacgtctttcagggagactcgtctccttgctcggcgtttgagttccattgcctttccggtgagtgtatccactcaagttggcggtgcgatggtggacccgactgcaaagacaaaagtgacgaagagaactgtgcagttgctacttgcagaccggacgagttccagtgctccgatggaaattgtatccacggctcccgacaatgtgatcgggaatacgattgtaaggacatgtcagacgaagtgggttgcgtcaacgtgactttgtgtgagggcccaaacaagttcaaatgtcattcaggagaatgtattaccctggacaaggtctgcaatatggcgcgcgattgtcgggattggtcggacgagccgatcaaagaatgtggaacgaacgagtgccttgacaataacggtggatgttctcacgtgtgcaacgagctcaagatcggatatgaatgcctctgcccagacggcttccagctcgtggcgcaaaggcggtgcgaggacatcgacgaatgccaggaccctgacacttgctcgcaactttgcgttaatctggaaggggggtacaagtgccagtgcgaggaggggttccaactggatccccacaccaaagcgtgcaaagccgtgggatcgattgcctacctgttcttcaccaatcgccacgaagttcggaagatgactctggaccggtccgaatacacctccctgatcccgaacctccgcaacgtggtggctcttgatacggaagtggcttccaaccgcatctactggtcggacctgtcgcagcgcatgatttgctccactcagttggacagggcgcatggcgtgtcgtcgtatgacaccgtgatttccagagacatccaggccccagacggactcgccgtcgattggatccactcaaatatctactggaccgactcagtcctcggaactgtctcggtcgccgacactaagggcgtcaaacgcaagacgttgttcagggaaaacggatctaagccgcgcgccattgtggtggatccggttcacggctttatgtactggaccgattggggcactccagcgaaaatcaaaaagggaggacttaatggagtggatatctatagcctggtgactgaaaacatccagtggcccaatggcataaccttggatctgttgtcgggtcgtctttactgggtggattccaaactgcattcaatctccagcatcgacgtgaacggcgggaaccgaaagaccattctcgaagatgaaaagcggcttgcccacccgttctcactggccgtgtttgaggacaaagtgttctggaccgatatcatcaacgaagcgatcttctccgcaaaccggctgaccggctctgacgtcaatctgctggccgaaaacctgctgagcccggaggacatggtactgttccataacctgacccagccgcgcggcgttaattggtgcgagcgcaccactttgtcaaacggggggtgccagtatctgtgtttgcctgctccacagattaatccacattcgcctaagttcacctgtgcatgccctgacggaatgctgctggctcgggacatgagatcatgccttactgaagccgaagccgccgtggcaacgcaggaaacttcgactgtgcgactgaaggtgtcctctactgccgtcagaacccaacacaccacgacccggccagtcccggacacttcacggctgccaggcgcgactcccggcctcaccaccgtagagatcgtgaccatgtcgcatcaagcccttggagatgtggcgggtcgcggtaatgagaagaagccatcctctgtgcgcgccctgtcaatcgtgctgccgatcgttctgctcgtctttttgtgcctgggggtgttcctgttgtggaagaattggcgactcaagaacatcaatagcatcaactttgataacccagtgtaccaaaagactaccgaagatgaagtacacatctgtcacaaccaagacggctactcctacccatccagacagatggtgagcctcgaggatgacgtggct

SEQ ID NO: 15973 - DNA, 2580 bp, synthetic construct
  misc_feature 1..2580: note = source = /note="Description of Artificial Sequence: Synthetic coding sequence"
  source 1..2580: mol_type = other DNA
atgggtccctggggatggaagttgcgatggaccgtggcgctgctgcttgcggcagcaggcacggcggtgggagatcgttgtgaacgaaacgaattccaatgtcaggacggaaagtgcatttcttacaagtgggtctgtgatggctcggcagagtgtcaggatggatcagatgagtcgcaagaaacctgtctcagcgtgacctgcaagtccggggacttctcctgtggtggaagagtgaacaggtgtatcccacagttctggcggtgcgatggtcaggttgattgcgataatggctccgatgagcaaggctgtccgcccaagacctgttcacaggacgaattccggtgccacgacggcaagtgcatcagccgccaatttgtatgcgattcagatcgcgattgtcttgatggtagcgacgaagccagctgtccagtgctgacctgcggtcctgcatcattccaatgtaactcaagcacttgtattccccagctttgggcctgtgataacgatcctgactgtgaagatggatcggacgaatggcctcagagatgtaggggactgtacgtgtttcaaggagactcatcaccctgttcggcattcgaattccactgtctttccggagagtgtattcactcgtcctggagatgcgacgggggtcctgattgcaaagataaaagcgatgaggagaattgcgcagtcgccacttgtagaccagacgaatttcagtgtagcgatggaaattgtattcatggatcgcgacagtgtgatagggaatacgactgtaaagatatgtccgatgaagtcgggtgtgtgaacgtgaccttgtgcgaaggacccaataagtttaagtgtcattccggtgaatgtataacgctggataaggtctgtaatatggcacgtgattgccgcgactggtcagacgaacccatcaaagaatgtggaaccaacgagtgcctcgataacaacggggggtgttcgcatgtgtgtaacgagctcaagattggttacgaatgtctttgtccggatggatttcaacttgtggcacaaagacgttgtgaagatatcgatgaatgccaggatcctgacacttgctcacaactctgcgtgaacctggaaggaggatacaagtgtcaatgtgaagaaggctttcaacttgaccctcataccaaagcatgcaaggccgtcggatcaattgcataccttttcttcaccaacagacacgaggtgcgcaagatgactctggatagatcagaatacacttcgttgatacctaatcttcgaaacgtggttgcactcgataccgaagtcgcctctaatcggatctactggtcagatctgagtcaaagaatgatttgctccacccaactcgatcgggcccatggagtcagctcctatgacactgtgatcagcagagacattcaagctcccgatggactggcggttgattggattcattctaatatctactggactgactcagtgttgggtaccgtgtcggtggccgataccaaaggagttaagcgtaagacgctttttcgagaaaatggatccaagcctagggcaatcgtcgtcgatccagtgcatgggtttatgtactggaccgattggggaactccagcgaagatcaaaaaggggggacttaatggagtggatatctattcacttgtcactgagaacattcagtggccaaatggtatcacccttgatctgctgtcgggcaggctttactgggtggatagcaaacttcattcgatttcctccattgacgtgaacggaggtaatcggaaaaccatactggaggatgaaaaaagactcgcacatcctttctcgctggcagtctttgaggacaaagttttttggaccgatatcattaacgaggcaattttctccgcaaatcgacttactggctccgacgtaaatcttcttgcagagaacttgctctcacccgaggatatggtcctctttcataatctgacccagccaagaggtgtgaactggtgcgagaggaccacgctctcgaacggcggctgtcagtacctctgcctcccagcgccgcaaatcaaccctcactccccaaagtttacgtgtgcgtgtcctgatggcatgttgctggcaagagatatgagatcatgcctcactgaagccgaggccgccgtggcaactcaggagacttccactgtgcgattgaaggtgtcgtcgacggcagttcggacccaacacaccaccactagaccagtgcccgatacctcacggctgcctggagcaacccccggactgactacggtcgagattgtgactatgtcgcaccaggcactgggtgacgtcgccggtagaggaaatgaaaagaagccatcatcggttagggctctttcgattgtgcttccaatcgtgttgctggtgttcctttgcctgggagtctttcttctgtggaagaactggcggctcaaaaacattaacagcattaactttgacaatcccgtttaccagaaaacgaccgaggatgaagtccacatttgtcataatcaagatggttacagttacccatcgagacagatggtgtcgttggaggatgatgtggca

SEQ ID NO: 15974 - DNA, 2580 bp, synthetic construct
  misc_feature 1..2580: note = source = /note="Description of Artificial Sequence: Synthetic coding sequence"
  source 1..2580: mol_type = other DNA
atgggcccctggggatggaagttgcgttggaccgtagctttgttgctggcagcagcaggaactgcagtgggtgacagatgcgagcgcaatgaatttcagtgccaggatggaaagtgcatcagctacaagtgggtgtgcgacgggagcgccgagtgccaagacggctcggacgaatcccaggaaacttgcctcagcgtgacctgcaaaagcggagactttagctgcgggggccgtgtgaacagatgtatcccgcagttctggcggtgtgatggacaggtcgactgcgacaacggttctgacgagcagggatgccctcctaaaacgtgttcccaggacgaatttaggtgccatgatggaaaatgcatctcaaggcaattcgtgtgtgactcggaccgcgactgcctcgatggatcagatgaggcgagctgccctgtgctcacctgtggacctgcctccttccagtgcaatagcagcacttgcatcccgcagctgtgggcctgtgataacgacccggactgcgaggatggatcggatgaatggccgcagaggtgccgcgggctgtacgtgttccaaggagattcgagcccatgctcggctttcgaattccactgcctttcaggagaatgcatccactccagctggcgctgtgatgggggccccgactgcaaggataagagcgatgaggagaactgcgctgtcgcgacctgcaggccagatgagttccaatgttccgatggaaactgtatccatggttcgcgccagtgcgatagagaatacgactgtaaggacatgagcgatgaggtcggttgcgtgaacgtcaccctgtgcgaaggaccaaacaaattcaagtgccattcgggagagtgtatcaccctggacaaggtctgcaatatggcaagagactgccgggattggtcagacgaaccgattaaggaatgcggaaccaatgaatgcctcgacaataacggaggttgttcccacgtgtgtaacgagctcaagatcggatacgaatgcttgtgcccagacgggttccaactcgtcgctcagagaaggtgcgaggacatcgacgaatgccaggatccagacacgtgctcacagctgtgtgtgaacctggaaggcggatacaaatgtcaatgcgaggagggtttccagctggacccgcacactaaggcatgtaaggccgttggatcgatcgcttacctgtttttcacgaatcggcacgaagttcgcaagatgactttggacagatctgaatacacctccctcattccgaatttgagaaacgtcgtggcacttgatacggaagtggcctcgaaccgcatatactggtcggacctttcgcaaagaatgatctgctcaactcaactggaccgcgcccacggggtgagttcttacgacaccgtcatctcgagggatatacaggcgccagacggcctggccgtcgattggatccactctaacatctactggaccgattcagtcctgggaactgtgtctgtcgcggacactaagggtgtgaaacgcaagactcttttccgggagaatggatccaaaccacgcgcaatcgtagtagatccagtccatggctttatgtactggacggactggggtactccggcgaagatcaagaaaggcgggctcaatggtgtggatatctattccctcgtgaccgaaaacattcaatggcccaacggcatcacccttgacctgctctccgggcgactgtactgggtggacagtaaactgcactcgatcagcagcatcgacgtgaatggcggaaatcgcaagactatcctggaggatgagaagcgcctcgcccatccgttctccctggcagtttttgaagataaggtgttctggaccgatatcattaacgaagcgatcttttcggccaatcggctgactgggtcggacgtcaacctgttggccgaaaacctgctctccccagaagatatggtactcttccacaatctgacccaaccgagaggggttaactggtgtgaacgcactaccctgtccaacggaggatgtcaatatctgtgcctgccggccccgcagataaacccgcatagccctaagttcacttgtgcctgcccagatggaatgcttctggcccgagatatgcgcagctgcctcaccgaggctgaagccgcagtggcgactcaggagacttccaccgttcggctgaaggtgtcatcgacggcggtgcggacccagcacacgaccacccggcctgtgccagacacttcacggctgccgggtgcgacccccggccttactaccgtggagattgtgactatgtcccaccaggccttgggcgacgtggctggaaggggaaatgagaagaaaccgtccagcgtgcgcgccctgtcaattgtcttgccgattgtcctcctcgttttcctgtgcctgggcgtgttcctgctgtggaaaaactggcggctgaagaacatcaacagcatcaattttgacaaccctgtgtaccaaaagaccactgaggatgaagtgcatatctgccacaaccaggacggatactcatacccctcgcggcagatggtgtcgctcgaggacgacgtcgct

SEQ ID NO: 15975 - DNA, 2580 bp, synthetic construct
  misc_feature 1..2580: note = source = /note="Description of Artificial Sequence: Synthetic coding sequence"
  source 1..2580: mol_type = other DNA
atggggccgtggggctggaagttgcgctggaccgtggcgctcctcctcgcggccgccggaacggccgtgggggatcgctgcgaacggaatgaattccagtgccaagatggcaagtgcatctcgtacaagtgggtgtgcgacggctcagcagagtgccaggacggaagcgacgaatcccaggaaacctgcctgtcggtgacctgtaaatccggagacttcagctgcggaggtcgggtgaatcgctgcatccctcagttctggaggtgtgacggacaggtcgactgcgacaatggctcggatgagcagggatgcccgccaaagacctgctcgcaggacgaatttcgctgccacgacggaaagtgtatctcccgtcaattcgtctgtgattcggacagagactgcctggacggatccgatgaggcgtcgtgcccggtgctcacctgcggacccgcatccttccagtgcaactcctcaacgtgcatcccgcagctgtgggcttgcgacaatgacccagactgcgaagatgggagcgacgaatggccacagcgctgcaggggactgtacgtgttccaaggagactcgtccccatgctccgcattcgagttccactgtctcagcggagagtgcattcacagctcgtggagatgcgacgggggtccggactgcaaggacaagtccgacgaggaaaattgtgccgtcgcaacttgccggccggacgagttccagtgttccgacggaaattgtatccacggatcgcgacaatgtgatcgcgagtacgattgcaaagacatgagcgatgaagtgggatgcgtcaatgtgaccctgtgcgagggaccgaacaagttcaaatgccacagtggagaatgtattactctcgataaagtgtgcaatatggcgcgggactgccgcgactggtcggacgaaccaattaaggaatgcggaaccaacgaatgcttggataacaacggaggctgcagccacgtgtgcaacgagcttaagatcggctacgagtgcttgtgcccggacggatttcaactggtagcgcaaagacgatgcgaagatatcgacgagtgtcaagaccctgatacctgctcacaactgtgcgtgaatctggaaggagggtacaagtgccagtgtgaagagggatttcagctcgaccctcacactaaggcatgtaaggcagtcggctcgatcgcatacctgttctttactaatagacatgaggtgagaaagatgacccttgaccggtcggagtacacgtcgctcataccgaacctccggaacgtggtggcgttggataccgaggtggcatcgaatcgcatctactggtcggatctgtcacagcggatgatttgttcaacccaacttgacagagcgcacggagtgtcctcgtacgatactgtgatcagccgcgacattcaagccccagatggacttgccgtggactggatccactccaacatctattggaccgactccgtcctcggcactgtgtcagtggccgatactaagggagtgaagcgcaaaactctgtttcgcgagaacggctcgaagcccagagccatcgtggtcgacccagtccatggattcatgtattggaccgattggggaactcccgctaaaatcaagaagggaggactcaacggcgttgacatctactccctcgtgactgagaatatccagtggcctaatggaattaccctggatctgctctccggccgcctgtactgggtggactccaagctgcattcaatttcttccatcgacgtcaacggaggaaaccggaaaacgatccttgaggacgagaaacggctcgcgcacccgttttcgctggcggtgtttgaggacaaagtgttctggacggacatcatcaacgaagccatctttagcgcgaatcggctgaccggatccgacgtgaatctcctggccgaaaacctgttgagcccggaagatatggtgctgttccataacctgacccagccgagaggagtgaattggtgtgagcgcaccaccctgtccaacggaggatgccaatacctgtgccttccagctccccagattaacccacattccccgaagtttacctgcgcttgcccagatggcatgctgctggcccgcgacatgagatcatgtttgactgaagccgaagccgcggtggcgacgcaggaaacgtcgactgtcagactcaaggtgtcaagcactgcagtccgcactcagcataccactacccggccagtgccagacacctcaagacttccaggagcgaccccgggactcaccaccgtggagatcgtgactatgtcccatcaagcgctcggtgacgtggccggacgcggcaacgagaaaaaaccatcgtcggtgagggccttgtccatcgtcctgccgattgtcctcctcgtgttcctctgtctgggggtctttctcctctggaagaactggagactgaaaaacataaacagcatcaacttcgacaaccctgtgtaccagaaaaccactgaagatgaagtccatatttgtcataatcaggatggatactcatacccctccagacagatggtttccctggaagatgatgtggcc

SEQ ID NO: 15976 - DNA, 2580 bp, synthetic construct
  misc_feature 1..2580: note = source = /note="Description of Artificial Sequence: Synthetic coding sequence"
  source 1..2580: mol_type = other DNA
atgggaccatggggatggaaacttagatggacagttgcattacttctcgcagcagctggaacagcagttggagatagatgcgaacgtaatgaatttcaatgtcaagatggaaagtgtatttcatataagtgggtttgtgacgggtcagctgaatgtcaagatggttctgatgaatctcaagagacatgtttatcagttacttgtaagtcaggagatttttcttgtggtggtagagttaacagatgtattcctcaattttggagatgtgatgggcaagtagattgtgataatggaagtgatgaacaaggttgtcctccaaaaacttgttcacaagacgaatttagatgccacgatggaaaatgtattagtagacagttcgtatgtgattctgatagagattgtttagatggttctgatgaagcttcatgtcctgttttgacatgtggtccagcttcatttcaatgtaatagttctacctgtattccacaattatgggcttgtgataatgatccagattgcgaagatggtagtgatgaatggcctcaaagatgtagaggattatatgtttttcaaggagatagttctccatgttcagcttttgaatttcattgtttatcaggtgaatgtattcacagtagttggagatgtgatggaggacctgattgtaaagataagtcagatgaagaaaattgtgctgttgcaacctgtcgaccagacgaatttcagtgtagtgatggtaattgtattcatggaagtagacaatgcgatagagaatatgattgcaaagatatgagtgacgaagttggatgtgttaacgttactttgtgtgaaggacctaataagttcaaatgtcattcaggtgaatgtattacattagataaggtttgtaatatggcaagagattgtagagattggagtgatgaaccaattaaagaatgtggaacaaatgaatgtcttgataataatggaggatgttcacacgtttgtaatgaattaaaaattggatatgaatgtctttgtccagatggatttcagcttgttgcacaaaggagatgtgaagatatagatgaatgtcaagatccagatacttgttctcaactttgtgtcaatttagagggaggatataaatgccaatgtgaggaaggatttcaattagatcctcatacaaaagcttgtaaagctgtaggaagtatagcatatcttttttttacgaatagacatgaagttagaaaaatgacattggatagatcagaatacactagtcttattcctaatttacgaaatgttgttgctttagatactgaagtcgcatcaaatcgtatttattggtccgatttgtctcaaagaatgatttgttcaacacaattagatagagctcatggagtttctagttatgatactgtaatatcaagagatatccaagctccagatggattagctgtcgattggattcattctaatatttattggacagatagtgtgttaggtacagtttctgttgcagatacaaaaggagttaaaagaaaaacattatttagggaaaatggaagtaaaccaagagcaattgttgttgatcctgttcatggatttatgtattggactgattggggtacaccagcaaaaatcaagaaaggaggattaaatggtgtagatatatacagtttagtaactgaaaatatacagtggccaaacggtatcactcttgatttactatcaggacgattatattgggttgattctaaacttcattcaataagttctattgatgttaatggaggtaatagaaaaactattttggaagatgaaaaacgacttgctcacccattctcattggctgtatttgaagataaagtattttggacagatattattaatgaagcaattttctcagctaatagattaacaggatctgatgttaatcttttagctgaaaatcttctttcaccagaagatatggtcctttttcataatttaactcaaccaagaggtgtcaattggtgtgaaagaacaactttatctaatggaggttgccaatatttatgtcttccagctcctcaaattaacccacatagtccaaaatttacgtgtgcatgtccagacggaatgcttttagctcgagatatgagatcatgtttaactgaagcagaagctgctgtagctacacaagaaacttcaactgttagattaaaagtttcgtctactgctgttcgtacacaacatactactacacgacctgttcctgatacttcacgattaccaggtgctacaccaggacttacaacagttgaaattgtaacaatgtcacatcaagcattaggtgatgtagctggacgtggaaatgaaaaaaaaccatcttcagttagagcattgtcgatagttttaccaattgttcttttagtttttctttgtttaggtgtatttttactttggaaaaactggagattaaaaaatattaatagtataaattttgataatcctgtttaccaaaagactacagaagatgaagtacatatttgtcataatcaagatggatacagttacccatcaagacaaatggtttcattagaagatgatgtagca

SEQ ID NO: 15977 - DNA, 2580 bp, synthetic construct
  misc_feature 1..2580: note = source = /note="Description of Artificial Sequence: Synthetic coding sequence"
  source 1..2580: mol_type = other DNA
atggggccatggggctggaagctgagatggactgtggcccttctgttggcagcagcagggactgccgtgggggatagatgtgaacgcaatgagtttcagtgtcaggacggaaagtgtatcagctacaagtgggtgtgtgacggaagcgcggaatgtcaagatggaagtgacgaatcgcaagaaacgtgtctgagcgtgacctgtaagagcggtgatttttcgtgtgggggacgggtgaatagatgtattccacagttctggaggtgcgatggacaagtcgactgtgataatggatccgatgaacaaggctgcccccctaaaacttgttcccaggatgagtttagatgtcatgatggaaaatgtatctcgcgacagttcgtgtgcgactccgacagggattgcctggatggaagcgatgaagcatcgtgccctgtgctgacttgtggtcccgctagctttcaatgtaactcgtcgacctgtatacctcagctctgggcatgtgacaatgaccctgattgtgaggacggctccgatgagtggcctcaaagatgtagaggactgtacgtgtttcagggagatagctctccttgttccgcctttgaatttcattgtctgtccggagaatgcatccacagctcatggcgttgtgacggtggaccggactgtaaggacaaaagtgatgaagagaactgcgctgtcgccacctgccgtcctgatgaattccagtgctcggacggaaattgtatccatggaagtcgacagtgtgatagagaatacgactgtaaggatatgtcggacgaagtgggttgtgtgaacgtgaccctgtgcgagggaccgaataagtttaagtgccactccggagagtgtataaccctggataaggtgtgcaacatggcacgggattgtagagactggtccgatgaaccaattaaggaatgtgggaccaatgaatgtctcgacaataacggtggatgttcacatgtgtgtaacgagttgaaaatcgggtacgagtgtctgtgcccagatggattccaattggtcgcacagagacggtgtgaggatatagatgagtgtcaagaccccgacacgtgttcgcagctctgtgtgaatctcgagggaggatacaagtgccagtgtgaagaaggatttcagctggatccgcataccaaagcctgtaaggcagtcggttcgatagcctacctctttttcactaaccgccacgaagtcagaaagatgactcttgatcgctcagaatacacttcactgatcccaaatttgcgcaacgtggtcgcccttgacacggaagtcgccagcaacagaatttactggtccgacctcagccagcggatgatttgtagcacccagctggatcgagcacacggggtgagcagctatgatacggttatctcccgagacattcaggcaccagatggcctcgcagtcgattggattcattcgaacatctactggaccgactcggtgctgggcactgtgagcgtggcggataccaagggggtgaaacgcaaaactctttttcgggaaaatggatcgaaacctcgggcaattgtcgtggatcctgttcacggtttcatgtattggactgactggggtacccccgcaaagatcaaaaagggaggtctgaacggagtcgacatttactcgcttgtcaccgagaacattcaatggccaaatgggattactcttgacctcctctcaggtagactgtactgggtggattctaagctgcattcaatttcgagcatcgatgtgaacgggggtaacagaaagaccatacttgaagatgagaagcgcctggcacatcctttttccctggccgtgttcgaagataaggttttctggactgacataatcaatgaagcaatattctccgcaaacagactcaccggatccgacgtcaacttgctggcagaaaacttgctcagcccggaggacatggtgctctttcacaatctgactcaaccaagaggcgtgaattggtgtgaaaggactacgctgtcaaatgggggatgtcagtacctttgtttgccggccccccagattaaccctcattccccaaagtttacctgtgcatgccctgatggaatgttgctcgcccgagatatgcgctcgtgtcttaccgaggcagaggcagcagtagctactcaggaaacttcaaccgtccggcttaaggtgtcgtcaaccgctgtccggacgcagcataccactactagacctgtgccagatacctcccggctgcctggagccacccccggactgactactgtggaaattgtgactatgtcccatcaagccctgggcgacgtggcgggtaggggcaatgaaaagaagccatcgtcggtgcgcgcactgtctatagtgctgccaattgtgctccttgtgtttctttgtctgggagtctttctgctttggaagaattggaggctgaagaacattaactcaattaactttgacaatcctgtgtatcaaaagactaccgaggacgaagtgcatatttgtcataaccaagatggatacagctacccctcaagacagatggtttcactggaagatgacgttgcg

SEQ ID NO: 15978 - DNA, 2580 bp, synthetic construct
  misc_feature 1..2580: note = source = /note="Description of Artificial Sequence: Synthetic coding sequence"
  source 1..2580: mol_type = other DNA
atgggcccctggggctggaagcttcgctggaccgtagctctgttgctggccgccgctgggaccgcagtgggagacagatgtgagcgcaatgagttccagtgtcaggacggaaagtgcatatcctacaaatgggtatgcgacggcagcgccgagtgccaggatggcagtgacgagtctcaggagacatgcctgtctgtgacctgcaaaagcggcgatttttcttgtggtggcagggttaacaggtgtattccacaattttggcgctgcgatggccaagtggattgcgataacggttccgatgaacagggctgcccccccaaaacatgcagccaggatgagttccggtgtcacgatggtaaatgcataagccgacaatttgtctgcgactccgaccgcgattgtctggacggcagcgacgaggcctcctgtcctgtgttgacatgtggacctgcctcatttcaatgtaacagctccacctgtatcccacagctttgggcttgcgataatgacccagattgcgaggacggctccgatgaatggcctcaaaggtgtaggggtctttacgtgtttcaaggggatagctcaccttgcagcgcatttgaatttcattgtctgagcggggagtgtatccatagtagttggaggtgtgatggtggacccgattgcaaagataagagcgatgaggaaaactgtgcagttgccacctgtcggccagacgaattccagtgtagcgacggtaattgtatccacggcagtcggcagtgcgaccgcgagtacgattgcaaggatatgtcagacgaagtaggctgtgtaaatgttaccttgtgcgaggggcccaacaagtttaagtgtcactcaggggaatgcattaccctcgataaggtgtgcaacatggccagagattgccgggactggagcgatgaacccattaaggagtgtgggaccaacgaatgcctggacaataacgggggatgctcccacgtatgtaacgaactgaagattggctacgagtgcctgtgtcctgacggcttccagctggtcgcccagcggagatgcgaggatatcgacgagtgtcaggatccagacacatgcagccagctgtgtgttaacctcgagggcggctataaatgccagtgtgaagaggggttccagctggatcctcacacaaaggcctgcaaagctgttggatctattgcttatctcttcttcaccaacagacatgaggtgcggaaaatgacactggataggagcgaatacacgtccctgatccccaatctgcggaacgttgtggcactggacacagaggtagcttcaaaccggatctactggtccgacttgtctcagaggatgatctgcagcacgcagctggatcgggctcatggggtcagtagctatgatacagtgatctctagggacatccaggccccagatggacttgctgtcgactggatccactccaatatatattggactgatagcgtgctgggaacagtttctgtggccgacaccaaaggagtcaaaaggaagacactgtttcgagaaaacggaagcaaaccgcgagccatcgtagtggaccccgtgcacggttttatgtactggacagactgggggacaccagcaaaaattaagaaggggggcctcaatggggtcgacatttattcactcgtgaccgagaacatacaatggccgaacgggattacactggacttgctgtcaggacgactgtattgggtggacagcaagctccatagcatatccagtattgacgtgaacggcgggaaccgcaaaaccatcctcgaggacgaaaagcgactcgctcatccattttcactggcggtgttcgaggacaaggtgttttggacggacataatcaatgaagctatcttctccgcaaataggcttacaggctctgacgtcaatctgctggccgagaatcttctctcaccagaagacatggtcctcttccataacttgacacagcctcggggcgttaattggtgcgaaagaacaacgctttctaacgggggatgtcagtacttgtgcctgcctgcacctcagatcaatccccatagtccaaagttcacatgtgcatgtcctgatggtatgctcctcgcccgggacatgaggtcatgtctcactgaggctgaagctgcagtggctacccaagaaacgagtacagtgcgactgaaggtgtcctcaacagctgtccgcacacagcatacgacaacaaggcctgtccctgacacaagcagactgccgggtgctacgccaggactgaccacggtagagattgtgacaatgtctcaccaggccctgggggacgtggctgggcgcggcaatgaaaagaagccaagcagcgtgagagccctgagcatcgtcctgcccatcgttctcctggtgttcttgtgtttgggcgtcttcctgctttggaaaaactggagacttaagaatatcaacagtattaattttgataaccctgtataccagaagactacagaggatgaggttcacatatgtcacaaccaggacggttacagttacccatcccgacagatggtcagtctcgaggatgacgtcgcc

SEQ ID NO: 15979 - DNA, 2580 bp, synthetic construct
  misc_feature 1..2580: note = source = /note="Description of Artificial Sequence: Synthetic coding sequence"
  source 1..2580: mol_type = other DNA
atggggccttggggctggaagctgcgctggaccgtggcgctcctgctggccgcagccggcaccgcagtgggagatcgctgcgaaagaaacgaatttcaatgccaggacggtaagtgcatttcgtacaagtgggtgtgcgatgggagcgcggagtgtcaggacggttcggacgaatcacaggaaacctgcttgtcggtgacgtgcaaatccggagatttcagttgtggtggccgcgtgaatcggtgcatccctcaattctggcgctgtgatggccaagtggattgcgacaacggatcagacgaacagggttgccctcccaagacgtgctcgcaagacgagtttaggtgccacgatgggaaatgcatcagccgccaattcgtctgcgactccgatagagactgcctggacggatctgatgaggcttcatgcccagtgctgacctgcggaccggcctcgttccagtgcaactcgtccacttgtatcccccagctgtgggcctgcgataacgacccggactgcgaggacggaagtgacgaatggccgcaacgctgccgaggactgtacgtgttccagggtgatagctctccgtgtagcgccttcgaattccattgcctgtcgggcgagtgtatccactcaagctggcggtgcgatggggggccagattgtaaagacaaatcagatgaggagaattgcgccgtcgcaacctgccgccccgatgagtttcagtgtagcgacggcaattgtatccacggatcacggcagtgcgaccgggaatacgactgcaaggacatgtccgatgaggtcggctgtgttaacgtgactctgtgcgaaggtcctaacaagttcaagtgccattcgggagaatgcatcaccctcgacaaagtgtgcaatatggcaagagactgtcgcgactggtcggacgaaccgatcaaggagtgcggaaccaatgaatgcctcgacaataatggcggatgcagccacgtctgcaatgaacttaagatcggatacgaatgcttgtgccccgatgggttccaactggtggcccagaggaggtgtgaagatatcgatgaatgtcaggacccggacacttgctcgcagctctgcgtgaacctggaaggagggtacaagtgccaatgcgaggaggggtttcagcttgacccccataccaaggcgtgcaaggctgtcgggtccatcgcctacctgtttttcactaacagacatgaggtgcggaagatgactctggaccgcagcgaatacacgtccctgatcccaaatctccgtaatgtggtggcattggacacggaagtcgcgtcaaacagaatttactggtcggatctgtcgcagagaatgatctgctcaacccagctcgatcgggctcacggcgtgtctagttacgacactgtgatttccagggatattcaagcgccggatggactcgcagttgactggatccactcaaacatctactggaccgattccgtcctgggcaccgtgtccgtggcagacaccaagggtgtgaaaaggaaaactttgtttagggaaaacggatctaagcctcgggcgatcgtggtcgacccagtgcacgggttcatgtactggaccgactggggcactccggcgaaaatcaaaaagggcggactgaacggagtagatatctattcgttggtgactgagaacatccaatggccgaacggaatcactctcgacctgctgtcagggcggctctactgggtagattcaaaacttcacagcatcagttcgattgacgttaatggagggaaccgcaagacgatactggaagatgaaaagagactcgctcatccattctccctcgcggtgttcgaggataaagtgttctggaccgacatcatcaacgaagcgattttcagcgccaaccggctcacgggaagcgacgtcaacctgctggctgagaacctgctgtcgccagaggacatggtgcttttccataacttgactcagcctagaggagtgaattggtgcgagcggaccaccctgtctaacggaggctgtcaatacctctgtctcccggccccacagataaacccgcactccccgaaattcacttgtgcctgtccggacggcatgcttcttgcacgcgacatgcgctcttgcctcaccgaagccgaggcggctgttgccactcaggaaaccagcactgtccggctgaaggtgagctctactgccgttcgcacccaacacaccaccacccgccctgtcccagatactagccgtctgccgggagccaccccgggactcactactgtggaaatcgtcaccatgtcacatcaggcactgggggacgtggcgggacggggaaacgaaaagaagccgtcgtcagtgcgcgctctctccatcgtgctgccgatcgtcctgctcgtgtttttgtgcctgggtgtgttcctcttgtggaagaattggagactgaagaacatcaattcaattaacttcgataacccagtctaccaaaagaccactgaggacgaagtacacatctgccataatcaggacggatacagctatccctcgaggcagatggtttcccttgaggacgatgtcgca

SEQ ID NO: 15980 - DNA, 2580 bp, synthetic construct
  misc_feature 1..2580: note = source = /note="Description of Artificial Sequence: Synthetic coding sequence"
  source 1..2580: mol_type = other DNA
atgggaccttggggatggaagctgagatggactgtggcactgctgctggccgcagcgggaaccgccgtgggcgatcgctgtgagagaaatgagtttcagtgtcaagatgggaaatgtatttcatataagtgggtgtgtgatggctcggctgaatgtcaggacggatccgatgaaagccaggaaacctgcctgtcggtcacttgcaaatccggcgatttcagctgcgggggacgtgtgaatagatgtatcccacaattctggagatgtgacggtcaggtcgactgcgataacggttcggacgagcagggctgcccacctaagacctgttcgcaagatgagtttaggtgccatgatggtaaatgcatttcgagacaatttgtgtgcgattcggaccgggattgtctggatggttcagatgaagcgtcgtgtcccgtgctgacttgcggtccagctagctttcagtgtaacagctccacctgtattccacaactctgggcatgtgataacgatccggactgcgaggacggatctgatgaatggccccaaaggtgtaggggactgtacgtgttccaaggagattcctcgccttgttcggcattcgagttccattgtctgtccggcgagtgtattcattcctcatggcggtgtgatggcggtccggattgcaaggataagtccgatgaagaaaactgtgccgtggcgacttgtcgtcctgacgaatttcaatgttccgatggaaattgtatccacggttcgagacaatgcgacagagagtacgactgtaaagacatgtcggacgaagtgggatgtgtgaacgtcaccctttgtgaagggccgaacaaattcaagtgtcactccggcgaatgtatcactctcgataaggtgtgtaatatggcccgagattgtagagattggtctgacgaacccatcaaggaatgcggaactaacgaatgtttggataacaacggaggatgttcgcatgtgtgcaacgaacttaagattgggtatgaatgcctctgccccgatgggttccagcttgtggcacaacgccggtgcgaagatatcgatgaatgtcaagatcctgatacctgcagccagctgtgtgtgaacctggagggaggttataagtgccagtgtgaggaagggttccaactcgatccacatactaaggcctgcaaggcggttgggtcaattgcatacctgtttttcaccaatcgccatgaggtgcggaagatgaccctcgatagatcggagtacacctctcttattccaaatcttaggaacgtggtggccctcgatactgaggtcgcatcgaaccggatttactggtccgatctcagccaaaggatgatctgctccactcaactggatcgcgcacatggggtcagctcctacgataccgtgataagccgtgacattcaagcaccagacgggctcgcagtcgactggatccattcaaacatatactggaccgactccgtgctgggaaccgtctcagtggcggataccaagggtgtgaagaggaaaacgttgtttagagaaaacggatcgaaaccccgagcaattgttgtggaccctgtgcatggtttcatgtactggacggattggggaaccccagcaaagatcaaaaagggagggctcaacggagtggatatctacagcctggtgaccgaaaacattcaatggccaaacggtataactctggatctgctgtccggtaggctgtactgggtcgactccaagctccatagcatctcgtccatagatgtgaacggcggaaatagaaagactattttggaagatgaaaagaggctggcacaccccttctcgctggccgtctttgaggacaaggtcttttggactgacatcataaacgaagcgatcttctcagctaaccgactgactgggagcgatgtgaaccttttggcagaaaacctgcttagcccagaagatatggtgctcttccacaaccttacccaaccacggggggtcaattggtgtgagagaactaccctgtcaaacggtggatgtcagtacctgtgtctgcctgcacctcagattaacccgcactctccaaaattcacgtgtgcatgccccgacggaatgcttctggcaagggacatgaggtcctgcctgaccgaagcagaagccgcagtcgcaacccaagagactagtaccgtgcgcctcaaggtttcgtcgaccgctgtgcggacccaacataccaccactcgtccagtgccagacacttcgcgccttccgggtgcaaccccaggccttactactgtggaaatcgtcactatgagccatcaagcgctgggagatgtggcagggagaggaaacgaaaagaagccctcctccgtgagagccctgtcgattgtgcttcccatcgtgctgcttgtattcctgtgcctgggagtctttcttttgtggaaaaactggcgtctcaaaaacatcaactcaataaactttgacaatccagtgtaccagaaaacgactgaagatgaagtgcacatttgtcacaatcaagatggatacagctacccatccaggcaaatggtgagcctcgaggatgacgtggca

SEQ ID NO: 15981 - DNA, 2580 bp, synthetic construct
  misc_feature 1..2580: note = source = /note="Description of Artificial Sequence: Synthetic coding sequence"
  source 1..2580: mol_type = other DNA
atgggaccgtggggatggaaacttagatggactgtcgcactgctgctggccgcggccggaaccgcagtgggtgatagatgtgaacgcaacgaatttcagtgtcaagatggcaagtgcatatcatacaagtgggtctgtgatggatcagccgaatgtcaagatgggagcgatgaaagccaagaaacctgcctgagcgtcacttgcaagtccggtgacttttcgtgcggtggaagagtcaaccggtgcatccctcagttttggcggtgtgacggacaggttgattgtgataatggttccgacgaacagggctgtcctcctaagacgtgttcacaggatgaatttagatgccacgatggtaagtgcatttcgagacaatttgtgtgcgattccgacagagactgcttggatgggtccgacgaagcatcatgtcccgttctgacctgcgggccagccagctttcagtgcaattcctcgacctgcatcccccagctgtgggcatgtgacaacgatcctgactgcgaagatggatcagatgagtggccgcaacgttgcagagggctgtacgttttccaaggggactccagcccatgtagcgccttcgagttccattgcctgagcggcgaatgcatacattcgtcgtggcgatgtgacggaggtcccgattgcaaagacaagagcgacgaagaaaactgtgcagtggccacctgccgcccggatgaatttcaatgttccgatggtaattgtattcacggatcacgacagtgtgatcgcgagtacgattgtaaggatatgagcgacgaagtgggatgcgtgaacgtgactctctgtgaaggaccaaacaaattcaagtgccattccggggagtgtatcacccttgacaaggtgtgcaacatggcaagagactgtagagattggtccgatgagcccattaaggaatgtggaaccaacgagtgtttggataacaatggcggatgctcccatgtgtgtaacgaacttaagatcggatacgagtgtttgtgtcccgacggatttcaacttgtggcccagcgtcgctgtgaggacatcgatgaatgccaggacccagatacgtgctcacaactttgtgtcaacctcgaaggcggttacaagtgccagtgtgaagaaggttttcaactggacccgcatactaaagcctgcaaggcggtggggtccattgcttatcttttcttcaccaatagacacgaagtgagaaagatgaccctggatcgaagcgaatacaccagccttattccgaatttgcgcaatgtcgtcgcgctggatactgaagtggcctccaacagaatctattggtcagatcttagccaaagaatgatttgcagcactcagcttgatagggcacacggtgtctcctcgtacgacaccgtcataagccgtgatattcaggccccggatgggctggctgtggactggatccactcaaacatatactggacggactctgtcctgggtactgtctctgtggcagataccaagggagtcaaaaggaaaaccctttttcgcgagaacggcagcaagccccgcgcaatcgtggtggatccagtacacggtttcatgtactggaccgactggggtacccctgctaagatcaagaagggagggcttaatggagtggatatctactcgcttgtgaccgaaaacattcaatggccgaacggcattaccctggacctgttgtccggtaggctgtactgggtcgactccaagctgcactcaatcagcagcatcgatgtgaacggagggaatcggaaaaccattcttgaggatgaaaaaaggctggctcatccgttttcacttgcagtctttgaggacaaggtcttttggaccgacattatcaacgaggcaatctttagcgcgaatcggcttactggaagtgatgtgaacctgcttgccgaaaaccttttgtccccagaagatatggtcctgttccataatctgacccagcctcgcggtgtcaactggtgtgagcgcacgactctttcaaatggcggatgtcagtacctgtgcttgccagcccctcagattaatcctcattcgccaaaattcacttgtgcgtgccctgatggaatgctcctggcacgcgatatgcgctcctgtctgactgaggcagaagcagcagtggcgactcaagagacgtcgacggtcagactcaaagtgagttccacggcggtgaggacccagcatactaccacccgccctgtgcctgatacctccaggctgcctggtgccactcctggactcaccactgtggagatcgtgactatgtcgcaccaggcactcggtgacgtcgcaggccggggcaatgagaaaaagccatcttccgtgcgcgcactctccatcgttttgcctattgtgcttcttgtgtttctgtgtctgggtgtgttccttctctggaaaaactggcgcctgaagaacattaactcaattaactttgataatcctgtgtatcaaaagacgactgaagatgaagtgcacatctgtcataatcaagatggatacagctacccatcgcggcaaatggtgtcccttgaagatgacgtggca

SEQ ID NO: 15982 - DNA, 2580 bp, synthetic construct
  misc_feature 1..2580: note = source = /note="Description of Artificial Sequence: Synthetic coding sequence"
  source 1..2580: mol_type = other DNA
atgggcccttggggatggaaactgcgttggaccgtggccctcctgttggcggccgccggaaccgcggtcggtgatcggtgcgaaaggaacgaatttcaatgccaggatggaaaatgcatatcatacaaatgggtctgtgacggttcggcagaatgccaggacggttcagacgagtcacaggaaacctgcctgagcgtcacttgcaagtccggagatttctcttgcggaggccgcgtgaatcggtgcattccgcagttttggcgctgtgacgggcaggtcgactgtgataacggatctgacgaacaaggctgtccccctaaaacttgtagccaggatgagttccgctgccacgacggaaagtgcatctcgcgacaattcgtgtgtgacagtgatagagactgccttgatggaagtgacgaggcatcctgccctgtgttgacctgcggcccggcttcgttccaatgcaactcgagcacttgcatcccacagctctgggcctgcgacaatgacccggactgtgaagatggttcggacgagtggccacagcgctgccggggactctacgtctttcagggagatagttctccttgttcagctttcgaatttcactgcctgtccggagaatgtatccactcctcgtggcgctgcgacggcggaccggactgcaaggataagtcggacgaggagaattgcgcagtagcaacgtgtagaccggatgaatttcagtgctccgatggaaattgcatccacggctcgaggcaatgtgaccgtgagtacgactgcaaggacatgtcagatgaagtgggctgtgtcaatgtgactctgtgcgaaggaccgaataagttcaaatgccactcgggagagtgcatcactctggacaaggtgtgcaacatggcccgcgattgtcgtgattggagcgatgaaccaatcaaagagtgcggaaccaatgaatgtttggacaacaacggcggttgctcacatgtgtgtaatgagctgaaaataggatacgaatgtctgtgcccagacggcttccagcttgtcgcccagagaaggtgcgaggatatcgacgaatgccaagacccagacacctgcagccaactgtgcgtgaaccttgagggcggatacaagtgccagtgtgaagaaggtttccagctggatccgcataccaaggcatgcaaggctgtgggttcgatcgcgtacctcttcttcacgaaccggcacgaagtgcgcaagatgaccctcgaccggtcagaatatacctcgcttatcccgaacctgcgcaacgtggtggctctggatacggaagtggcgagcaaccggatttactggagcgacctgtcgcagcggatgatatgttcgacccagcttgaccgcgcccatggcgtgtcatcgtacgacaccgtcatctcaagagatatccaagctccggacggcctggctgtggactggatccactccaacatttactggacggattccgtgttgggaactgtgtccgtggctgatactaaaggtgttaagaggaaaactctgttcagagaaaacgggtcaaagcctcgcgcgatcgtggtggacccggtgcatgggttcatgtactggactgactggggtacgccggcaaagatcaaaaagggcggactcaacggagtggacatttactccctcgtgactgagaacatccagtggccgaacggaatcactctggatcttctctccgggcggctgtactgggtggacagcaagctccactcgatctcctccattgatgtgaatggtggtaacagaaagactatcctggaggacgaaaaacgactggcccatccattctcactggcggtgttcgaagataaagtgttttggactgacattatcaacgaggcgatcttctccgccaatcgcctgactggtagcgacgtcaacttgcttgctgagaacctcctgtcaccggaagatatggtactgtttcataacctgacccaaccaaggggagtgaactggtgcgagagaaccactctgtccaacggaggctgccagtacctctgcctcccagcaccacagatcaacccccactccccaaagttcacctgcgcgtgccctgacggcatgctcctcgcccgggacatgagaagctgcctgactgaggcagaagccgcggtggccacgcaggagacgtccacggtgcggctcaaggtgtcatcgaccgctgtgcggacccaacataccaccacgcggcccgtgccggacacttcgcgactcccaggagccaccccgggcctgactaccgtggagatcgtgaccatgagccaccaggctcttggtgacgtggcagggcgggggaatgagaaaaagccgagcagcgtgcgcgcactgtccatcgtgctccctatcgtcctcctggtgtttctctgcttgggcgttttcctgctttggaagaattggcggctgaagaatatcaattcgatcaacttcgacaaccccgtctatcaaaagaccactgaagatgaggtgcatatctgccacaatcaagacggatactcctacccttcgagacagatggtgtctctcgaggatgatgtcgca

SEQ ID NO: 15983 - DNA, 2580 bp, synthetic construct
  misc_feature 1..2580: note = source = /note="Description of Artificial Sequence: Synthetic coding sequence"
  source 1..2580: mol_type = other DNA
atgggcccctggggctggaaacttaggtggaccgtggcgctattactcgcggccgcgggaacagcggtgggggatcgatgcgagcgtaacgagtttcagtgccaggatggtaaatgtattagttataaatgggtgtgcgatggtagcgccgaatgtcaggatggttccgacgagagtcaagaaacatgcttgtctgtgacatgcaagtccggggacttctcttgcggcggcagagtgaacaggtgcataccacagttctggcgatgtgatggccaggttgactgcgacaatggatccgatgagcagggctgccccccgaaaacatgtagccaggatgaattccggtgccacgatgggaagtgtatttccagacagttcgtatgcgatagtgatcgggattgcctggacggatccgatgaggccagctgccctgtgctgacatgcggtcctgcatctttccagtgtaattcatcaacttgcatacctcagctgtgggcctgcgataatgatcccgactgcgaagatggttcagacgaatggcctcagagatgccgagggctgtatgtatttcagggggactcttccccttgctcagccttcgagtttcattgccttagcggagagtgtatccatagtagctggaggtgcgatggcggaccagactgtaaagacaagagtgacgaagagaactgtgccgtggccacctgccgaccagatgaattccaatgttctgacggtaattgcatccatgggagtcgccagtgcgacagagaatacgactgcaaggacatgtccgatgaagtgggttgcgtgaatgttactttgtgcgaaggcccaaataaattcaaatgtcattccggcgaatgcatcacactggacaaagtgtgcaatatggcgcgggactgtagggattggagtgacgaacctataaaggagtgtggcactaatgagtgtctggacaacaatggtggttgtagccacgtgtgtaatgaacttaagatcggatacgaatgcctttgtcctgacggatttcaattggtggcccagcggcggtgtgaggacattgatgagtgccaggatcccgacacctgcagtcagctctgtgtcaacctggagggaggctacaagtgtcaatgtgaggagggattccagctggacccccatacgaaggcctgcaaggctgttggttctattgcttacctctttttcaccaatcggcacgaagtgcggaagatgacgctggatcgctcagaatacacgagccttataccgaaccttcggaacgtagtggccctcgataccgaggtagctagcaacaggatttactggtctgatctgtctcagcggatgatttgctctacgcagctggacagggcccacggggtgtcctcctacgatactgtgatcagcagagatatccaggctccggacggactggctgtggattggatccactcaaatatatactggaccgattctgtgctggggacagtatcagtggccgacacaaaaggggtgaaaaggaaaactctcttcagagagaatggcagtaagcctcgggctattgttgttgaccctgtacatggcttcatgtactggactgattggggaacgcctgctaagatcaagaaaggggggctgaacggagttgatatttactccctcgtcacggagaatatccagtggcccaatggcatcactctggacctgctttctggccgactgtattgggtggactctaagctccattccattagtagcatcgatgtgaatggagggaatcgtaagacgatattggaagacgagaaacgcctcgcccaccccttttccctggccgtattcgaggataaagttttctggacagacatcattaacgaggcaattttttccgcgaataggctgacagggtccgacgtaaatctcctggctgaaaacttgctgagtcctgaggacatggtgctgttccacaacctcacgcagcctagaggggtgaattggtgtgaaaggacgaccttgtccaacggcggttgccagtacctctgcctccctgctccacagattaatccacactcacctaagtttacttgtgcctgccccgacggaatgctgctcgctcgcgacatgcggtcttgcctgacagaagctgaagccgcggtggccactcaagagacaagcaccgttagactcaaggtatcaagcaccgcagtgcgaacacagcatacaacgacgcggccggtccccgatacgtccagactccctggagcaactcctgggctaactactgtggaaatcgtgacaatgtcccaccaggcgctgggtgacgtagcagggcggggcaacgaaaagaagcctagctctgtcagagccctgagcatcgtactacccatcgtgcttctggtgtttctatgtttgggagttttcctgctttggaagaattggcgactgaaaaacataaattcaatcaatttcgataaccccgtgtaccagaaaacgacggaagatgaggttcacatctgccataatcaggatggctattcctaccctagtcgacagatggttagtctggaagatgacgtggcg

SEQ ID NO: 15984 - DNA, 2580 bp, synthetic construct
  misc_feature 1..2580: note = source = /note="Description of Artificial Sequence: Synthetic coding sequence"
  source 1..2580: mol_type = other DNA
atgggcccatggggctggaaacttagatggaccgtggcactgcttcttgcagcagctggaactgcggttggagatcgctgtgagcggaacgaatttcaatgtcaagacggaaagtgcatttcatacaagtgggtgtgcgatggttcggcagaatgtcaagatggtagcgacgaatcgcaggaaacctgtctttcggtgacttgcaagagcggtgattttagctgtgggggccgcgtgaacagatgtattccacaattttggagatgcgatggacaggtggactgtgacaatggttcagatgaacagggatgtcctcccaagacctgttcacaagatgaattccgctgccacgatggaaagtgtatctcgcgccaatttgtatgcgacagcgatcgcgattgtctggatggatcggatgaagcctcctgccctgtgctcacttgcggaccggcctcgtttcagtgtaacagcagcacctgtatcccgcagctttgggcatgcgataacgaccctgattgtgaagatggttcggatgaatggccacaaagatgtcggggtctttatgtgtttcaaggagactcgtccccctgctcggccttcgagttccattgtctttcaggggaatgtatccactcgtcctggcgttgtgacggtgggcctgactgtaaggataagtccgatgaagagaactgtgctgtggcaacttgccgccctgacgagttccaatgctccgatgggaattgcattcatggaagccgccaatgcgatagagaatacgactgtaaggacatgtcggatgaggtgggctgtgtcaatgtgaccctctgtgaaggaccaaacaagtttaagtgtcactcgggagagtgtattaccctggataaggtttgtaatatggcaagagattgtcgcgattggtccgatgaacctattaaggaatgcggaactaatgaatgccttgataacaatggtgggtgctcacacgtctgtaacgaactcaagatcggatacgaatgtctttgtcctgatggctttcaattggtcgcgcaacggagatgtgaagatattgatgaatgccaggatcccgacacgtgctcgcaactctgtgtcaacctcgaaggagggtacaagtgtcagtgtgaagaaggttttcagcttgacccacataccaaggcatgcaaggcagtgggaagcattgcatacctgtttttcaccaacaggcacgaggtcaggaaaatgacccttgacaggagcgagtacaccagcctgatcccaaatctgcgcaacgtcgtggcacttgacactgaagtcgcatcgaatcgaatctactggtccgacttgagccagcgcatgatttgtagcactcagctggatagggcccatggtgtctcgagctacgacaccgtgatttctcgtgatattcaggcccctgatggtctggcggtggattggatccactccaacatctactggactgattccgtgctcggaaccgtgtcggtcgctgacaccaaaggagtcaagagaaagacgctttttagagaaaatggctcgaagcctagagctatcgtcgtggatccagtccatgggttcatgtactggaccgattggggtacgccagcaaagataaagaagggtggtcttaacggggtggatatctactccctggtgaccgaaaacattcaatggcccaacggaatcaccctcgatctgctttcgggaaggctgtactgggtggatagcaagctgcactcgatctcctcgattgatgtgaacggaggtaaccgtaagaccattctggaagatgagaaacggcttgcacatcccttcagcttggccgtttttgaggataaagtcttttggaccgacatcataaacgaagcaatattctcggcaaaccgtcttactggtagcgatgtcaacctgttggccgagaaccttctgtctcctgaagatatggtcctgtttcataaccttacccaaccaagaggcgtgaattggtgcgaacgcacgacgctttcaaacggaggatgtcagtatctttgtctgccagcacctcagattaaccctcactcccctaagtttacctgcgcctgtcccgacggtatgctcctcgcacgtgatatgcggtcgtgccttactgaagctgaggcagccgtggctacccaggagactagcaccgttagactgaaggtcagttccactgccgtgagaactcagcacactactacccgaccagtcccagatacgtcgcggctgcccggcgccacccccggacttactactgtggagattgtaaccatgtcacaccaagcattgggtgatgtggccggacgaggaaatgagaagaagccctcctcagtgagggcgcttagcatcgtcctgcctattgtgctcctcgttttcctctgcctcggtgtgttcttgttgtggaagaattggcgtctcaagaacatcaattcgattaactttgataaccctgtgtaccaaaaaactaccgaagatgaagtccatatttgccacaaccaggatggatatagttatccttcccggcaaatggtgtccttggaggacgacgtcgct

SEQ ID NO: 15985 - DNA, 2580 bp, synthetic construct
  misc_feature 1..2580: note = source = /note="Description of Artificial Sequence: Synthetic coding sequence"
  source 1..2580: mol_type = other DNA
atgggaccatggggatggaaactgcgctggactgtggctctgctgctcgccgcggcaggcactgctgtgggtgatagatgcgaaaggaacgagttccagtgtcaggacgggaaatgcatctcgtacaagtgggtgtgtgacggatccgcggaatgtcaagacggatcggatgagtcgcaggagacttgcctgtcagtgacctgcaaatcaggagatttcagctgcggaggaagagtaaatagatgcatcccacaattctggcggtgcgatggacaggttgactgcgataacggctcagatgaacaaggatgcccaccaaaaacctgttcgcaggatgaattcagatgccatgatggtaagtgcattagtcgacaattcgtctgtgattccgatagagactgcctcgacggaagtgacgaagcgtcgtgccctgtcctcacttgtggccccgcttcctttcaatgcaatagctccacctgcatccctcagctgtgggcatgcgataacgacccggattgcgaggacgggtcggacgaatggccgcaaaggtgtagagggctctacgtgttccagggagattccagcccttgttctgcctttgaattccactgcctgtcaggagagtgtatccactcgtcgtggcgttgcgatggcggaccagattgtaaggataagagcgacgaggaaaactgtgccgtggccacctgccggccggacgagtttcaatgtagcgacggcaattgcatccacggttccagacagtgcgaccgcgagtacgactgcaaagatatgtcggatgaggtggggtgcgtcaacgtgaccctttgtgagggtcccaataagttcaagtgccatagcggggagtgcatcacgctggataaagtgtgcaacatggcccgggattgtcgtgactggtctgatgaaccgatcaaggaatgcggcaccaacgagtgtctcgacaacaatggcgggtgctcgcacgtgtgtaacgaactcaagatcggatacgagtgcctttgccccgacggattccagctggtggcccaaagacgctgcgaggacatcgacgagtgccaggacccggacacgtgctcgcagctttgtgtcaacctcgagggcggatataagtgtcagtgtgaagaaggattccagctcgacccgcacactaaggcctgcaaggcagtcgggtccatcgcgtacctcttcttcactaaccgccacgaggtgcggaagatgaccctggacagatcggaatacacctccctgatcccgaatttgcgcaacgtggtggccctggacaccgaagtggcctcgaaccggatttactggtcggacttgtcgcagcgcatgatctgctcaactcaattggacagagcccacggagtttccagctacgacactgtcatcagccgcgacatccaagcgccggacgggcttgcagttgattggatccattcaaacatttactggactgacagcgtcctgggaactgtgtcagtggcagacaccaagggagtcaagcgtaagaccctctttcgcgaaaacggctcgaagccgcgggccatcgtggtggaccctgtgcatggattcatgtattggactgactggggaaccccggccaagattaagaagggaggactgaacggcgtggacatctactcgcttgtaactgaaaacatccagtggcccaatggcatcactctcgacctcctttcgggacgcctctactgggtcgatagcaaactccacagcatctcctccatcgacgtgaacgggggcaatcgaaagacgattctggaggacgaaaaacgcctggcgcatccgttctccctcgccgtgttcgaggacaaggtgttctggacggatatcatcaatgaggcaatctttagcgcaaataggcttaccggatccgacgtgaatctcctggccgaaaatctcctcagcccggaggacatggtattgttccacaatctgacgcagccgcggggggtgaactggtgcgaaaggaccactttgtcaaatggtgggtgtcagtacctttgcttgccagccccgcagatcaacccgcactcaccaaagtttacctgtgcctgccctgacggcatgctgctggcccgcgacatgcggtcttgcctgacggaagctgaggcggctgttgctactcaggaaacctctactgtgcgccttaaggtcagctcgacggcagtgcgcacccagcacactactacgcgcccagtgccagatacctcccggctcccaggtgcgacgcccggcctgaccaccgtcgaaatcgtgaccatgtcccatcaagctcttggagatgtggcgggaagaggaaatgagaaaaaaccctcctccgtcagagctctcagcatcgtgctgccgatcgtgcttctcgtgttcctgtgcttgggggtgtttctgctgtggaagaactggcggctcaagaacatcaattctatcaacttcgataacccggtgtaccaaaaaacgaccgaagatgaggtccacatctgccacaaccaggatggctactcctacccgtcgcggcaaatggtgtcgttggaggatgatgtcgct

SEQ ID NO: 15986 - DNA, 2580 bp, synthetic construct
  misc_feature 1..2580: note = source = /note="Description of Artificial Sequence: Synthetic coding sequence"
  source 1..2580: mol_type = other DNA
atgggaccatggggctggaaactgaggtggactgtcgccctcttgctcgccgccgcaggaaccgcggtgggagatcgttgcgagagaaacgagtttcaatgccaggatgggaaatgcatctcttacaagtgggtttgtgacggctcagccgagtgccaggacggcagcgatgaatcgcaagaaacttgtctgtctgtcacgtgcaaaagcggcgacttctcctgtggagggagagtgaacagatgcattccgcaattctggcgttgcgacggacaggtcgactgcgataacggatccgatgaacagggatgcccacctaagacttgcagccaggatgagttccgatgccatgacggcaagtgtatctcgcggcaatttgtgtgcgatagcgaccgggactgtctggacggctcggacgaagccagctgcccggtgttgacctgcggccccgcctccttccagtgtaattcgtcgacgtgcatccctcagctctgggcgtgcgacaacgatccggactgcgaagatggtagcgacgaatggccacaacggtgccggggtctgtacgtctttcaaggagattcgagcccgtgctcagcattcgagttccactgcctgtcgggcgaatgtatccactcctcgtggcggtgtgacggaggcccggattgcaaggacaagtctgacgaggaaaactgcgccgtcgcgacctgcagacccgatgaatttcagtgttcggacggcaactgcatccacggttcccgccagtgcgatagggagtacgactgcaaggatatgtcggatgaggtcggctgcgtgaatgtgaccttgtgtgaaggaccgaacaagttcaagtgtcacagcggagagtgtatcaccctggataaggtctgtaacatggctcgcgactgccgggattggtcggacgaaccgattaaagaatgcggcacgaacgaatgcctggacaataatggaggatgctcccacgtgtgtaatgagcttaagattgggtacgaatgcctctgtccagacgggtttcaattggtggcgcagcgccggtgcgaggacatcgacgaatgtcaggatccggacacctgctcgcaactgtgcgtgaatcttgaaggtggttacaaatgtcagtgtgaggaaggtttccaactcgaccctcatactaaggcgtgtaaggcggtcggatcaatcgcctatttgttctttaccaaccggcacgaagtgcgcaaaatgaccctggatagatccgagtacacctcgctcatcccgaatttgcgcaatgtggtcgcactcgacactgaagtcgcctctaatcgcatctactggtcggacttgtctcaacgcatgatctgttcaacccagctggatcgagcccatggagtctcgagctacgatactgtgatttcccgggatatccaggctccagatggacttgccgtagattggattcactccaacatctactggactgattcagtcctgggtactgtgtccgtggccgacaccaagggagtgaaacgcaagaccctgttcagagagaacggctcgaagccaagagcaatcgtcgtggatcctgttcacgggttcatgtattggactgattggggaactccggccaagatcaagaagggcggactgaacggagtggacatatacagcctggtgactgaaaacatccagtggcctaatggaatcacccttgacctgctgtcgggcagactgtactgggtggactcaaagctccacagcatatcctccatcgacgtgaacggaggcaaccgcaaaacgatccttgaggacgaaaaaagactggcccacccattctcgttggcggtgttcgaagataaggtcttttggactgacatcatcaacgaagcaatcttctccgcgaaccggctcactggttccgatgtgaatctcctggccgaaaacttgctgagccccgaggacatggtgctgtttcataacctgacccagccgcgcggcgtgaactggtgcgagcgcacgaccctctcaaatggaggctgccagtacctctgcctgccggcaccgcagatcaaccctcatagccctaagttcacctgcgcctgcccggacggaatgttgctcgcgcgggacatgaggtcctgccttaccgaggcggaagctgccgtggctacgcaggagacttcgaccgtgaggctgaaagtctcttctaccgccgtgagaacgcaacataccaccaccaggccggtcccggacacctctcgtctcccgggggcaactcctgggctcaccaccgtggagattgtgactatgtcacatcaagcgttgggagatgtcgccggaagggggaatgagaaaaagccatcgtccgtgcgcgcgctgtcaattgtgttgccgatcgtcctgctcgttttcctgtgtctcggggtgttcctcttgtggaagaactggcgcctgaagaacatcaattcaatcaatttcgacaatccagtgtatcaaaagaccactgaggacgaggtgcacatctgccacaaccaggacggctattcataccccagccgccagatggtgagcctggaggacgatgtcgcc

SEQ ID NO: 15987 - DNA, 2580 bp, synthetic construct
  misc_feature 1..2580: note = source = /note="Description of Artificial Sequence: Synthetic coding sequence"
  source 1..2580: mol_type = other DNA
atgggtccgtggggctggaagttgcgatggaccgtagcgctgctgctcgccgcagcaggaaccgcggtgggagataggtgcgagcggaatgaattccagtgtcaggacggtaaatgcatctcgtacaagtgggtgtgcgatgggtcagcggagtgccaagacggatcggacgaatcacaggaaacctgcctgagcgtgacgtgcaaaagcggcgacttctcatgcggaggccgcgtcaacagatgcattccccagttctggcggtgtgatggacaggttgactgtgataacggtagcgacgaacagggatgtccgccaaagacttgctcccaagacgagttcaggtgtcatgacggtaagtgcatctcgaggcaattcgtctgcgattccgatcgcgactgccttgacggttcggatgaggctagctgcccggtgctcacttgcgggccggcctcattccagtgtaattcgtcaacttgtatccctcaactctgggcttgcgacaacgacccagactgcgaagatggatcggatgaatggcctcagcgttgtagaggactttatgtatttcaaggagactcctctccgtgttcggcattcgagttccattgcctgtcgggagaatgcatccactcatcctggagatgtgacgggggaccagactgcaaggacaagtctgacgaagagaattgcgccgtggctacctgccggccagacgagtttcagtgttcagacggcaactgtatccacggctcaaggcagtgcgaccgcgagtacgactgcaaggatatgtccgatgaagtcggatgcgtcaacgtgaccctgtgtgaagggccaaacaagttcaagtgccattccggcgaatgcattacgttggataaggtgtgtaacatggcccgagactgcagagattggtccgacgaaccgattaaggagtgtggaacgaatgaatgcctggacaacaacggtgggtgttcccacgtgtgcaatgaactcaaaatcgggtacgaatgcctctgtcccgacggatttcagctggtggcacaacgccgctgtgaggacatcgacgagtgccaggaccctgacacttgctcgcagctgtgcgtgaatctggaaggcggatacaagtgccagtgcgaagagggcttccagcttgaccctcatactaaagcatgtaaggcagtcggatccatcgcttacctcttcttcactaacagacatgaggtcagaaagatgacccttgacaggagcgaatacacgtctctgatcccgaaccttcggaatgtggtggcactggatactgaagtcgcctcgaatcggatttactggtccgacctgtcccagcggatgatctgcagcacccaactggatcgtgcccatggcgtctcttcctacgacactgtaatctcccgcgatattcaggcccccgatggtctggcggtggactggatacactcaaacatctactggacggatagcgtgctcggaaccgtgagcgtcgccgacaccaagggagtgaagcggaaaaccttgttccgcgaaaacggatcgaagccgcgggccatcgtcgtggacccggtccacgggttcatgtattggactgattgggggactcctgcgaaaatcaagaagggcggactgaacggggtggatatctactccttggtgaccgagaatatccaatggccaaatggcatcacccttgacctgctcagtgggcggctttactgggtggatagcaaactgcacagcatttcctcaattgatgtgaacggaggaaaccgcaagaccatcctcgaagatgaaaagcggctggcgcacccgttctcactggcggtgttcgaagataaagtgttctggacggatatcatcaacgaggccatcttttccgccaatagactcaccggcagcgatgtgaacctgttggccgagaatttgttgagcccggaggacatggttctcttccacaacctgacgcaaccgagaggagtgaactggtgcgagagaactaccctgtccaacggcggttgccaatacctctgcctgccagccccgcagatcaacccacactcgcctaaattcacttgcgcctgtccagacggaatgttgctggcgcgggacatgcgctcgtgcctgaccgaagctgaagcggctgtcgcaactcaggaaacttcgaccgtgcgtctcaaagtatcgtcaacggccgtccggacgcagcacactactacccgaccggtgccagacacctcccggctgccgggagcaacccccggccttactactgtcgagatcgtgaccatgtcgcatcaagccctcggagacgttgctggaagaggaaacgagaagaagcccagcagtgttcgtgccctctcaattgtgctgcccatcgtgctgctcgtgtttctgtgcctcggagtctttctcctgtggaagaactggcgcctgaagaatatcaatagcatcaactttgataatcctgtttaccaaaaaaccactgaggatgaggtccatatctgccacaaccaagacggctactcgtacccttctcgccagatggtgagccttgaagatgatgtcgcg

SEQ ID NO: 15988 - DNA, 2580 bp, synthetic construct
  misc_feature 1..2580: note = source = /note="Description of Artificial Sequence: Synthetic coding sequence"
  source 1..2580: mol_type = other DNA
atgggtccatgggggtggaaacttaggtggacggtcgcactgcttctggcggccgcaggaactgcagtgggggataggtgtgaaagaaatgagttccagtgtcaagatggtaagtgcatttcatacaagtgggtgtgcgatggaagcgccgaatgtcaagacggctccgacgagtcccaggagacttgtctctcggtgacgtgcaagtcaggagatttctcttgcgggggaagggtgaacagatgcatacctcaattttggcgttgcgatggtcaggtggattgtgataacggaagtgacgaacaagggtgtcctccaaagacttgttctcaggatgagtttagatgccatgacggcaagtgtatttcgagacaatttgtgtgcgatagcgatagagattgcctcgacggatcagatgaagcaagctgtcctgtcctgacgtgcggccccgcttcctttcaatgcaactcgtctacttgtattccgcagctgtgggcgtgtgataacgatcccgattgtgaggacggttcggatgaatggccacagcgttgtcgggggctgtacgtctttcagggcgattcctcgccatgctccgcgttcgaattccattgcctgtcaggagagtgcatccattccagctggcggtgcgatggtggccctgattgcaaggacaagtcagatgaggagaactgtgcagtcgcaacgtgcaggccggatgagtttcaatgttcagacggtaattgcatccatggatcccggcagtgcgatcgcgagtacgactgtaaggatatgtcagatgaagttggatgtgtcaacgttaccctgtgtgaggggcctaataagtttaagtgccatagcggggagtgtatcaccctggacaaagtatgtaacatggcacgagattgtcgggactggagcgatgaacctatcaaggagtgcggaaccaatgagtgtcttgataacaacggtggatgctcccatgtgtgtaatgaactgaagattggctatgaatgtctttgccctgatgggtttcagttggtcgcacagcggaggtgtgaagatatagacgagtgtcaggatcccgatacttgtagccagctgtgtgtcaacctggaaggaggatataagtgtcagtgcgaggaaggattccagcttgacccccatactaaagcatgtaaggctgtgggatccattgcctacttgtttttcactaaccggcacgaagtcagaaaaatgactcttgatagaagcgagtacactagtcttattccaaaccttcggaatgtggtcgcactggatacggaagtggcatccaatcgcatctattggtccgatctttctcaacgtatgatttgttcgactcagctcgaccgagcacatggagtgagcagctacgacactgtgattagccgcgatattcaagcccctgatggtcttgctgtggattggattcatagcaacatttactggaccgacagcgtgcttggtactgtctcggtggcagacaccaagggggtcaaacgtaagaccctgtttcgagaaaatgggagcaaaccacgagcaatagtggtggatcctgtgcatggatttatgtactggaccgattggggcaccccagcgaagataaagaagggaggcctcaacggtgtggacatttactctctggtgactgagaatatccagtggccaaacggtattaccctggatctcctttcggggagactctactgggtcgattcaaaactccactctatttcgagcatcgacgtgaatggcggaaatcgaaagactattcttgaagatgaaaagcgcttggcacacccatttagccttgctgtattcgaagataaggtgttttggactgacattatcaatgaagcaattttctccgccaatcgtctgactggttccgatgtcaacctgcttgccgaaaacctcctttcacccgaggacatggtgctttttcacaatctcacccagcctagaggggtgaactggtgcgaacggactactctgtcgaacggcggatgtcagtacttgtgtctccccgctccccagatcaacccacatagcccaaagtttacttgtgcatgtcctgacgggatgctgcttgcccgcgatatgcgcagctgcctcaccgaagctgaagcagcagtcgcaactcaagaaacctctactgtgcgcctcaaagtgagctccaccgcagttcggactcagcacactaccactcgccctgtgccggatacctcccggctgccaggcgcaacgcctggtcttactacggtcgagatcgtgactatgtcacatcaagcactgggggatgtggccggaaggggaaacgaaaagaaaccgtccagcgtgagagcactttccattgtcctccccatcgtgcttctggtctttttgtgtctgggtgtgtttcttctgtggaagaattggagactcaagaacattaactcaattaacttcgacaaccctgtctaccaaaaaaccactgaagatgaagttcacatatgccacaaccaggatgggtactcatacccttcgagacagatggtgtcgctcgaggacgatgtggca

SEQ ID NO: 15989 - DNA, 2580 bp, synthetic construct
  misc_feature 1..2580: note = source = /note="Description of Artificial Sequence: Synthetic coding sequence"
  source 1..2580: mol_type = other DNA
atgggtccttggggatggaaactcaggtggaccgtggccctattactagctgccgccgggaccgccgttggcgatcgttgtgagagaaatgaattccagtgtcaggacggaaaatgtatcagctataaatgggtgtgtgacggcagcgcagagtgtcaggacggttctgatgagtcacaggagacatgtctctccgtgacatgcaaatctggggacttcagttgtggcggccgcgttaatcggtgtataccgcaattctggcgatgcgacgggcaggtcgactgcgataatgggagcgacgaacaggggtgccctcctaagacatgctcccaagacgaattccgctgtcacgacgggaaatgcatttcacgtcagtttgtatgcgacagtgatcgggactgtttggatggctccgatgaggccagttgtccagtgctcacctgtggccccgcttcatttcagtgtaacagctctacttgcatcccacagctgtgggcgtgcgacaatgatccagattgtgaggacggttccgatgaatggccacagagatgccgagggctgtacgtgttccaaggggactcgagcccatgtagcgcctttgaatttcattgtttaagcggggaatgcatccatagctcatggcgctgcgacggcggtcccgattgcaaggacaagtcagatgaggagaattgcgccgtggcaacatgccgccccgatgagtttcaatgctccgacggcaattgcatacacggttcgaggcaatgcgaccgcgaatacgactgcaaagacatgtctgacgaggtggggtgtgtcaacgtgaccctgtgtgaagggccgaataagttcaaatgccactcaggagagtgtatcacactggataaggtgtgcaacatggctcgggactgccgcgattggtctgacgagcctattaaagaatgcggaaccaacgaatgtctggacaacaacggggggtgctcacacgtgtgcaacgaattaaagatcggttacgaatgtctgtgccctgacgggtttcagctggtggctcagagaaggtgtgaagacatagacgaatgccaggaccccgacacttgctcacagctgtgcgttaacctggagggtggctacaagtgtcagtgcgaggagggattccagctggatcctcacactaaggcatgcaaggcggtaggcagtattgcctacttatttttcaccaatcggcacgaggtgcggaaaatgaccctcgaccggtccgagtacacctccctgatacctaatcttcgcaacgtggtcgcactggataccgaggtggcaagtaataggatctactggagtgatctgtcccaacgaatgatttgttccacacaattagatagggctcacggtgtgagctcctacgacacagtgatttctagggacatccaggcacccgatggcttggccgtggactggattcattctaacatctattggacagattctgtccttgggacagttagtgttgccgacactaaaggagtaaagcggaagaccttatttagggaaaacggcagtaaaccaagggcaatcgtggtggatccagtgcacgggtttatgtactggaccgactggggtacaccggctaaaattaagaaaggtggtctgaacggggtcgatatttattccttagtgaccgagaatattcaatggccgaatggaatcaccctcgatctgctgtcggggcggctgtactgggtcgattcaaagctacattcaatctccagcatcgacgtgaacggagggaataggaagaccattctagaggatgagaaacgtctggcacatcccttctccctcgcagtattcgaagataaggtgttctggacagacatcataaacgaggctattttctccgcgaacagactgacaggaagcgatgttaaccttctggcagaaaatctactaagtcccgaggacatggtcctattccacaatcttacacagcctcgaggcgtcaactggtgcgaacgaaccacattgtcaaacggtggttgccagtatctgtgcctccctgctcctcagattaacccccacagccccaagttcacctgcgcttgccctgatgggatgctgctggccagggatatgcgctcttgtctgaccgaagccgaagccgcggtagccacacaggaaacatcaaccgttcggctgaaagtaagttcaactgccgtccgcacacagcacacaacaactaggccagtgcctgatacgtctcgcttacccggagctacaccaggacttaccacagtggaaattgtgaccatgagccaccaggctctgggagatgtggcaggaagaggaaacgagaaaaagcccagttctgtgagagccctaagcatagtgctgcccattgtactattggtgtttctgtgccttggcgtattcctactttggaaaaattggaggctgaagaatattaattctatcaactttgataaccccgtctaccaaaaaacgaccgaagacgaggttcacatctgtcataaccaggacgggtattcctacccctctcgccaaatggtgtcactagaagatgacgttgcc

SEQ ID NO: 15990 - DNA, 2580 bp, synthetic construct
  misc_feature 1..2580: note = source = /note="Description of Artificial Sequence: Synthetic coding sequence"
  source 1..2580: mol_type = other DNA
atgggaccatggggctggaagttgcgctggactgttgcccttttgctggctgcagctggaactgccgtgggagacagatgtgaaagaaacgagtttcagtgccaggacggaaaatgtatcagctacaagtgggtttgtgatggctccgccgaatgccaagatggctccgacgagagccaggagacttgcctttccgtgacctgcaagagtggagatttctcctgcggaggacgcgtgaatcgctgtattcctcagttctggcgctgcgatggacaagtggattgcgacaatggaagcgatgagcaaggctgtcctcctaagacctgttcccaggacgaattcaggtgtcacgacggtaagtgcatctcaaggcaattcgtatgcgattccgaccgcgactgccttgacggaagcgacgaagcttcatgccctgtgctgacttgcggtccagctagctttcagtgtaacagttctacttgtattccccaactttgggcatgtgataacgaccccgattgcgaggacggctctgacgaatggcctcagagatgccgcggcctctacgtctttcaaggcgacagttcaccctgcagcgcattcgaattccattgcctgtctggcgagtgcattcacagcagttggaggtgtgatggtggtcccgattgcaaggacaagtccgacgaggaaaactgtgcagtggctacctgccgtcctgacgaatttcagtgtagcgacggtaattgtatccatggttctcgtcaatgcgacagagagtatgattgcaaggatatgtcagacgaggtgggttgcgtgaatgtcactctgtgcgagggtccaaataaattcaagtgtcacagcggcgaatgcataacactcgacaaagtgtgtaacatggctagagattgcagagattggtctgatgagccaatcaaagagtgtggaactaacgagtgtctggacaacaacggcggatgctctcacgtttgcaacgagctgaaaatcggctacgaatgtctgtgccctgatggcttccagctcgtggcccagaggcgctgtgaagacattgatgaatgtcaagatccagacacctgctcacaactgtgcgtgaacctggaaggcggctataagtgccagtgcgaggagggcttccaactggatcctcacaccaaggcttgcaaggcagtcggttccatcgcttacctgttctttactaatagacatgaagtccgtaagatgacactggaccgctccgagtacacttcactcatacctaatttgaggaacgtggtagctctggacacagaggtagcctccaacaggatatactggtctgacctgagccaacgtatgatttgctccactcagttggatagggctcatggagtatccagttatgatactgtcatctcccgcgatatccaggcaccagatggactggctgtggattggattcatagcaacatttactggacagacagcgtcctgggcactgtaagcgtagccgacaccaagggtgtgaagaggaagacactttttcgcgaaaatggctctaagcccagagctatcgtggtggatcctgtgcatggctttatgtactggaccgattggggtacccccgccaagatcaagaagggtggcctgaatggagtggatatctattctctggtgactgagaatattcaatggccaaatggcatcacattggatctgctttcaggccgcctttactgggtcgattcaaaactgcacagtatctctagcatcgacgtgaacggcggaaaccgtaagaccatcttggaggacgaaaaaaggctggcccaccccttcagtctcgcagtgtttgaagacaaggtcttctggacagacattatcaatgaagcaatcttttctgctaatcgtctgaccggttccgacgtgaatcttcttgctgagaatctgctttccccagaggacatggttttgtttcataatctcacccagccccgtggagtaaactggtgcgaaaggactactttgtccaacggcggctgccagtacctgtgcctgcctgcccctcagatcaaccctcacagtcccaaattcacctgtgcatgccctgacggcatgcttctggctcgtgacatgagatcctgtctcaccgaagcagaggcagctgtagcaacacaagagacttcaacagtgcgtctgaaggtctctagcactgctgttcgtacccagcacacaaccactcgccctgtgccagatacctcccgtcttcccggcgccactcccggcctgactacagtagagatcgtcacaatgtcccatcaagccctgggagacgtcgcaggccgtggcaacgagaagaagcccagttctgtccgtgctctgtctatagtgttgccaattgttctgctcgttttcttgtgtctgggagtgttcctcctgtggaagaactggcgcttgaaaaacatcaacagtattaacttcgacaaccccgtgtatcagaaaactaccgaagacgaagtgcatatctgccataatcaggacggttactcttacccaagcagacagatggtctctctggaggacgacgtagct

SEQ ID NO: 15991 - DNA, 2580 bp, synthetic construct
  misc_feature 1..2580: note = source = /note="Description of Artificial Sequence: Synthetic coding sequence"
  source 1..2580: mol_type = other DNA
atgggaccgtggggctggaagttgcgctggactgtcgcacttctcttggcggcagcaggaactgcagtgggggaccggtgcgagaggaatgagtttcagtgtcaagacggcaagtgtataagctacaagtgggtgtgtgatggatcggctgagtgccaagatggatcagacgaatcgcaggaaacctgtttgtcagtgacgtgtaagtcaggcgatttttcatgtggtggcagggtgaacaggtgtatccctcaattttggagatgcgatggacaggtcgattgcgataatggatctgacgaacaaggatgtccacctaaaacctgtagccaggatgaattccgctgccatgatgggaagtgtatatcgcgccaatttgtctgcgactcagacagagactgcctggatgggtccgatgaagcatcatgtccagttctgacttgtggaccggcttccttccaatgtaactcctccacctgtatccctcagctctgggcctgtgataatgatcccgactgtgaagatggcagcgacgaatggcctcagcgttgtaggggtttgtacgtctttcaaggagactcgtccccgtgttcggccttcgaattccattgtctgtccggggaatgtattcacagctcgtggagatgtgatggtggaccagattgtaaagataaaagcgacgaggaaaactgtgccgtggcaacctgtcgccccgacgaattccaatgttccgacggaaactgcattcatggttccagacagtgtgacagagaatacgactgtaaggacatgtcggatgaagtgggttgtgtgaatgtgaccctgtgcgaaggtcctaacaagtttaagtgtcattcaggagaatgtataaccctcgataaggtctgtaatatggcacgggactgtagagattggtcagatgaacccatcaaagagtgtgggactaatgagtgtctggacaacaacggaggttgttcgcacgtgtgcaacgagcttaagattggttacgagtgcttgtgcccggatggatttcaactcgtggcacagcgcaggtgtgaagatatcgatgaatgccaggaccctgatacttgttctcaactgtgcgtgaacctcgaaggcgggtacaagtgccaatgtgaggagggctttcaactcgacccccataccaaggcgtgcaaagcagtgggcagcattgcatacctgtttttcaccaataggcacgaggtgagaaagatgaccctcgatcgatccgagtacacctcattgattcctaaccttcggaatgtcgtcgctcttgacaccgaagtggcatcgaacaggatctactggtccgatcttagccagcgaatgatatgttcgacccaattggatagggctcatggcgtctccagctacgataccgttatcagccgtgatattcaagctccagacggccttgcggtggattggatacatagcaacatttactggactgattcggtccttgggactgtcagcgtggcagatactaagggagtcaaaagaaagaccctgttcagagaaaatggatcaaaacctagggcaatcgttgtggacccagtccacggttttatgtactggaccgattggggaactccggcaaagattaagaaggggggactgaacggcgtggacatttactcattggtgactgagaatattcagtggccaaacggcattacgcttgatctgctcagcggtcgcctttactgggtggattccaaactccactccattagctccatcgacgtcaacggcgggaatcgcaagaccattcttgaagatgaaaaacgtctcgcacatcccttctcactcgccgtctttgaggataaggtcttttggaccgacattatcaacgaggccattttctccgcaaatcgtcttaccggatccgatgtgaatctgcttgcagagaatctgctctctccagaagatatggtgctgttccacaatctgacccagcctcgaggtgtgaactggtgcgaaaggactactctgtcgaacggcggatgccagtacctgtgtctgccagcacctcagattaatcctcattcgccgaagtttacgtgtgcctgccctgatggtatgttgctggcacgcgatatgcgcagctgcctgactgaagcggaggcagccgtcgccactcaagagacttccaccgtgagactcaaggtgtcctcgaccgccgtgcgaactcagcatactacgactcggccggtgccagacacttcgagactccccggagcaaccccaggactgaccacggtcgaaattgtcacgatgtcacatcaagcactcggggacgtggcaggacgggggaacgaaaagaagccgtcatcggtgcgggcactcagcattgtgcttcctatcgtgctcctcgtgttcctgtgtctgggtgtgtttcttctgtggaagaattggcgactgaaaaacattaactcgatcaatttcgataaccctgtgtaccaaaagactaccgaggatgaggttcacatttgccacaatcaagacggatactcgtacccatcccgacagatggtgagccttgaagatgatgttgca

SEQ ID NO: 15992 - DNA, 2580 bp, synthetic construct
  misc_feature 1..2580: note = source = /note="Description of Artificial Sequence: Synthetic coding sequence"
  source 1..2580: mol_type = other DNA
atgggcccttggggatggaaactccgatggaccgtggctttactcttggctgctgccggtaccgccgtgggtgaccgctgcgaacgcaatgaattccagtgtcaggatggcaagtgcatatcttacaaatgggtgtgtgacggctctgcggaatgccaggatgggagcgacgagagccaggaaacgtgcctttctgtcacctgtaaaagtggtgacttcagttgtggcggcagagtgaaccggtgtataccacaattttggcggtgcgacggccaagtcgactgcgacaacggcagcgatgagcaaggatgtcccccaaaaacttgtagtcaggacgaatttaggtgccatgacggcaagtgcatcagccggcagtttgtttgtgacagtgacagagattgcctggacgggtccgatgaagccagctgccctgttctgacgtgcggccccgcctcttttcagtgcaacagctccacttgcatcccccagctctgggcttgcgacaacgatccggactgcgaggacggatccgatgaatggccgcaaagatgccggggactgtacgtcttccagggcgacagttcgccctgctcagctttcgagttccattgtctatctggcgaatgcattcactcttcctggagatgtgacggcgggcctgattgtaaggacaaaagcgacgaggaaaactgtgcagtggccacttgccggccggatgagtttcagtgtagcgatggcaattgtatccatgggtcacgccaatgcgacagggagtacgattgcaaggacatgagtgatgaagtagggtgcgttaacgtgaccctgtgcgaaggtcccaacaagttcaagtgtcactctggggaatgtataacactcgacaaggtttgtaacatggccagggattgccgcgactggagcgacgagccgattaaggagtgcggcacgaacgagtgcttggacaataatggagggtgtagccatgtgtgcaacgagctgaagattggctatgagtgcttgtgcccagatggctttcagctcgttgcacagaggcggtgcgaagatattgacgaatgccaagacccggatacctgtagccagctctgtgtcaacctggaggggggatacaagtgccaatgcgaagaaggctttcagctggatcctcacacgaaggcatgtaaggcggtgggaagtatagcatacttgttcttcacaaatagacatgaggtgaggaagatgacactggataggagcgagtacacctcactgatccccaatctgcgtaatgtagtggccctggacacagaagtcgcaagcaaccgcatctattggagcgatctgtcacagcgcatgatatgttccacccaactggatcgggcccatggtgtgtcctcgtatgacaccgtcattagtagagacatccaggcgccagatgggctcgcagtggactggatccattcgaacatttattggacggattcagttctcggcactgtttccgtggctgatacaaaaggggtgaagcgcaaaaccctgttccgtgaaaatggatctaagcctcgagcaattgtcgttgacccggttcatggcttcatgtactggacggattgggggactcccgccaaaattaagaagggcgggcttaacggggtggacatatatagccttgttacggagaacatccaatggcccaacggaattactcttgatttgctaagcggaaggctgtattgggtcgacagcaagcttcactccatttctagcattgatgtgaatgggggaaatagaaagacgatactggaggatgaaaagcgcttagctcacccattttcactggctgtgttcgaggataaggtgttttggactgacataatcaacgaggcaattttcagtgctaacagactcactggatccgacgtgaaccttctcgccgagaacctactgtctccagaggatatggtgctatttcataacctgactcagccccgcggagtgaattggtgcgagcggacgaccttgagtaatggggggtgtcaatatctttgccttccggccccccagatcaaccctcacagcccaaaatttacctgtgcatgcccagacgggatgttactcgccagggatatgagatcctgcctcactgaggccgaggccgcagtcgccactcaagaaacatccactgtaaggctcaaagtgtcctccaccgcagtgcggacacagcacacgaccactcgccctgtaccagatacctcacgcctccctggggccacgccggggctaactaccgtcgaaatagttaccatgtcgcatcaagcattgggggacgtggccggccggggcaacgaaaagaagccaagttccgtgagagccctgtcaatcgtgttgccaatcgtcctgctggtctttctatgcctgggggtgttcctactgtggaagaactggaggttgaagaatattaatagcataaacttcgataaccctgtatatcagaagacaactgaggacgaggtacatatctgccataatcaggatggctacagctacccatcccgacagatggtgtcactcgaagacgacgtcgcc

SEQ ID NO: 15993 - DNA, 2580 bp, synthetic construct; identical to SEQ ID NO: 15983
  misc_feature 1..2580: note = source = /note="Description of Artificial Sequence: Synthetic coding sequence"
  source 1..2580: mol_type = other DNA

SEQ ID NO: 15994 - DNA, 2580 bp, synthetic construct
  misc_feature 1..2580: note = source = /note="Description of Artificial Sequence: Synthetic coding sequence"
  source 1..2580: mol_type = other DNA
atgggcccatggggatggaagctaagatggacggttgccctgctgctggccgctgctggcacagctgtgggggaccgttgcgagagaaatgagtttcagtgccaggacggaaagtgcatctcttataaatgggtgtgcgacgggagcgctgaatgccaagacgggagtgacgagagtcaggagacctgcctgtcggtcacatgtaaatctggcgattttagctgtggaggtcgcgtgaaccgctgcattcctcaattttggcggtgtgacggacaggtcgattgtgacaatggaagcgatgaacaaggatgtccccctaagacttgctctcaggacgaatttaggtgccatgacgggaagtgtatttccaggcaattcgtctgcgactccgaccgggattgcctagatggatcagacgaggcctcctgcccggtcttgacatgtgggcccgcttccttccaatgtaattcttctacatgtattccacagttgtgggcttgcgacaatgatccagactgtgaggacgggtccgatgaatggccacagaggtgtaggggtctgtatgtgttccagggcgactcctccccttgttccgccttcgagtttcattgcctgtctggcgaatgcatccacagcagctggcggtgtgacgggggccccgattgcaaggacaagagcgatgaagaaaattgtgcagtcgcaacttgcaggcccgacgagttccagtgtagcgacggcaattgtattcatggttctaggcagtgcgaccgggagtacgactgtaaagatatgtcagacgaggtcgggtgcgtcaatgtgaccctctgtgagggtccaaacaaattcaaatgccatagcggcgaatgcatcacgctggacaaggtgtgtaacatggcacgcgactgccgcgattggagcgatgaacccattaaagagtgtgggaccaatgaatgtctggataataacggtgggtgcagccacgtgtgtaatgagctgaagattggctatgagtgcctgtgtccagatggcttccaactcgtcgcacagaggcgttgcgaggacatagatgagtgccaggatcccgacacgtgtagccagctgtgcgtgaacctcgaaggcggatacaaatgccagtgtgaggaagggttccaactggatccacacacgaaggcttgtaaggcagttggctccatcgcctacctgttcttcacgaacaggcatgaagttagaaagatgacgctcgatagatctgaatatacgtctcttatcccaaacctcagaaacgttgtggcattggacacagaagtggccagtaaccggatttattggtcagacctgtcccagcgcatgatctgcagtacacagttggatcgcgcccatggggtatcttcctacgacaccgtgatcagtagagatattcaagctccagacgggctagcggttgattggatccacagcaacatctactggaccgacagcgtgctcgggactgtttcagtggctgacaccaaaggggtgaaaagaaagacacttttccgggaaaatggatcgaaacctcgcgccatcgtggtcgaccctgtgcatgggttcatgtattggacggactgggggactcctgcaaagataaagaaaggagggctgaacggagtggacatttatagcttagttactgagaatatacagtggcctaacggtataacattggacttgctgtctggacgcctatattgggtggactctaaactccatagcatttcatctatagatgtgaacggtggaaatcgcaagaccatcctggaggatgaaaagcggcttgcccacccattttcactggctgtatttgaggataaggtgttctggactgatattataaatgaggcaatcttctccgctaatcgattgaccgggagcgacgtgaacctcctcgctgagaatctgctgtccccagaagatatggtcctgtttcataacctgactcagccgcggggcgtgaattggtgtgagcgcaccactctgtctaacggtgggtgtcagtatctatgcttgccagcaccgcagatcaatcctcactcacccaaatttacctgtgcctgtcccgacggtatgttgctagccagggacatgaggtcttgtctgactgaggcagaggccgccgttgcaacccaggagacaagcacggtgcgcctgaaggtgagctctacagcggttaggacgcagcataccactacccggcctgttccagatacgtcaaggctccccggagctacacccgggctgacaaccgtggagatagttacaatgtcgcatcaggcgctgggtgacgtggccggcaggggaaacgagaagaagccatccagcgtccgggcactttctatagttctgcccattgtcttactcgtgtttctttgtcttggtgtttttcttctgtggaaaaattggcggttgaaaaacattaactcaattaacttcgacaaccccgtttaccagaagaccacggaggacgaagtgcacatatgtcacaatcaggacgggtacagctaccctagcaggcaaatggtaagtttggaggatgatgtggca

SEQ ID NO: 15995 - DNA, 2580 bp, synthetic construct
  misc_feature 1..2580: note = source = /note="Description of Artificial Sequence: Synthetic coding sequence"
  source 1..2580: mol_type = other DNA
atgggaccctggggctggaaactgcgctggaccgtggccctactgctggctgctgcaggcacggccgtcggcgataggtgtgaacggaacgagttccagtgccaagacgggaagtgtatctcctacaaatgggtgtgcgatgggtccgccgagtgccaagacggttccgatgagtcacaggaaacgtgtctttcggttacctgcaagtcaggcgactttagctgcggcggaagagtaaacagatgcatcccacagttctggagatgtgacggacaagttgactgtgataatggcagcgatgaacaagggtgcccacccaagacctgctcccaagacgagttcagatgtcacgacgggaaatgcatcagccggcaattcgtgtgtgactccgatagggactgcttagacggatcggatgaggccagctgccctgtgttaacatgcggacccgcctcctttcagtgtaattcctccacgtgcatcccacaactctgggcctgcgacaatgaccctgattgcgaggatggcagcgacgagtggccacagaggtgccggggcctgtacgtgtttcagggagatagcagcccatgtagcgcctttgagtttcactgcctgtctggcgagtgcatccattcctcatggaggtgtgacggtggccctgattgcaaagacaagagtgatgaggaaaactgtgcggtggccacctgccgccctgacgagttccagtgttccgacggaaattgtatccacggaagtcggcagtgcgacagagaatacgattgtaaggacatgtcagatgaggtgggatgtgtgaacgtgactctttgcgagggacctaacaaattcaagtgccattccggagaatgtatcacactggacaaggtctgcaacatggcccgagactgtcgtgactggtccgatgaaccaataaaagagtgcggtaccaatgagtgtctggacaacaatggtggttgttcacacgtatgcaacgaactaaaaatcggatacgaatgcctgtgccctgatggattccaattagtagcccagaggaggtgtgaggatatcgacgaatgccaggatccggacacctgctcgcagttgtgtgtgaatcttgaagggggttataagtgccagtgtgaagagggctttcaactggacccccatacaaaggcgtgtaaggcggttgggagcattgcatacttgttcttcactaaccgacacgaggtgcgcaagatgacactggaccgcagcgaatatacatccttgatccctaatctcaggaacgtggtcgcgttagacaccgaggtggcatccaacaggatatattggtctgatttatcgcaaaggatgatctgttcaacacagctggaccgggcccatggcgttagttcatatgacaccgtgatcagtcgcgatattcaggcccctgatggtctggcagttgattggatccacagtaatatatattggaccgattccgtactgggcaccgtgtccgtagcggacaccaagggcgtcaagcgtaaaaccttgtttcgggaaaatggaagtaagcctcgggccatcgtggttgatcctgttcatggatttatgtattggacagactggggcactcccgctaagataaagaaaggtggtctaaatggcgtggatatctactcattagtgacagagaacatccagtggcccaatgggattacactggatctgctgtctggccgtctctactgggtggatagtaagctccattccatcagttcaatcgacgtgaatggaggcaaccgtaagactatccttgaggacgagaagcggctggcacatccgttctccctagcggtgtttgaagataaggtgttttggactgacattatcaatgaagctatctttagtgcgaataggttaaccgggtcggatgtgaacctgttagccgaaaatcttctgtccccagaggatatggtcctgtttcataacctaacccagccgaggggtgtgaactggtgcgagcgcacgactctgtcaaatggcggatgtcagtacctgtgcctgccagctccacagattaacccgcacagcccgaagtttacctgcgcatgtcccgatgggatgctactggctagggatatgaggagctgccttacagaagcagaggcagcagtcgccacccaagaaacctccacagttaggctgaaggtttcatcgacagcagtcagaacccagcacactacaacacgtcccgtgcctgacacctcacggctgcctggggctactcccggactcacgacagtggaaattgtgaccatgagccaccaagcgcttggagatgtggctgggagagggaacgaaaaaaaacccagctccgtaagagccctgtctatcgtcttgccaattgttctgctggtcttcctgtgcttgggcgttttccttctatggaaaaactggcggctgaagaacatcaactctatcaattttgacaaccccgtatatcagaaaaccacagaggacgaggtacatatctgtcacaatcaggacggttattcttacccatcccgacagatggtgtcattggaagatgatgtcgcc

SEQ ID NO: 15996 - DNA, 2580 bp, synthetic construct
  misc_feature 1..2580: note = source = /note="Description of Artificial Sequence: Synthetic coding sequence"
  source 1..2580: mol_type = other DNA
atgggaccctggggatggaaactgcgatggacggtggccctcctgctagccgccgccgggaccgccgtcggtgacaggtgcgagcgtaacgagttccaatgccaagatggaaagtgcatctcttataagtgggtatgtgatgggtcagctgagtgtcaggatggctcagatgagagccaggaaacttgcctgtccgttacttgcaagtctggcgatttctcatgcggcggacgcgtcaataggtgcattcctcagttctggaggtgcgacgggcaggtggactgcgataatgggagcgatgagcaaggctgcccaccaaaaacctgttcccaggacgaatttcggtgccacgacggcaagtgtattagccggcaattcgtgtgtgatagtgaccgggactgtctggatggctcggacgaagcgtcttgtcccgtgctcacctgtggaccagcgagcttccagtgcaattcaagcacctgcataccacagctttgggcatgcgataacgatcctgattgcgaggatgggtccgacgagtggcctcagcggtgccgcgggctgtacgtgtttcagggcgacagttccccctgttccgcctttgaattccactgcctttcaggcgagtgcatccatagctcctggcgctgcgacggaggccccgattgtaaggataaaagtgacgaggaaaattgtgccgttgctacttgccggccagatgagttccagtgttccgatggtaattgcatccatggttccagacaatgtgatagagaatatgattgcaaggatatgtccgacgaagtgggctgtgtgaatgtcacactgtgtgagggaccaaacaaattcaagtgtcactccggggagtgcattacactcgataaagtgtgtaatatggcccgtgattgtcgggactggtcggacgagccaataaaggaatgtgggacgaatgagtgtctggacaataacggtggatgttcgcacgtgtgcaatgagctgaagatcggttacgagtgcttgtgtcccgacgggttccagctcgtcgcacagcgtcgctgcgaggacatcgacgagtgccaggaccctgatacctgctcccagctgtgcgttaatctggagggaggatacaagtgtcagtgcgaggagggcttccagcttgatccccacaccaaagcttgtaaagccgtggggtccattgcttacctgttcttcaccaacagacatgaagtgagaaaaatgacactggaccgcagtgaatatacttccttgatccctaacttgcggaatgtggtagcgctggacaccgaagttgcatccaataggatctactggtccgaccttagccagcgcatgatttgctccacccagcttgaccgagcccacggagtatcctcttacgatacggtgatttcacgcgacatccaggcacccgacggacttgccgtggactggatccactcaaacatctactggactgactccgtactcggtaccgtgagcgtagccgataccaagggcgttaagcgcaaaacattgttccgtgagaatggcagcaagcctcgcgcaattgtcgttgacccagtgcatgggttcatgtattggaccgactggggcactcccgcaaagattaaaaaaggtggcctgaatggcgtggacatctactcattggttactgagaatatacagtggcccaatggcataacattggacctactgtctgggcggctatattgggtcgatagcaagctgcacagcatctcatcaatcgatgtcaatggcggtaatcggaaaaccatcttggaggacgagaaacggctggcccacccctttagtctggctgtatttgaagataaagttttctggaccgatatcattaatgaggctattttttcagctaatcgactcaccgggagcgacgtcaacttactggccgagaatctcctgtcaccagaagacatggttctatttcacaacctgacacagcctcggggcgtgaactggtgtgagcggacaactctctccaatggaggatgtcagtacctttgtcttccagctcctcagataaacccgcacagtcccaagttcacttgcgcctgccctgatggcatgctgttagctcgtgatatgcggtcatgcttaacggaggccgaagcggcggtggccactcaagaaacgtctacggtcagactcaaggtatcatctacagcggtgaggacacagcacacaacaaccagacctgtgcctgatacaagcaggctgccaggggccactccagggctcactactgtagaaatcgtgacaatgtcacatcaggccctaggggacgtggctggacgcggaaacgagaagaaaccaagctccgtccgggctctgtcaattgttctgcctattgtgctgttggtgttcttatgtctcggggtttttctgctctggaagaactggcggctgaaaaacattaactcaattaatttcgataacccagtttatcaaaaaactaccgaggacgaggtgcatatctgtcacaaccaggacgggtatagctacccctctcggcagatggtctcactggaggacgatgtggcc

SEQ ID NO: 15997 - DNA, 2580 bp, synthetic construct
  misc_feature 1..2580: note = source = /note="Description of Artificial Sequence: Synthetic coding sequence"
  source 1..2580: mol_type = other DNA
atgggaccatggggatggaagctgcggtggaccgtcgctctcctccttgccgcggccggaactgcggtgggagacagatgtgaacggaacgaatttcagtgtcaagacgggaagtgcatctcgtacaagtgggtgtgcgatggtagcgcagagtgccaagacggctcagacgaaagccaagagacgtgcctctcagtgacgtgtaagtcaggcgacttctcgtgcggcggacgggtgaacaggtgcatcccgcaattctggagatgcgacggacaagtggactgcgacaacggcagcgatgagcagggatgtccccccaagacctgctcgcaggacgaattcaggtgccatgatgggaagtgtatctcgcgccagttcgtgtgcgactccgaccgcgactgtctcgacggatccgacgaagcctcctgcccggtcctgacttgcgggcctgcaagtttccagtgcaattcatcaacttgcatcccgcagctgtgggcttgcgacaacgacccagactgcgaagatggatcagatgagtggccgcagagatgcagaggactttacgtgttccaaggcgactcgagcccttgctccgcgtttgaattccattgtctctcaggtgaatgcatccattcgagctggagatgtgacggaggcccagactgcaaagataaatcggatgaagagaactgcgctgtagccacgtgccgcccggatgagtttcaatgttcagatggaaactgtattcacgggtccagacaatgcgacagggagtacgattgcaaagacatgtcggacgaggtcggatgcgtcaacgtcaccctctgcgagggacctaacaagttcaagtgccactcaggggaatgcattactctggacaaggtgtgcaatatggccagagactgtcgcgattggtcagatgaaccgatcaaggagtgcggcacgaatgagtgcctggataacaatggcggatgcagccacgtgtgcaatgagcttaagatcggatacgagtgcctttgtccggatggattccagttggtggctcagcgccgctgcgaggacattgatgaatgccaagatccggacacgtgctcgcagctctgcgtgaacctggagggcggatacaaatgccagtgcgaagagggatttcagttggatccacacactaaggcgtgtaaggcagtggggtccatcgcctacctgttcttcacgaacaggcatgaggtccgcaaaatgacgttggatcggtcagaatacacctcactgatcccaaatctcagaaatgtggtggcgctggacactgaggtggcatccaaccgcatctactggtccgacctgtcgcagcgcatgatctgctcaacccagctcgaccgagcacacggcgtgtcatcctacgataccgtcatttcacgtgacatccaggcgccggacggcctggccgtggactggatccattcgaacatttactggactgattcggtgctgggtaccgtgtccgtcgccgatactaagggagtgaagcgaaagaccctcttccgagagaacgggtccaagcctagagctatcgtggtggatccggtccatggtttcatgtactggactgactggggaaccccggcgaaaatcaagaaaggtggactgaacggagtcgatatctactcgctggtcaccgaaaacatccagtggccaaacggcatcacgctggacttgctgtcgggccggctctactgggtggactccaagctgcattcgattagttcaattgacgttaacggaggaaaccgcaagactatcttggaagatgagaaacgcctggcgcatccgttctctctcgccgtgttcgaggacaaggtgttctggacggatatcatcaatgaggcgatcttcagcgcaaataggttgactggcagcgacgtgaatctgctggccgagaacctcctctcgcctgaggatatggtgctctttcataacctcacccagccacggggagtgaattggtgtgaacggaccaccctctcgaacggcggatgtcagtacctctgcctccctgccccacagatcaacccacactcgccaaagttcacgtgcgcatgcccggacggcatgctgctggcgagagacatgcggtcctgcctgactgaagccgaggccgccgtcgcgacccaagagacttcgactgtgcgcctgaaagtgtcctccactgccgtgcggactcagcacaccacgacccggccggtcccggacacctcccggctccctggcgcgactccggggctcaccaccgtggagatcgtgactatgtcccaccaggccctgggtgacgtggctggccggggtaatgagaagaagccgagctccgtgcgcgcgctgagcatcgttctcccgatcgtgcttctggtgttcctgtgcctcggagtgtttctgctctggaaaaactggcgactgaagaacatcaattcaatcaatttcgacaatccggtgtaccaaaagaccactgaggacgaagtccacatctgtcataatcaagatggatactcgtacccgtcacgccagatggtgtccctggaggacgatgtcgca

SEQ ID NO: 15998 - DNA, 2580 bp, synthetic construct
  misc_feature 1..2580: note = source = /note="Description of Artificial Sequence: Synthetic coding sequence"
  source 1..2580: mol_type = other DNA
atgggaccttgggggtggaaacttaggtggaccgtcgcactgctgcttgcagctgccgggaccgccgttggagatcggtgcgagagaaatgagtttcagtgccaggacggaaagtgtatatcatacaaatgggtgtgtgatggttcggctgaatgtcaagacggctccgatgagtcgcaagagacttgtctgtcggtcacttgcaagtcaggcgacttctcctgcggtggtcgggtcaacagatgtattcctcaattctggagatgcgatggtcaagttgactgtgataacggatcggatgaacagggctgtccaccaaagacttgctcccaagacgaatttcgctgccacgatggcaagtgcatttcaagacaatttgtctgtgactcggatagggactgtcttgacggtagcgatgaagcatcctgcccagtccttacttgcggtcccgcctcgtttcagtgtaattcgtcgacttgcattcctcagctttgggcatgtgataatgatcccgattgtgaagatggaagcgacgaatggccacaacgttgtaggggactctacgtctttcaaggtgatagctcaccgtgttccgcattcgaattccactgcctgtcgggagagtgtattcatagcagctggcgctgtgacggaggaccggattgtaaggataaatccgatgaggagaattgtgcagtggccacctgtcgcccagacgaatttcagtgttccgacggaaactgtattcatggatcccgacagtgtgacagggagtacgattgtaaagatatgtctgatgaagtcggatgcgtcaacgtcactctgtgcgagggacccaacaagttcaaatgccattcaggagaatgcatcaccctcgataaggtgtgtaacatggcccgtgattgtcgagactggagcgatgaacccatcaaagaatgtggaacgaacgaatgtcttgataacaacggtggttgttcccatgtctgcaacgagttgaaaataggttacgaatgtctctgtcccgacggattccaactcgtggcacagcgtagatgtgaagatattgacgagtgccaggatcctgacacttgctcgcaactctgtgtcaaccttgagggaggctataagtgtcagtgtgaagaaggttttcagctggatccgcatactaaggcatgcaaggccgtcggttcgattgcgtatctgttctttactaacaggcatgaagtgcgcaaaatgactcttgaccgatcagaatacacttcactcataccaaacttgagaaatgtggtggcactggacactgaggtcgcatccaataggatatactggtccgatctgtcccagcggatgatctgttcgacccagcttgatagagcgcatggcgtgtcgtcatacgacactgtgatttcccgggatatccaagcacctgacggtcttgcggtggattggatacactcgaacatatactggactgacagcgtgcttggaaccgtctccgtggctgacaccaagggagtgaagaggaaaactctttttcgtgaaaatggatctaagccgagggcaatcgtggtcgatcctgtgcatgggttcatgtactggaccgattgggggaccccggcaaagatcaagaagggcggactgaatggcgtggatatctactcgcttgtgacggaaaacatccaatggcccaacggaatcactctcgacctcttgagcgggcgattgtactgggtggattcgaaacttcactccatttcttcgatcgacgtcaacggcggaaatcgtaaaaccattctggaggatgaaaaacgacttgcacacccattttcgctggcggtctttgaagataaggtgttctggaccgacattatcaatgaggccatcttttcagcgaaccgactgaccggctcggatgtcaatctgttggcggaaaacctgctgtcgccagaagatatggtcctttttcataatctgacccaacctcggggagtgaattggtgtgagcgtactacgctctcgaacggtgggtgccagtacctgtgtctgcccgcaccccagataaacccccactcccctaagtttacttgtgcatgtcctgatggcatgctcctggcgagagacatgagaagctgcttgacggaggcagaggccgctgtggctacccaggaaacttccactgtcaggctgaaggtttcgtccaccgcagtccgtacccaacacacgaccactagacccgtgcccgatacctcacgccttcctggagccactccagggcttaccaccgtggaaattgtcaccatgagccatcaagcacttggggatgtggcaggtcgggggaacgaaaagaaaccgtcgtcggttcgcgccctttcgattgttctgcctatcgtgcttcttgtgttcctgtgcctcggcgtgtttttgctgtggaagaactggcgccttaagaacatcaactcaatcaactttgataatccagtctaccaaaaaactacggaggacgaagtgcacatttgtcataaccaggacggatactcatatccgtcccgccaaatggtttccctcgaggatgacgtggcc

SEQ ID NO: 15999 - DNA, 2580 bp, synthetic construct
  misc_feature 1..2580: note = source = /note="Description of Artificial Sequence: Synthetic coding sequence"
  source 1..2580: mol_type = other DNA
atgggcccttggggttggaagctgcgctggaccgtggcactgctcctggccgctgccggcaccgcggtaggtgataggtgcgaaaggaacgaattccaatgtcaggatggtaaatgcatctcatacaaatgggtgtgtgatggctcagctgagtgccaggatggttcagacgagagccaagagacatgtctcagcgttacctgcaaatcaggagacttcagctgcgggggtcgtgtaaataggtgcatcccacagttttggaggtgcgatggacaggtggactgcgacaacggatctgatgaacaaggctgcccaccaaaaacctgttcacaggacgaatttcgctgccatgatggcaaatgcatcagccgtcagttcgtgtgcgattctgatcgggattgcttagacggctcagatgaggccagttgcccagtgctgacctgcggcccagcctcatttcaatgtaactcgtctacctgtattcctcagctgtgggcatgcgataacgacccagactgtgaggacgggtctgacgagtggcctcagagatgcagaggtctgtatgttttccagggcgactcttccccttgctctgcattcgagtttcactgtctgtcaggcgaatgcatccattcttcctggagatgtgacggtgggcctgactgcaaagacaaatctgacgaggagaactgtgcggtggctacctgtaggcccgacgaattccagtgcagcgatggcaattgtatccacggttccaggcagtgcgatcgggagtacgactgcaaggatatgagtgacgaggtaggatgcgtgaacgtcaccctgtgtgaaggtcccaataaatttaagtgccatagcggggaatgtataacccttgacaaagtctgcaatatggccagggattgccgcgactggagtgacgaacctattaaagagtgtggaacgaacgaatgtctggataataatgggggctgctctcacgtgtgtaatgaattgaagatcggatatgagtgtctctgccctgatggatttcagctggtcgcacagcgacgttgcgaagacattgatgagtgtcaggatccagacacttgttctcaactatgcgtgaacctagaaggagggtataaatgccaatgtgaggagggctttcaactcgaccctcacaccaaggcttgcaaggctgtgggcagcatcgcatatctgtttttcacaaatcggcacgaggtgcggaagatgacattagacagatcggaatatacgtcccttatccccaacctcaggaacgtggtagccctggatacggaagtcgcctctaacaggatatattggagcgatctctctcaaaggatgatctgcagcactcagctggaccgggcacacggggtttcttcctacgacactgtcatctcccgagatattcaggcccctgatgggctggctgtggactggatccacagcaacatctattggactgattcagtgttaggcaccgtgagcgttgcggataccaaaggcgttaaaaggaagaccttatttcgggagaatgggagcaaaccaagagccatcgtcgtggacccagtccacggttttatgtactggactgactggggcacgccagctaaaatcaagaagggcggactgaacggcgtcgacatttactcactagttacagagaatatccagtggcccaatggcatcacgctcgacctcctttcaggcaggctgtactgggttgatagtaagcttcacagcatcagcagcatcgacgtaaatggaggcaataggaaaacgatcctcgaggatgaaaaacgactagctcacccatttagtttagccgtgtttgaagataaagtgttctggactgatattattaatgaagccattttctcagctaaccgcctgactgggtctgatgtaaacttactggcagagaatttattgagccctgaggatatggtgctgttccataatcttactcagccacggggagttaactggtgtgaacgcaccaccttgagcaacggaggatgccagtacctatgcctcccagcaccacagattaacccacactcaccgaagttcacttgtgcatgccccgatgggatgctcttggccagagacatgcggtcgtgtttaaccgaagcagaagccgccgttgccacccaagaaactagtacagttagactaaaagtaagctcaaccgccgtgcgcacacaacataccactacccgtcccgtgccggatacctcccgcctgcctggcgctactcctggactgactaccgtcgagattgtcaccatgtctcaccaagccctgggcgatgttgcaggcagaggaaatgagaaaaaaccatccagcgttcgtgcactatccattgtcctgccaatagtcctgctggtgtttctctgtctcggcgtcttcctattatggaaaaattggaggttaaaaaatatcaatagtatcaactttgataaccctgtctatcagaagacgactgaggatgaggtgcatatttgtcataaccaggacggatatagttacccttctagacagatggtgagtcttgaagacgatgtagct

SEQ ID NO: 16000 - DNA, 2580 bp, synthetic construct
  misc_feature 1..2580: note = source = /note="Description of Artificial Sequence: Synthetic coding sequence"
  source 1..2580: mol_type = other DNA
atgggcccgtggggatggaagctgcgctggaccgtggcgctgctcctggccgccgcaggcactgccgtgggggacaggtgcgaacggaatgaatttcagtgccaagatggtaagtgcatcagctacaagtgggtgtgcgatggttcggccgagtgtcaggatggctcggacgaaagccaggaaacctgcttgagtgtcacttgcaaatcaggcgacttttcgtgcggaggcagggtgaatagatgtatcccacagttttggcgctgtgatggccaggtggactgcgacaacgggtcggacgagcaaggctgccctcctaagacttgcagccaggacgaattcagatgccatgatggaaagtgtatctcgcggcagtttgtgtgcgattcggatagagattgcctggacggatcggacgaagcatcctgcccggtgctgacctgcggacccgcctccttccagtgtaacagctcaacctgcatccctcagctgtgggcctgtgacaatgatccggattgtgaggacggatcagacgagtggccgcagagatgccgcggcttgtacgtgttccaaggagactcctcgccgtgctcagccttcgaattccactgcctcagcggagaatgcatccattcgtcgtggcggtgcgatggcggaccagactgcaaagacaagagcgatgaagagaactgcgccgtggcaacctgtcgtccggatgaattccaatgctccgatggaaattgcatccatgggtcgcgccagtgcgaccgcgaatatgactgtaaagacatgagcgatgaggtgggctgcgtgaatgtgaccctgtgcgagggcccaaataagttcaagtgccactccggtgagtgcatcaccctggacaaggtttgcaatatggcacgggactgccgggattggtcggatgagccgattaaggaatgcggcaccaacgaatgcttggacaacaacggaggctgttcgcatgtgtgtaatgagctgaagatcggatacgagtgcctgtgtcctgatggattccagctggttgcccaacggcggtgcgaggacatcgacgagtgccaagatccagacacctgctcccagctgtgtgtgaatctggaaggtgggtacaagtgccagtgtgaggaagggttccaactggacccgcacactaaggcctgcaaggcggtgggttccattgcgtacctgttcttcaccaaccggcacgaggtccggaagatgaccctcgatcggtccgagtacacttcactgatccccaatctgcgtaacgtggtggcgctcgacaccgaagtcgcatcgaaccgcatatactggagtgacctgagccaaaggatgatctgctctacccagctcgatcgggctcacggtgtctcgtcctacgatactgtgatctcccgcgacatccaggccccggatggcttggcggttgactggatccattcaaatatctactggactgacagcgtgctgggcactgtcagcgtggcggatacgaagggcgtgaagcggaaaaccctgttccgcgaaaacggcagcaagccaagggccatagtggtggatccggtccacggattcatgtattggaccgattggggaaccccagccaaaatcaagaaaggaggcctcaacggagtggatatctacagcctggtcactgagaacatccagtggccgaacggaatcaccctggatctcctgagcgggcgcctctactgggtcgactcgaaactccactcaatctcgtccatcgacgtcaacggcgggaatcgaaaaactatcctggaggacgaaaagcggctcgcacacccgttctcgcttgctgtgttcgaagataaggtgttctggaccgacattatcaacgaagcgatcttttccgcgaaccgcctgactggtagtgacgtcaacctgttggccgagaatctgttgtcaccggaggacatggtgctgttccataacctgacgcaaccgaggggagtcaactggtgtgagcggaccaccctgtctaacgggggttgccagtacctctgtctgccggcgccacaaatcaacccccattcgcccaagttcacctgcgcctgcccagacggaatgctgttggcacgggacatgcggtcctgtctgaccgaagccgaagctgccgtggcgactcaagaaacgtcaaccgtgagactcaaggttagctcgactgccgtgagaacccagcataccactactaggccggtcccggacaccagccggctgcccggggccaccccgggactcaccaccgtggagatcgtcactatgtcacatcaggcactcggtgacgtcgcaggaagagggaatgagaaaaagccgagctccgtgcgggccctgtcaatcgtgctgccgatcgtgcttctggtgtttctttgtctcggagtgttcctcctttggaagaactggcgcctgaagaacattaactcgatcaacttcgataacccagtgtaccagaaaaccacggaggacgaagtgcatatctgtcacaatcaggatggttactcctacccttccagacagatggtatccctggaggatgacgtggca

SEQ ID NO: 16001 - DNA, 2580 bp, synthetic construct
  misc_feature 1..2580: note = source = /note="Description of Artificial Sequence: Synthetic coding sequence"
  source 1..2580: mol_type = other DNA
atgggaccttggggctggaaactccggtggactgttgccttgctactcgccgcagctgggactgccgtcggggatcgatgcgagaggaatgagtttcagtgtcaggacggcaaatgtatctcatacaaatgggtgtgcgatggcagcgccgagtgccaggacggcagcgacgagagccaggaaacctgcttatccgtaacttgcaaatcgggcgatttctcttgtggcggccgagtcaatcgatgtattccacagttctggcgatgcgatggacaagtagactgcgacaatgggtccgatgagcaaggatgtccccccaagacctgcagtcaagatgagttccggtgccatgacgggaagtgtatctcccgccagttcgtgtgtgattctgacagagattgcctggatggttccgatgaggcctcctgcccggtgctgacatgcgggcctgcttctttccagtgcaatagctccacgtgcataccgcaactttgggcatgtgataatgatcccgactgcgaggatgggtccgatgagtggccacagcgctgcagaggcttgtatgtttttcagggggactcctcaccctgctccgcctttgaattccactgcctctcaggcgagtgcattcactccagttggaggtgcgacggcgggcctgactgcaaagacaaatctgacgaagagaattgcgccgtggccacatgccgtcccgatgaatttcaatgtagtgatggcaattgcatccacggcagccgccagtgtgatcgggaatacgattgcaaagacatgtccgacgaagtggggtgcgtgaatgttaccctgtgcgaaggtcctaacaaatttaagtgtcactctggggagtgtattacgctcgataaggtctgtaacatggctcgggactgtagggactggtcggatgagccaatcaaggagtgcggcacaaatgaatgtctcgataacaatggagggtgtagtcatgtgtgcaacgagttgaaaatcggctacgagtgtctctgccccgatggattccagctggtggcacaaagaaggtgtgaggacatagatgagtgtcaggaccctgacacctgctcacagctttgtgtaaacctggaaggaggatataagtgtcagtgcgaggaggggttccagcttgaccctcataccaaggcgtgcaaggctgttggcagcatagcatacctgttttttacaaaccggcacgaggtccggaaaatgaccttagacagatctgaatacacatcactcataccgaacctgcggaatgtagtggccctagatacagaagtggcatccaaccgcatctactggtccgacttgtctcagcgcatgatctgtagcacccaactagaccgagctcatggcgtctcatcctatgatacagtcatctctcgagacatacaggctcctgacggtttggcagtggactggatacattccaatatatactggaccgattccgtattgggcaccgttagtgtagctgatacaaagggagtgaaacgcaaaaccctgttccgcgagaacgggagcaaaccgagagccatcgtcgtcgaccccgtccacgggttcatgtattggacggactggggaacacctgcaaagataaagaaggggggtctgaacggcgttgacatctacagtttggtgacagagaatatccagtggccaaatgggattaccttggatctgctgtcgggacgactctactgggtcgactctaaactccatagcatttcctccatcgacgtgaatggcggcaaccgtaagacaattctggaggacgaaaagaggctggcacacccattctcccttgccgtgttcgaggataaagttttttggaccgacatcatcaatgaggcaatcttctctgctaacaggctcaccggatccgacgtcaaccttttggccgaaaatctcttgtcacccgaagacatggttttgtttcacaacctgactcaacccaggggcgtgaattggtgtgaaaggactactctgtccaatggaggctgccaatatctctgcctgcccgcccctcaaattaatccccactcgcctaagtttacctgcgcctgcccggatggtatgctgctagctagggatatgcgttcctgcctaacagaggccgaagccgccgttgctacccaggaaaccagcactgtgcgactgaaagtgtcttccactgccgttcgcactcagcatacaactactcgacccgtccccgacaccagcagactcccaggcgcaacgcctggtttaacaaccgtggaaatcgtgaccatgtcacatcaggcacttggtgacgtcgctggtcgggggaacgaaaagaagcctagctctgtgcgcgctctgagcattgttctgcccattgttctgctggtttttctgtgtcttggagttttcctcctatggaagaactggcgattgaaaaacataaattccatcaactttgacaacccagtgtatcagaagacgacggaggacgaggtccatatttgtcacaaccaggatggctattcatacccttccaggcagatggtgtcactggaggacgatgtggcc

SEQ ID NO: 16002 - DNA, 2580 bp, synthetic construct
  misc_feature 1..2580: note = source = /note="Description of Artificial Sequence: Synthetic coding sequence"
  source 1..2580: mol_type = other DNA
atgggcccatgggggtggaagctcaggtggacggttgctctgctgcttgctgccgcgggtacagcagtcggcgataggtgcgaaaggaacgaatttcagtgccaggacggcaaatgtatctcatacaaatgggtttgcgacgggagcgcggagtgccaagatggctctgatgaatctcaggagacttgcttgtccgtcacatgcaagagtggagactttagctgcggcggccgggtcaacagatgtataccccaattttggaggtgcgatggacaggtggactgcgataacggctcagacgagcagggatgccctccaaagacttgttcacaagatgagtttcgctgccacgacggtaagtgcatctcccgccagttcgtgtgcgactccgatcgggactgcctagacggcagcgacgaggcttcctgtcctgtgctcacctgcggacctgccagtttccagtgcaactctagcacttgtattccacagctttgggcctgtgataacgatccagattgtgaggatggcagcgacgaatggccacaacggtgtcgcggactttacgtgttccagggggactcttctccctgttccgcatttgaatttcactgcctaagcggagaatgcatccattcctcctggagatgcgatggtggccctgactgcaaggacaagtcagacgaggagaactgtgccgtcgcaacctgtcgccccgatgagtttcagtgctccgatggtaactgcattcacggatcaaggcagtgtgaccgtgagtatgattgtaaggacatgagtgatgaggtcggctgtgtcaatgttacactgtgcgaaggtcccaataagtttaagtgccatagcggggagtgcatcactttagacaaggtctgtaatatggcacgtgactgcagggattggtccgacgagcccatcaaggagtgcggtaccaatgagtgcttagataataacggtggatgttcccatgtgtgcaatgaactgaaaattgggtatgagtgtctatgtcctgatggatttcagctagtggcgcagcgccgttgcgaagatattgacgaatgccaggaccccgatacatgtagtcagctgtgtgtgaaccttgaaggtggctacaagtgtcagtgcgaggagggttttcagctagatccacacacaaaagcatgcaaggccgtgggaagcattgcctatctgttttttaccaaccggcatgaagttcggaagatgactttggaccgctccgagtacacgtcactgataccgaacctgcgaaacgtcgtagctctggataccgaggtagctagcaaccgcatctactggtcagatctctcccagcgcatgatctgcagcacgcagctggaccgtgctcacggcgtctcttcctacgacacagtgatttctagagacatacaagctccagatggcctggctgtggattggatacacagcaatatctactggacagactcggtgctagggacagtctcagtggcggataccaagggagtgaagaggaagacattgttccgagaaaatggctcaaaaccgagagcaattgtagtggatcccgttcacgggtttatgtattggacggactggggcaccccggccaagataaagaagggaggcctgaatggagttgatatttactctttagtgactgagaacattcagtggcccaacggaattaccctggatctccttagtgggcgcctgtactgggtggactccaagctgcacagcatctcgagcattgacgtgaacggcggcaatcggaagactattcttgaagatgaaaagagattggcacaccctttctcccttgcagtctttgaggacaaggtgttttggacagatatcatcaacgaggcaattttttcagcgaaccggcttacggggtctgatgtaaacttactggccgagaatctgctgtcaccagaagatatggtgcttttccataaccttacgcagccccgtggtgtaaattggtgcgaaagaactactctgtctaatgggggctgccagtatctttgccttccagctccccagatcaatccccatagtcccaagttcacttgtgcttgcccggatgggatgctccttgctagggacatgaggagctgtctgaccgaggccgaagcggcggtggctacccaggagaccagtactgtgcggttgaaagtcagctccaccgctgtgcggacgcagcacacgacgacaagaccagtcccagacacatcacgcctgcccggagctacgccggggttaaccactgttgaaatcgtaacaatgagccatcaagccctcggcgacgtcgctggacgcggcaacgaaaaaaaaccctccagtgtcagggcactatctatcgtactgcccattgttctccttgttttcctctgccttggagtgttcctgctttggaagaattggcgtcttaagaatataaatagcatcaacttcgataaccccgtttaccagaagacaaccgaggacgaggtccacatctgtcataatcaggacgggtactcttacccgtcccgccagatggtcagcctggaggatgatgtggcc

SEQ ID NO: 16003 - DNA, 2580 bp, synthetic construct
  misc_feature 1..2580: note = source = /note="Description of Artificial Sequence: Synthetic coding sequence"
  source 1..2580: mol_type = other DNA
atgggaccttggggctggaagttgcgttggaccgtggccttgctgctggcggctgccggaactgctgttggggacagatgtgaacggaatgaattccagtgccaggacggaaagtgcataagctataagtgggtgtgcgatgggtctgccgaatgccaggatgggtctgatgaatcacaggagacttgtctctcagtaacatgtaagagcggcgatttcagctgcggcggcagggtgaaccggtgtatacctcagttctggcggtgcgacgggcaggtggattgtgataatggttctgacgagcagggttgcccccctaaaacatgtagtcaggacgaatttaggtgccatgatggcaaatgcatctcaaggcagtttgtttgtgacagcgatagagactgcttggatggctctgacgaggcatcatgcccagttttgacatgcggcccggcatctttccagtgcaacagcagtacctgcattccacagctgtgggcctgtgacaatgatccggattgtgaggacggctccgacgagtggcctcagaggtgtcgcggtctctatgtctttcagggcgattcctcaccctgcagcgcttttgagtttcactgcctctcaggagaatgcattcattcttcctggcggtgtgacggtgggcccgactgtaaggataaaagcgatgaggagaactgcgctgtggcaacatgccgtccagatgagtttcaatgctctgatggcaactgtatccacggttccagacagtgtgaccgggagtatgactgtaaggatatgtccgacgaagtggggtgcgtgaacgtgaccctttgcgaaggtcctaataagttcaagtgtcatagtggtgagtgtattactctggacaaggtgtgtaacatggcccgtgactgccgcgattggtccgacgaacccatcaaggaatgcggcactaacgaatgcctagacaacaatggtggatgttcacacgtgtgcaatgagctcaaaatagggtatgaatgcctatgtcctgatggttttcagctggtggcccaacggaggtgcgaagatattgatgagtgtcaggacccagatacgtgctctcagctgtgtgtgaacctcgaggggggctacaaatgtcagtgtgaggagggatttcaactggatccgcatactaaggcctgcaaagctgttgggtccatcgcttacttgttctttaccaaccggcacgaggttcggaagatgactctggaccgatctgaatatacaagtctgatcccaaacctccgaaacgtcgtggccctggatacggaagtcgcctcaaacagaatttactggtcggatctctcccagaggatgatctgctccacgcagttggatagggcacatggagtgagttcgtatgacacagtgatctctcgggacatccaggctcccgatggcttggcagttgactggatccatagcaatatatactggactgattctgttctgggcactgtgagtgtcgccgatactaagggggtgaaacgaaaaactctctttcgggagaacggaagcaaacctcgggcaattgttgtggatcctgtgcatggatttatgtactggaccgactgggggacaccagcgaagatcaagaagggcggtttaaatggggttgatatttatagccttgtaaccgagaatatccagtggcctaatggtattacgctggacctgctctcgggtcgtctgtactgggtcgattctaaattgcacagcattagcagcattgacgttaatgggggtaacaggaagactattctggaggatgagaagaggttggcgcatccgtttagtttggcagtcttcgaggataaagtattttggaccgacataataaacgaggcaatttttagtgcaaaccgattgactggatccgatgtcaacctgttggccgagaacctcctgagtcccgaggatatggtgttattccataacctgacacagcctaggggcgtcaattggtgtgagagaacaaccttaagcaacggaggctgccagtacctttgtttgcccgcaccccaaattaatccacactcaccgaagttcacatgcgcctgtcctgatggtatgctactagctcgagatatgcgcagttgcctgactgaagctgaggctgcggtggctactcaggaaacttccactgtaaggctgaaggtgtcgtcaacagcggtccgaacacagcacaccacaacccgacctgtccccgacacatcacgactgcccggcgcaacacctgggctgactactgtcgagatcgtgactatgtcccaccaggccttgggggatgtggcgggccgtggaaatgaaaaaaagcctagcagtgtaagggccctctctatcgtgctccccattgtcttgctcgtcttcttatgcttgggagtgtttctcctttggaagaattggcgactgaaaaacatcaatagcatcaacttcgataaccccgtgtaccagaaaacaacagaagacgaggtgcatatttgtcataaccaggacggttactcctatccatctcggcagatggtgtcactcgaagatgacgtcgct

SEQ ID NO: 16004 - DNA, 2580 bp, synthetic construct
  misc_feature 1..2580: note = source = /note="Description of Artificial Sequence: Synthetic coding sequence"
  source 1..2580: mol_type = other DNA
atgggaccctggggatggaagttgagatggactgtggcacttctcctggcagccgccggtaccgcagtgggagatcggtgtgaaaggaacgaattccagtgtcaagatggaaagtgtatctcctataagtgggtgtgtgatggttccgcagaatgtcaggacggatcggatgagtcccaggaaacttgcctgtcggtgacttgcaaatcgggagacttctcgtgtggaggtcgcgtcaacagatgtattcctcaattttggagatgcgatggccaagtggattgtgacaacgggagcgatgagcaaggttgtccccctaagacttgctcccaagatgaatttcgatgtcatgatggaaaatgtatttcccgtcagtttgtgtgcgattcggaccgcgactgcctcgatggcagcgacgaggcgtcctgtccagtgttgacctgcggtcctgcatcgtttcagtgtaattccagcacctgtattccccaactctgggcatgtgacaacgaccctgattgtgaggacggttcggatgaatggcctcagagatgtcgcggcctttacgtctttcagggagactcctcaccttgttcggctttcgaatttcattgcctgtcgggcgaatgtattcactcgtcgtggcgttgtgacggcggacccgattgtaaggacaagtcggacgaggaaaactgtgcggtcgcaacctgccgcccagatgaatttcaatgttcggacggtaattgcattcatggaagccgtcagtgcgaccgtgaatacgactgcaaggatatgtcagatgaagtgggatgcgtcaatgttaccctgtgcgagggccccaacaagttcaagtgtcattccggagaatgtattactctcgataaggtttgtaacatggcccgcgactgtcgggactggagcgatgaacctatcaaggagtgtggtactaacgaatgccttgataacaatggcggttgttcccatgtttgtaatgaacttaagattggatacgagtgtctttgtcccgatggatttcaactggtcgcacagaggcgttgcgaggacattgatgaatgtcaagacccagacacttgctcgcaactctgtgtcaaccttgaaggagggtacaagtgtcagtgtgaagaaggttttcagctcgacccacataccaaggcatgtaaggcggttggatcgattgcgtacctgttctttactaaccgtcatgaagtgaggaaaatgactttggatagatcggaatacacctcgctgattcccaacctccgcaacgtggttgccctcgataccgaggtggcaagcaacagaatctactggtcggatctgtcccaacgtatgatctgctccactcagctcgatagagcacatggtgtctcatcctacgataccgtgatttcccgggacattcaagcacccgatggcttggcggtcgattggatccatagcaacatttactggactgattccgtgcttggaaccgtgtcagtggcagataccaagggcgtgaagcgtaaaaccctctttagagaaaatggttcaaaaccaagggccattgtagtggatccggtccatggatttatgtactggaccgattggggaaccccagcaaagatcaagaagggtggcctcaatggagtggacatctactctctggtcaccgagaatattcagtggcccaacggtatcactctggatctgctgtccggtaggctctactgggttgactccaagctgcactccatttccagcatcgatgtgaacggcggaaaccggaaaactattctcgaggacgagaagagactcgcgcatcctttcagcctggcagtgtttgaggataaggtgttttggaccgacatcataaacgaggccattttctcggcgaatagacttaccgggtccgacgtgaatctgcttgccgagaacctgctttcacctgaagatatggtgttgtttcataaccttacccaaccgagaggggtcaattggtgtgagcggaccaccctgtcgaatggaggctgtcaatacctgtgccttcctgcgcctcagatcaacccgcactcccccaagttcacctgcgcctgtcccgatggtatgctgctggcaagggatatgagatcctgccttaccgaggcagaagctgcagtggctactcaggaaacttcaacggtgcgccttaaggtgagctcgacggcagtccggactcaacatactaccaccagacctgtccctgatacttcgcgccttccaggagcaacgccagggctcactactgtggaaatcgtgaccatgagccatcaggcactgggagatgtcgccggtcgtggtaatgagaagaagccttcgagcgtcagggcactctcgatagtgcttcctatagtgctgctcgtgtttctgtgtctcggggtctttctgctttggaagaactggcgactgaagaatatcaactccatcaactttgataaccctgtctaccagaaaactactgaagatgaagtgcatatttgccataatcaggacggctactcttacccatcgagacaaatggtgtcactcgaggacgacgtcgca

SEQ ID NO: 16005 - DNA, 2580 bp, synthetic construct
  misc_feature 1..2580: note = source = /note="Description of Artificial Sequence: Synthetic coding sequence"
  source 1..2580: mol_type = other DNA
atgggcccatggggttggaagttgagatggaccgtggcactgcttctggcggctgcggggactgcagtgggggaccggtgtgagaggaacgaattccagtgccaggatggaaagtgtatcagctacaaatgggtgtgtgacggttcagcagaatgtcaagatggttcggacgagtcccaggaaacctgcctgtccgtcacttgtaagtcgggcgacttttcgtgcggcggaagggtgaacagatgtataccacaattttggcgctgcgacggacaagtggactgtgataacggaagcgatgaacagggctgtccccccaagacttgctcgcaagacgaatttaggtgtcacgacggcaagtgtattagcagacaatttgtgtgtgattcggatcgtgattgtcttgatggctcagacgaagcatcctgccctgtgcttacctgtggcccggcctcgttccagtgtaattcatccacctgtattccccaactttgggcttgcgataacgacccggattgcgaagatggctcagatgagtggcctcagaggtgtcgggggctgtacgtgtttcagggtgactcatccccatgctcggcatttgaattccattgtttgtcaggggaatgcatccactcctcatggcgctgtgatggagggccagactgtaaggataaatccgatgaggaaaattgcgcagtcgcaacctgccgacctgatgaatttcaatgttcagacggtaactgtattcacggatctcgccaatgtgatagagaatacgattgtaaggacatgtccgatgaagtgggatgcgtgaacgtgactctctgtgaaggaccaaataagtttaagtgccactctggagaatgcattactctggacaaggtgtgtaatatggcaagagattgtcgggattggtcggacgagcctataaaggaatgtggaactaatgagtgtctggataacaacggtggatgttctcatgtgtgtaacgagctgaaaataggatacgaatgcctttgtcctgacggttttcaactcgtcgcacagagacggtgtgaagatattgacgaatgccaagatccagatacttgtagccaactttgtgttaaccttgaagggggctacaagtgtcaatgtgaagaaggctttcaactcgatcctcacactaaggcatgtaaagcagtcggcagcatagcctatcttttctttactaataggcacgaggtccgaaagatgacccttgaccgctccgaatacacttcgctgataccaaacttgcggaacgtggtggcactggataccgaagtggcatcgaaccgaatatactggtcggatctctcccaacgtatgatttgctcaactcaactggatagagcacatggggtttcttcctacgataccgtgatcagcagggatattcaagctcctgacggactcgcggtcgattggattcattcaaacatctactggaccgactccgtccttggtactgtgtcggtggcggatacgaagggcgtgaagagaaagaccctgttccgggaaaatggtagcaagccaagagcaattgtggtggatccggtgcatggttttatgtactggactgactggggcactccagcaaaaatcaagaagggtggcctcaacggagtggacatctacagcctggtgactgagaatattcaatggccaaacgggatcactctggatcttctctcgggaagattgtattgggtggattcaaaactccacagcatctcgtctatcgacgtgaacggaggaaaccgtaagactatccttgaggatgaaaaacgtcttgcccatcctttttccctcgctgtgtttgaggacaaggtgttctggaccgatatcattaacgaggcaatcttttcggccaatcgacttaccggttcggatgtgaacctcctggcagaaaatctgctttcacccgaggacatggtcctgtttcacaacctcactcagcctcggggagtgaactggtgtgaacgcaccactcttagcaacggaggttgccagtacctctgcctgcccgccccccagattaatcctcacagcccaaagttcacctgcgcatgccccgacggaatgcttcttgcacgcgacatgcgctcctgtctgactgaagcagaggcagccgtggcaactcaggaaacttccactgtgcgtcttaaagtgagctcgaccgccgtgaggactcaacataccaccaccagaccagtccctgacacgtccaggcttcctggggccactcctggtcttacgaccgtggaaattgtaacgatgtcccaccaagccctgggagacgtggcggggcgaggcaacgaaaagaaaccctcctcggtgcgcgcactttcaatcgtcctgcctatagtgcttctggtgtttctgtgtctgggagtgtttctcctctggaagaactggagactcaagaatatcaatagcataaacttcgacaatcctgtctaccaaaagaccactgaggatgaagtccacatctgtcataatcaggacggctactcttatccttcgcggcaaatggtatccctcgaggacgatgtcgcc

SEQ ID NO: 16006 - DNA, 2580 bp, synthetic construct
  misc_feature 1..2580: note = source = /note="Description of Artificial Sequence: Synthetic coding sequence"
  source 1..2580: mol_type = other DNA
atgggtccatggggctggaaactgagatggaccgtcgctcttctgttggcggcggcaggtaccgccgtcggtgaccgctgtgaacgcaacgagttccagtgtcaagatggtaaatgtatttcatacaaatgggtgtgtgatggttccgcagagtgtcaggacggatcagacgaaagccaggaaacttgcctgtcagtcacctgtaaatccggggacttctcctgcggtggacgcgttaaccgctgcattcctcagttctggcgctgtgatggacaagtcgattgcgacaacggctcggatgagcagggttgcccaccaaagacttgctcgcaagatgaattccgatgccatgacggaaagtgcattagccggcaattcgtctgtgattccgatcgcgattgccttgatggaagtgatgaggcatcctgtcccgtattgacctgcggtcctgccagcttccaatgcaacagctccacctgtattcctcaactttgggcttgcgacaatgacccagattgtgaagatggatcagatgagtggcctcaaagatgccgaggactttatgttttccagggggattcctccccttgttcagctttcgaatttcactgcctttcgggtgagtgtattcattcgtcctggagatgtgacgggggtccagactgtaaggacaagtcagatgaggaaaactgtgccgtggcgacctgtagacctgacgaattccaatgcagcgacggaaattgtattcatggatcgaggcagtgtgatcgcgaatacgattgtaaggatatgtcggacgaggtcggatgtgtcaacgtcactctttgcgaaggcccaaacaagtttaagtgtcacagcggagaatgcataacccttgacaaagtgtgtaacatggctagagactgcagggactggtcggacgagccaatcaaagagtgcggtaccaatgagtgcctcgacaacaacggaggttgtagccacgtctgtaatgaacttaagattggatacgaatgtctgtgtccagacggattccaactcgtggcacagagacgatgcgaagatattgatgagtgccaagatcccgacacttgttcccaactgtgtgtgaatctggaagggggctacaagtgtcaatgcgaagaaggatttcaacttgaccctcatacgaaggcatgtaaggcagtgggatccattgcatacctgtttttcaccaatcgccacgaggtgaggaagatgactcttgatcgtagcgaatacactagcctgattcccaatcttcgcaatgtggtggcactcgataccgaagtcgcatccaacaggatctattggtcggacctctcacaacgcatgatttgttcaacccagctggatagagcccatggtgtgtcctcgtacgataccgtgataagccgcgacatccaagcaccggatggcctggccgtggactggattcattccaatatctactggacggactcagtcctcgggactgtctcggttgcggacaccaagggtgtgaagcgcaagaccctgtttcgggaaaacgggagcaagcctagagcgatcgttgtggaccctgtgcatggtttcatgtactggaccgattggggaactccagctaaaatcaagaaaggaggccttaacggagtggacatctactcacttgtgacggaaaacattcaatggccaaatggaattactcttgatcttctttcaggtcgtctgtactgggtggattcaaaactccattccatttccagcatagatgtgaatggaggaaacagaaagactattctggaggatgagaaacggctcgcccatccttttagcctggcggtttttgaggataaagtgttttggacggacattatcaacgaggcaattttcagcgcaaataggcttaccggttccgatgtgaaccttctcgcagaaaacctgctttcacctgaggacatggtcctgttccataatcttacccaacctaggggcgtgaactggtgtgaacgtactactctgtcgaacgggggttgtcaatacctgtgtttgccagcgccgcagattaatccccattcgcctaagttcacgtgtgcatgtccagacggcatgctgctggccagggatatgagatcgtgcctcacggaagcagaagcagccgtcgcaacccaggaaactagcaccgtgcggctcaaggtgtcctcgaccgcagtgcgcacccagcatacgactactcgcccagtccccgatactagcagacttcccggggcaaccccgggactgactaccgtggaaattgtgactatgtcccatcaggcactgggagatgtggcaggaagaggcaatgagaagaagccttcgtcagtgcgagccctctcgattgtgctgcctattgtgcttctggtgttcctgtgccttggagtgtttcttctctggaaaaactggcggctgaagaacatcaatagcatcaactttgataaccctgtctaccagaaaaccaccgaagatgaagtccatatttgtcataatcaggacggatattcgtaccctagccggcaaatggtgagccttgaagatgatgtggcg

SEQ ID NO: 16007 - DNA, 2580 bp, synthetic construct
  misc_feature 1..2580: note = source = /note="Description of Artificial Sequence: Synthetic coding sequence"
  source 1..2580: mol_type = other DNA
atgggtccttgggggtggaagctccgttggaccgtcgcactgctccttgcagctgcaggtaccgcagtcggtgacaggtgcgaacgcaacgagttccagtgtcaagatggaaagtgcattagttacaaatgggtgtgtgatggctcagcagaatgtcaggacggttccgatgaaagccaggaaacttgcctctcggtcacctgtaagtctggagatttttcgtgtggcggcagagttaaccgatgtatcccacaattctggcggtgcgatggccaagtcgattgtgacaatggttcggatgaacaaggatgtcctccaaagacctgttcgcaagatgaatttcgatgccacgatggtaagtgcatttccaggcaatttgtgtgcgattcggatcgagattgtttggacggatcggacgaggcatcgtgccctgtgcttacttgtggccccgcatcgtttcaatgtaactcctccacttgcattccccagctttgggcatgtgataacgatccagactgtgaagatggctcagatgagtggccacagcgctgcaggggactgtacgttttccagggcgattcctcgccgtgttcggcatttgaatttcattgcctgtccggtgaatgcatacatagctcgtggcggtgcgacggtggtcctgactgtaaggataagtcagatgaggagaattgcgcagtggccacttgtaggccggatgaattccaatgctcagatggtaactgtattcacggctcgcgccaatgtgaccgagaatacgattgtaaggatatgtcagatgaagtgggctgtgtcaatgtcactctgtgtgagggacctaacaaattcaaatgtcactccggagaatgtattactcttgataaggtgtgtaacatggcaagggactgccgcgattggtcggatgagcccataaaagaatgtggtactaacgaatgtctggataacaacggaggttgttcacatgtgtgtaatgagctgaagatcggatacgaatgcctttgcccagatggctttcagctggtcgcgcagcgcagatgcgaagatatcgacgagtgtcaagatccagacacgtgttcgcaactgtgtgtgaatctggagggaggatacaagtgtcaatgtgaagaaggtttccagttggatcctcatactaaggcatgtaaggcagttggctccattgcctacctcttctttacgaataggcatgaggtccgcaagatgaccctcgatagaagcgaatacactagccttattcctaacctgcgcaatgtggtcgcccttgatactgaagtggcatcaaatcggatttactggtccgatctgtcacaacgaatgatttgctcgacccagcttgacagagcccatggtgtctcctcgtacgataccgtcatttcacgggatatacaggcaccagacggcctggcggtggactggatccactcgaatatctactggactgactccgtcctgggaaccgtgtcagtggcagacactaagggcgtgaagagaaaaaccctgttccgcgaaaacggatcaaaaccccgggcaattgtggtggaccctgtccacggatttatgtactggactgattggggaacgcccgcaaaaatcaagaagggtggactcaatggagtggacatctattcactggtgactgaaaacattcagtggcccaatggtataactttggatctgctgtcggggcgcctctactgggtggacagcaaacttcattcgattagctcgattgatgtcaacggagggaatcgaaagaccatccttgaagatgaaaaacgacttgcccatccattttcgcttgcggtgtttgaagataaggtcttttggaccgatatcattaacgaagcaatcttctcagcaaatagacttaccggtagcgatgtcaacctccttgcagagaacctcctgagcccagaggatatggtgctgttccataacttgacccagcctagaggagtgaactggtgtgaacgcactactttgtcaaacggaggctgccagtacctttgtttgcctgcaccccaaatcaatccccattctcccaaattcacctgcgcatgtccagacggaatgctgttggcccgagacatgcgctcctgtctgaccgaagcagaagcggcggtggctactcaagaaacctccactgtccggttgaaggtgtcctcaaccgccgtgcgtacccagcacaccactactcgccctgtgcccgacacctcccggcttccaggcgcgacgcccggactcacgaccgtggagatcgtgaccatgtcccatcaagcactgggtgatgttgctggcagaggaaatgagaagaagccctcaagcgtcagagccctgtccatagtcctccccattgtgctgcttgtgttcctgtgtctcggggtgtttcttctttggaagaactggaggcttaagaacattaactccattaactttgacaaccccgtgtaccaaaaaaccaccgaagatgaggtgcacatttgtcacaatcaggatggatactcctacccctctaggcaaatggtgtcacttgaagatgatgtggcc

SEQ ID NO: 16008 - DNA, 2580 bp, synthetic construct
  misc_feature 1..2580: note = source = /note="Description of Artificial Sequence: Synthetic coding sequence"
  source 1..2580: mol_type = other DNA
atggggccttggggctggaaactccgttggacagttgcactgctactagccgcagctgggaccgctgttggggacaggtgcgagagaaatgagtttcagtgccaggatggcaagtgcatcagttacaagtgggtgtgcgatgggagcgccgaatgccaggacggaagcgatgaatcccaagagacctgtctgtccgtaacctgtaagagtggagacttctcctgtggcggccgtgtgaaccggtgtataccacagttctggcggtgtgacggccaggtggactgcgataatggcagcgacgagcagggctgccctccaaagacctgctcccaggatgaattccggtgccacgacggtaagtgcatatcacggcagttcgtttgcgattccgaccgcgattgtcttgatgggtcagatgaagcctcttgtcctgtattgacctgtggcccagcttctttccagtgtaattccagtacatgtattcctcaactgtgggcatgcgacaatgatccagactgcgaggacggatccgatgagtggccacagaggtgtagaggcctgtacgtgtttcagggggattccagtccatgctccgcctttgagtttcactgcctgagcggcgaatgcatccacagctcttggcggtgcgacggcggcccagactgtaaggataagagtgacgaggaaaactgcgccgtggcaacatgtagacccgatgaattccagtgtagcgacggcaactgcatacatggctcaaggcaatgtgatcgggagtacgactgcaaagacatgagcgacgaggtcggctgcgtcaatgttacactatgcgagggaccaaacaagtttaagtgccacagtggagaatgtataaccctggacaaagtttgcaatatggctcgtgactgcagagattggagcgacgaacctattaaagaatgtggtactaacgagtgcctagacaacaacggcggctgcagccacgtttgcaatgagctaaaaataggttatgagtgcctatgtcccgacggcttccagctcgtggcacagcggcggtgtgaggatattgatgagtgccaggaccctgacacttgctcccagctatgtgtgaatctcgaaggtggttataagtgccagtgtgaagaggggttccagttagacccacatactaaggcctgcaaggctgtgggatctattgcctatctcttttttaccaaccggcatgaggtgaggaaaatgacactggaccggtctgaatacaccagtctgatacccaacctacggaatgtagttgcactcgacactgaagttgcctctaatcgaatctactggagtgatctgtcacaacggatgatatgcagcacacagctggatagggcccacggcgtatcttcttatgataccgttatctcacgcgacattcaggccccagatggacttgctgtcgactggattcactccaacatctactggaccgattctgtgctggggactgtttccgtggcagataccaagggcgtgaagagaaagactctattcagggagaacggatctaagccacgggctatcgttgttgaccccgtgcacggctttatgtattggacagattgggggaccccagctaaaataaagaaaggcggcctgaacggagtcgatatatattccttagttaccgagaacatccagtggccaaacggaattactctggatttactttctggcagactgtactgggttgatagtaagctacactctatcagctccatagacgtgaacggtggcaaccgcaaaaccattctagaagatgaaaaacgtctggcccaccccttcagcttagctgtgttcgaagacaaagtgttttggacagacatcatcaacgaagccatttttagcgccaaccggctaaccggtagtgacgtgaacttactggcagaaaatttactgagcccagaggatatggtgctcttccacaacctgactcagccacgcggggtgaactggtgtgaaaggaccactctgagcaacggaggctgccagtatctttgtctgccggctccccagataaacccacactctccaaaattcacctgcgcatgccccgacgggatgctactggctcgggacatgcggagttgcctgacagaagccgaagcagcagtggccactcaggaaaccagtactgtcagactgaaagtgagcagcactgcagtgaggacccagcacactaccacccgtcctgttcccgacacctcccgcctgcctggtgccacacccggccttaccacagttgagatcgtcaccatgtcccaccaggcattgggagatgttgcagggcgcggcaatgaaaagaaaccaagttccgtgcgcgctctgagcatcgtgttaccaattgttctgctggtgtttctgtgtctgggcgtgtttttactgtggaagaactggcgcctgaagaatataaatagtatcaatttcgacaatccagtttatcagaaaaccaccgaagacgaggtacacatttgccacaaccaagacggttatagctaccccagcagacagatggtgtccctagaagacgatgttgca

SEQ ID NO: 16009 - DNA, 2580 bp, synthetic construct
  misc_feature 1..2580: note = source = /note="Description of Artificial Sequence: Synthetic coding sequence"
  source 1..2580: mol_type = other DNA
atgggcccctggggctggaagttgagatggacggtagcgctgctattggcagccgccggcactgcagtgggggataggtgcgaacgaaatgaatttcagtgtcaggatggaaaatgtatctcctacaaatgggtctgtgatgggtccgccgaatgccaggacggcagtgacgagtcacaggagacatgcttgtctgtcacctgcaagtctggcgacttctcttgcgggggacgggtcaaccggtgcattcctcaattctggaggtgcgatggccaggtcgactgcgacaatggaagtgatgagcagggatgtcctccaaagacctgtagtcaggatgaattcaggtgtcacgacggcaaatgcattagccgacagtttgtttgcgattccgacagagattgtctcgatggatctgacgaggcctcttgtccggtcctgacatgcggccctgcctccttccagtgtaatagcagtacatgcatccctcagttgtgggcttgtgataacgatccagactgcgaggatggctctgatgagtggcctcaacggtgcaggggtctctacgtgttccagggtgattcttccccctgcagcgctttcgaatttcattgtctaagcggtgagtgtatacattcgagctggaggtgtgacggtggaccagactgtaaggacaagagcgacgaggaaaactgtgcggtcgcgacgtgtcgcccagacgagtttcagtgttcagatggcaactgcatacacgggtcccggcagtgtgatcgggagtacgattgtaaggacatgtctgatgaggttggctgcgtgaatgttactttgtgcgagggacccaacaagtttaaatgccattccggggaatgcataacactggataaggtatgcaacatggctagggactgtagagattggagcgatgagcccatcaaagaatgtggaacgaacgagtgcctcgacaacaatggggggtgttctcacgtctgcaatgaactgaagatcgggtacgagtgtctctgtccagatggctttcagcttgtcgctcaaagaaggtgcgaggatattgacgaatgccaggaccccgacacctgctcccaactttgcgtgaaccttgagggtggatataaatgtcaatgcgaggagggattccagttggacccgcacaccaaggcttgcaaagccgtgggctctatagcttatctgttcttcacaaatcgacatgaggttcggaagatgaccctcgataggagtgagtatacaagcctgatacctaacctgaggaatgtggtcgcactggacacagaggtggctagtaataggatatattggagcgacttatcacaaagaatgatctgcagcactcagctggacagggcccacggtgtctcgtcatatgacacagttataagtagggatattcaagctcctgatggcctagccgtggattggattcatagcaacatttattggacggacagcgttctgggcacagtgtcagtcgcagacactaaaggagtcaaacgaaaaaccctctttcgagaaaatggctcgaaaccccgcgcaatagtcgtcgatcccgtgcacggttttatgtattggactgattggggaacaccagccaaaatcaagaagggaggactaaatggggttgacatctattcacttgttaccgagaatattcagtggcccaacggcattaccctcgatctgctgagtgggcggctctactgggtggattcaaagctccattccatttcctccattgatgtaaacggaggaaaccgtaaaaccatcctggaggatgagaagcggctcgcccaccctttttcactcgcagtcttcgaggataaagtgttttggaccgacatcatcaacgaagccatcttcagcgctaaccgactcaccggatcagacgtcaatctgttggcagaaaacctgttgtctcctgaggacatggtgctgtttcataatctcacccagcccagaggggtcaactggtgtgagcgaaccaccctcagtaatggagggtgtcagtatctctgcctccccgctccccagatcaacccacactcaccaaaattcacctgcgcgtgtcccgatggcatgctgttggctcgcgatatgcgctcatgtctcactgaggcggaggccgcagtcgcaactcaagaaacaagtacagtgcggttaaaggtgagcagtaccgctgtccgaacccagcatacaacaacgcggcctgtaccagataccagtagacttccaggcgccactcctgggttaacgaccgtggagatcgtgacaatgagccaccaggctctgggcgacgttgcagggagaggaaacgagaagaaaccgtcgtccgttcgggcccttagcatcgtgctaccgattgtcttgctggtgtttctgtgccttggggtgtttctgttgtggaaaaactggcgtttgaaaaacatcaactcgattaacttcgataaccctgtgtaccagaaaaccacagaggatgaagtgcacatatgccacaaccaggatggatattcttacccatctcgccagatggtgagcctggaggacgacgtcgcc

SEQ ID NO: 16010 - DNA, 2580 bp, synthetic construct
  misc_feature 1..2580: note = source = /note="Description of Artificial Sequence: Synthetic coding sequence"
  source 1..2580: mol_type = other DNA
atgggcccttgggggtggaagctgcggtggacggttgccctgcttctcgctgccgccgggacggccgtgggcgaccgatgcgaacgcaacgagtttcaatgccaggatggcaaatgcatttcctacaagtgggtgtgtgatggcagcgctgaatgtcaggatggctctgatgagtcccaggaaacctgtctgtcagtgacttgtaagagcggagactttagttgtggaggtagagtgaatcgctgtatcccccagttctggcgatgcgacggtcaagttgactgcgataatggctctgatgagcagggttgtcctccgaagacttgctctcaggatgaatttcggtgtcatgacggcaaatgtattagccggcagttcgtctgcgattcagacagggactgcctcgatggtagcgacgaggcaagctgccccgtgctgacctgcggccctgccagcttccagtgcaacagctctacgtgtatacctcaactgtgggcgtgcgataatgatccagattgcgaagacggctctgatgaatggccccagagatgtcgcggactgtatgtgttccaaggcgacagcagtccatgcagcgcttttgaatttcactgcttgagcggagaatgcatacatagctcttggcgatgtgatggtgggcccgactgtaaggataagtccgatgaggaaaactgcgccgtggccacctgcagaccggacgagttccagtgttcagatggcaattgtatccacggcagcaggcagtgtgaccgagagtatgattgcaaggatatgagtgatgaggtcggctgcgtcaacgtgaccttgtgcgagggacccaacaagtttaaatgtcactctggcgagtgcatcactctcgataaagtgtgtaatatggccagagattgccgcgattggtccgacgagcctatcaaggaatgtggcactaatgagtgcctggacaataatggaggatgctctcacgtctgtaatgagctcaagattggatacgaatgtttgtgcccagacgggtttcagctggtcgcacagaggcgctgtgaggacattgatgagtgtcaggatcctgacacatgttcacagctgtgtgtaaatctcgagggtggctacaagtgccagtgcgaggagggtttccagctggacccacatacaaaagcttgtaaagccgttggctcaatagcctacttgtttttcacaaatagacatgaggtgcgcaaaatgaccctggacaggtccgaatatacatctctcatccccaacctgagaaacgtggtcgcccttgacaccgaggtcgcctcaaacaggatttattggagtgatttgagccagcggatgatttgtagcacgcagcttgaccgagcacacggtgtttcatcttatgacaccgtaatctctagggacattcaggcccccgacggcctggcggtggactggatccatagtaatatctattggacagatagtgttctgggcactgtttccgtcgcggacacaaaaggggtgaaacggaaaaccttgttccgggaaaacggatcaaaacccagggctatcgtggtcgatccggttcatggtttcatgtactggaccgactgggggacgcctgccaagatcaaaaaaggcgggctcaacggcgtggatatctacagtctggtgaccgaaaacattcagtggcccaacggcatcacccttgacctgctgtctggcagactctattgggtggattccaaactccatagtatcagttccatagatgttaacgggggaaacagaaaaaccatcctggaggacgagaagagactggcccacccattttccctcgcagtcttcgaagacaaagtgttctggactgacatcatcaatgaagccatcttttcagctaatagactgacggggtctgacgtcaatctgctcgcagaaaacttgctgtcccccgaggatatggtgctgtttcacaacctcactcagccgaggggcgtgaattggtgtgagcggaccactctgtccaatggggggtgccagtacctgtgcttgcctgccccccagatcaaccctcatagccctaagtttacttgtgcgtgccctgatgggatgctgcttgcgcgggacatgagatcctgccttactgaggcagaggcggctgttgcgactcaagagaccagcacagttcgccttaaggtaagcagtactgccgtgaggacacagcataccactaccagacccgtcccggacaccagccggctgcctggagctacacctggcctgacaacagttgagattgttactatgagccaccaagcattgggggatgtagccggacggggcaacgagaagaagccttcatccgttcgcgcgcttagcatagtccttccaattgtgctgcttgtgttcctttgccttggtgtcttcctcttgtggaaaaactggaggctgaaaaatataaatagcataaatttcgacaatcctgtgtatcagaagacgacggaggacgaggtgcatatatgccacaaccaggatggatatagctatccctctaggcaaatggtttctttggaggacgatgtggcg

SEQ ID NO: 16011 - DNA, 2580 bp, synthetic construct
  misc_feature 1..2580: note = source = /note="Description of Artificial Sequence: Synthetic coding sequence"
  source 1..2580: mol_type = other DNA
atgggaccgtggggatggaagctgcggtggaccgtggcactgctcttggccgccgccggaacggcagtcggcgacaggtgcgagagaaatgaattccagtgtcaggacggtaaatgtatcagttacaaatgggtgtgcgacggtagcgccgaatgccaagacggatcggacgaatcccaagaaacttgtctgtcagtgacctgcaagagcggagacttttcctgcggagggagagtgaatcgctgcatcccgcagttctggcggtgtgacggccaggtagactgcgataacgggagcgatgaacaggggtgcccgcctaaaacctgcagccaggatgaatttcggtgccacgatggcaagtgcatctcacgacaattcgtttgcgactcggacagggattgtctcgatggatcggatgaggcaagctgtccggtgcttacgtgcggcccggcttcgttccagtgcaattcgagcacctgtatccctcaattgtgggcgtgtgataacgacccagactgcgaggacggaagcgatgagtggccgcaaaggtgccgcggactgtacgtgttccagggagacagctcgccgtgttccgcgttcgaatttcactgcctgtcgggagaatgcatccatagctcctggagatgcgacggcggaccagattgcaaagacaagtccgacgaggagaactgtgctgttgcgacttgtcgcccggatgagtttcagtgctcggatggcaattgcatccacggttcccgccaatgtgaccgggagtacgactgtaaagatatgtcggacgaggtcggatgcgtgaacgtgactctgtgcgagggaccaaacaagttcaagtgccactcaggcgaatgcattaccctcgacaaagtgtgcaacatggccagagattgtcgggactggtcggatgaaccgatcaaagaatgcggaactaatgagtgtcttgacaacaatggcggatgttcgcatgtctgcaatgaactgaagatcggatacgaatgcctctgcccagacggtttccaattggtcgcccagcggcgttgcgaggacattgacgagtgccaagaccccgacacgtgttcccagctgtgtgtgaatcttgaaggtggatacaagtgccagtgcgaagagggattccagttggatccgcatactaaggcttgcaaagcagtgggttccatcgcgtacctgtttttcactaaccgccacgaagtccgcaagatgaccttggaccgctccgagtacacttcgctcatacctaaccttaggaacgtggtcgccttggatacggaagtggcctccaaccggatctactggtccgatctgtctcaacgaatgatctgctcaacccagctcgacagagctcatggggtgtcgtcctacgataccgtgatctcgagagatatccaggcccccgacgggctggcagtggactggatccattcaaacatctactggaccgactcagtcctgggaaccgtctcagtggccgacacgaagggtgtcaagcgcaagacccttttccgggaaaatggctcaaagcctcgggctatcgtggtggaccccgtccacggattcatgtattggactgattggggcactcccgcgaagatcaagaagggaggcctcaacggggtggatatctactcccttgtgaccgaaaatattcagtggccaaatgggattaccctggacctgctgtctggccgcctgtactgggtcgatagcaagctgcatagcatttcctcaatcgacgtgaatggaggaaaccggaaaaccatcctggaggatgaaaagcggctggcacaccctttcagcctcgcagtgttcgaagataaggtcttttggaccgacatcatcaacgaggccatcttctcagctaacaggttgaccggaagcgacgtgaacctcctcgcggagaacctgctttcacctgaagatatggtgctcttccataacctgactcaaccacgcggggttaattggtgcgaaagaactactctgtccaatggaggatgccaatacctgtgcctgccggcgccacagatcaacccgcactcccccaagttcacctgcgcatgcccggacggaatgctgctggcgcgcgacatgcgctcctgcctgactgaagccgaagcggccgtggccacccaggagacttcgaccgtgagactgaaggtgtctagcactgccgtccgcacccagcatactaccactcggccggtcccggacacgtcccggctcccaggcgcgacccccggcctgactaccgtggagatcgtgactatgtcgcaccaggctctcggagacgtcgccggtagagggaacgaaaagaaaccatcaagcgtgcgcgccctgtccatcgtcctgcctattgtcctcctcgtgtttctgtgcctgggcgtgttcctcctctggaagaactggcgcctgaagaacatcaactcgattaatttcgataacccggtgtaccaaaaaaccactgaagatgaggttcacatctgccacaaccaagatggatattcgtacccatcgaggcagatggtgagcctcgaggatgacgtggct

SEQ ID NO: 16012 - DNA, 2580 bp, synthetic construct
  misc_feature 1..2580: note = source = /note="Description of Artificial Sequence: Synthetic coding sequence"
  source 1..2580: mol_type = other DNA
atgggaccatgggggtggaagctcagatggactgtggcgctcctgcttgcggccgctggcactgccgtaggagatagatgtgagaggaacgaattccaatgtcaggatggtaaatgcatcagctacaaatgggtgtgcgacggaagcgctgagtgtcaagatggtagcgacgaatcgcaagaaacgtgcctgtccgttacttgtaagtcaggagacttcagctgcggcgggcgagtcaacagatgcataccgcaattctggaggtgcgatggacaggtggactgcgacaatgggtccgacgagcaaggatgcccgcctaagacgtgctcacaggacgagtttcgctgccacgatggaaagtgcatttcccgccagttcgtgtgtgacagcgaccgcgattgcctcgacggctccgacgaagcatcgtgtcctgtgttgacctgcggaccggcatcatttcagtgcaactcctctacctgcatcccccagctgtgggcgtgtgataacgaccctgactgcgaggacgggtcggatgaatggcctcaacggtgcagaggactgtacgtgtttcaaggcgactcatccccatgcagcgcgttcgagttccattgcctctccggtgagtgcatccactcgtcatggcgctgcgatggagggcccgactgcaaagataagtcagacgaagaaaactgcgcagtggccacctgtcgcccagacgaattccagtgctctgacggaaactgcattcacggatctcggcaatgcgatcgagaatacgactgtaaggacatgtccgatgaagtgggctgtgtcaatgtgacgctgtgtgagggaccgaacaagttcaagtgccactcaggcgaatgcatcactttggacaaggtttgcaatatggctcgggattgccgcgactggtcggacgaacccatcaaagaatgcggaaccaatgaatgtctggacaacaatggaggctgcagccacgtgtgtaacgagctgaagatcggctacgaatgcctgtgcccagatggttttcagctcgtcgcgcagagaagatgtgaggacatcgatgaatgccaggaccctgacacttgttcgcagctttgcgtcaacctggaaggtgggtacaaatgtcagtgcgaagaaggatttcagttggatccacacactaaggcgtgtaaggcggtgggctccatcgcttatctgttcttcacgaataggcacgaggtgcggaaaatgactctggaccggtcagagtacacctccttgatccctaatctgcggaacgtcgtggctctggacaccgaagttgcctcgaatagaatctactggtcagacctgtcccagcggatgatctgctcaacccagctggatagggcccacggggtgagctcatatgacacggtaatctcgcgggacatccaggcccccgatggacttgctgtggactggatccatagcaatatctactggaccgattcagtgctgggcaccgtctctgtagccgatactaagggagtgaaaagaaaaactctgttccgggaaaatgggagcaaaccacgtgccattgtcgtggatccggtgcatggtttcatgtactggactgactggggaacgccggccaagataaagaagggcggactgaacggagtggacatctactcgctggtgaccgagaacatccagtggccgaacggaattaccctggacctcctttcgggtagactctactgggtcgactccaagctccattcaatcagctccatcgatgtgaatggcggtaaccgcaagactatcctggaggacgagaaacgcctcgcccatccgttcagcctggccgtgttcgaggataaggttttctggactgatatcatcaacgaggcaatcttcagcgcgaaccggctcacggggtccgatgtgaacctgctggctgagaacctgttgagcccagaggacatggtactgttccataacttgactcagccccgcggagtcaattggtgcgaaaggaccaccctctccaacggtgggtgtcaatacttgtgccttcctgccccgcagattaacccgcacagccccaagttcacctgtgcgtgccccgatggaatgctgctcgcacgtgacatgcggtcgtgcctcaccgaagccgaagctgcggtggcgactcaagaaacttcaaccgtccgcctgaaagtgtcgtcgaccgcggtgcgcactcagcacacgaccacccggccggtgccagataccagccgcctcccaggagccactccggggctgaccaccgtggaaattgtcactatgtcgcatcaagctctgggtgacgtggcaggccgcggaaacgagaagaagccgagcagcgttcgggcgttgagcatcgtcctcccaatagtgctgcttgtctttctctgcctgggtgtctttttgctctggaagaattggcgcctgaagaacatcaactcgatcaatttcgataacccggtttaccaaaaaaccactgaagatgaggtgcacatctgtcacaatcaggatggatattcgtacccttccagacagatggtgtcgctcgaggacgacgtggcc

SEQ ID NO: 16013 - DNA, 2580 bp, synthetic construct
  misc_feature 1..2580: note = source = /note="Description of Artificial Sequence: Synthetic coding sequence"
  source 1..2580: mol_type = other DNA
atgggtccttggggttggaagctgcggtggaccgtggcactccttcttgcggctgcaggcaccgccgtgggagacagatgtgagagaaatgagtttcaatgccaggatggtaagtgcatttcgtacaaatgggtctgcgacggctctgcagaatgccaagatgggtcggacgaatcgcaagagacttgtctcagcgtgacttgcaaatccggagatttttcgtgtggtggaagagtcaacaggtgtattcctcagttctggcgctgtgatggtcaggtcgattgtgacaacggctcggatgaacagggatgccctcccaagacctgttcgcaagacgagtttcgatgtcatgatggcaagtgtatctcgcgccagtttgtctgcgactccgatagagattgtcttgatggctctgatgaggcctcctgtcctgtgcttacttgtggtcccgcatcctttcaatgcaactcctctacctgcatcccacagttgtgggcgtgcgataatgatccagattgtgaggacggatcagacgagtggccgcagcggtgtaggggactgtacgtgtttcaaggagactcgtccccatgttcggcatttgagtttcactgcctctccggggaatgtattcattcttcctggcgttgcgacggaggccctgattgtaaagataagtccgacgaggaaaactgcgcagtggccacgtgtagaccagatgagtttcagtgttcggatggcaactgcattcatggcagccggcaatgtgatagggaatacgactgtaaggatatgtcagatgaggtcggctgcgtgaacgtgacgctgtgcgaaggcccaaacaaattcaaatgtcacagcggtgaatgtattaccctggacaaggtctgtaacatggcccgtgactgtcgcgattggtcggacgagcccattaaggaatgcggtaccaatgaatgcctcgataacaatggcggatgctcgcacgtgtgtaacgaactgaaaatcgggtacgagtgtctttgtccggacggttttcagttggttgcacagcgcaggtgtgaagatatagatgagtgtcaagatcccgatacttgctcacaactgtgtgtcaacctggagggtggctacaaatgtcagtgtgaggaagggtttcaactggaccctcataccaaggcatgtaaggcagtggggtccatcgcttacctcttctttaccaaccgccatgaagtccgcaagatgaccctcgaccgatctgaatacacgagcctgatccctaacctgaggaatgtcgtggcacttgatactgaggttgcaagcaaccgtatctactggagcgatctcagccaaaggatgatttgcagcactcagcttgatagagcacacggagtgtcctcatatgataccgtcatctcgcgggacattcaggctcccgacggtctggcggtggactggatccattccaacatttactggacggacagcgttctggggaccgtgagcgtggcagatactaaaggggtgaagcgaaagactcttttcagggaaaacggatcgaagcccagggccatcgtggtcgatcctgtgcacggttttatgtactggaccgattggggcaccccagccaagatcaagaaaggtggacttaacggagtcgacatatactcgctcgtgactgagaacattcagtggcctaacggcattactctcgacctgctttcaggccggctctactgggtcgactcaaagctccattcaatctcgtcaatagacgtaaatggcggaaaccgcaagacgattctggaagatgaaaagagattggcgcatcccttttcgcttgccgtgttcgaggataaggtgttttggaccgatatcatcaacgaagcaatcttttcagcaaatcggcttaccggatccgatgtgaacctgcttgcggaaaacctgctctcacctgaggacatggtgctgtttcataacctgacccaaccgaggggggtaaattggtgtgaaagaactaccttgtcgaatggtgggtgtcaatacctgtgccttcctgcgccgcagattaaccctcactcaccaaaattcacgtgcgcgtgtccagacggtatgctgctcgcacgagacatgagatcctgcctgactgaggcagaagccgccgtggccacgcaggaaactagcactgtgagacttaaggtcagctcgaccgccgtcaggacgcagcataccaccactcggcctgtgccagatacgagccgacttccaggagcaactcctggactgactaccgtggagatcgtgacgatgtcgcaccaagctctcggtgatgtggcaggacgagggaatgagaagaagccttcgtccgtccgggcactctcaatcgtgcttccaattgtgctgcttgtgtttctgtgtttgggcgtctttttgctctggaagaattggcgactcaagaacattaactcaattaacttcgacaaccccgtgtaccaaaagactaccgaagatgaggttcatatttgtcataaccaggacggttacagctaccctagccggcaaatggtgtcgctggaggacgacgttgca

SEQ ID NO: 16014 - DNA, 2580 bp, synthetic construct
  misc_feature 1..2580: note = source = /note="Description of Artificial Sequence: Synthetic coding sequence"
  source 1..2580: mol_type = other DNA
atgggcccatggggatggaaactgaggtggactgttgccttgctgcttgccgctgcggggacagcagtcggtgatcggtgtgaacggaacgaatttcagtgccaggacgggaaatgcatttcctacaaatgggtgtgtgacggttctgctgagtgtcaggacgggagtgatgagagccaggagacctgtctgtccgtcacgtgtaaatcaggagatttcagctgcgggggacgcgtgaatcgatgtattcctcagttctggcgctgtgatggtcaggtcgactgcgataacggcagcgatgagcagggatgcccccctaaaacttgctcccaggatgagttcaggtgccacgatggcaagtgcattagcagacagttcgtctgcgactccgatagagattgcctcgatggctccgacgaggcttcctgtccagtactgacatgcggccctgcaagttttcaatgtaatagttctacctgtattccacagctgtgggcatgcgacaatgacccagattgcgaggatggtagtgatgaatggccacaaaggtgcaggggattgtatgtgttccagggagattcctcgccttgctccgccttcgaattccattgcctaagcggtgagtgcatccatagcagctggaggtgtgacggcgggcctgactgtaaggataagagcgatgaagaaaattgcgcagtggccacttgcaggcctgatgaattccagtgttctgatggcaactgcatacatgggtcccggcagtgtgaccgggagtatgactgcaaggatatgagtgatgaggtaggttgcgtgaatgtaaccttgtgcgaaggaccgaataaatttaaatgccactccggagaatgcatcacattagacaaggtctgtaatatggctcgggattgtcgggactggagcgacgaaccgattaaggaatgcggcactaacgaatgtttagacaacaatggtggctgctcccatgtgtgtaatgaactaaagatcgggtacgagtgcctgtgtcccgacggttttcaactggtcgcacagcggaggtgtgaagatattgacgaatgccaggaccctgacacttgttcgcaactgtgtgtgaatttggagggagggtacaagtgtcagtgcgaagaggggtttcagctcgacccacacacaaaggcctgcaaggcagtcggctctattgcttatctgttctttactaaccgccacgaggtgcgaaaaatgacacttgatcgtagcgagtatacctccctgattcctaacctccgcaacgtggtggccctggatacagaagttgcttcaaatcgtatttactggagtgacctttcccaaagaatgatatgtagcactcagctggatcgggcccatggggtctccagttacgacactgttatctcaagggacattcaagcgccagacggccttgccgtggattggatccatagcaacatttactggaccgatagtgtgctcggaaccgtgagtgtggccgacaccaagggggtcaagcggaagacactgtttcgggagaatgggtcgaagcccagagctatagtggtcgacccagtccacggcttcatgtattggaccgattggggcacgcccgccaagatcaagaagggaggtcttaacggggtagatatatactcccttgtgaccgagaacattcagtggcccaacggaattactctcgacctactgtcgggacggttatactgggtcgacagtaaactgcatagtatcagctccatcgatgttaatggaggaaacagaaagaccatcttagaggatgaaaaaaggctggctcacccatttagtctcgcagtgtttgaggacaaggtgttttggacggacatcattaacgaggccatcttctcggccaacaggttaaccggaagcgatgtaaacttgttagccgagaatctgctgagcccagaggacatggtgctgtttcacaacctcacacagccccggggagtgaattggtgcgagaggactaccctgagtaatggcgggtgccagtatctttgtctgccagcacctcaaatcaacccccacagcccaaagttcacctgcgcctgtccagacggaatgttgttagctcgtgatatgcgcagctgtctgaccgaagctgaagccgccgttgccacccaggaaacctccacagtgagattgaaggtgtcaagtacagccgtgcgaacccagcatactacaacccgccccgtacctgatacaagtcggctgccgggcgcaaccccgggcttaacaactgtggagatcgttacaatgtctcaccaggccctaggtgacgtagctgggagaggcaacgaaaagaagccttccagcgtaagagctctttccatcgtgctgcccatagtgttgcttgtctttctgtgtctcggggtgttccttctgtggaagaactggagactgaagaatattaattctataaacttcgataacccagtatatcagaagacaaccgaggatgaggtgcacatatgtcacaatcaggatggatacagttacccatcccgccagatggttagccttgaagatgacgtggcc

SEQ ID NO: 16015 - DNA, 2580 bp, synthetic construct
  misc_feature 1..2580: note = source = /note="Description of Artificial Sequence: Synthetic coding sequence"
  source 1..2580: mol_type = other DNA
atggggccttggggatggaaattgagatggacagtagccctcttactcgctgcagcagggactgctgttggtgacagatgcgaacgcaatgaatttcaatgtcaggatggtaaatgtatttcctacaagtgggtttgtgacggaagtgctgaatgccaggacggatccgacgagagtcaagagacttgtttaagcgttacttgtaagtccggtgattttagttgcggtggacgcgtgaataggtgtattccacagttttggaggtgtgatggtcaagtggattgcgataacggatcagacgaacaggggtgccctcctaagacttgctctcaagatgagttcaggtgtcacgacggaaagtgcatttctaggcaatttgtttgcgatagcgatagggattgcttggatgggtcagatgaagccagctgcccggtccttacttgcggccctgccagcttccaatgtaactcgtcgacttgcatcccccaactctgggcttgtgataacgatccagattgtgaagatggtagtgacgagtggcctcagcgttgcagaggactttatgtattccaaggcgattcttcgccatgttcagctttcgaatttcattgccttagtggagaatgcattcattcctcatggagatgcgatgggggtcccgattgtaaagacaagtcggatgaagagaattgtgctgtggcaacctgtagaccagatgaatttcagtgctccgacggtaattgcatccatggttccagacagtgtgatcgtgagtatgactgtaaagacatgtctgatgaagtcggttgtgtcaacgttaccctttgtgaaggcccaaataagtttaagtgtcactccggagagtgcattacattggacaaagtttgcaatatggctagggattgtagggattggtccgacgaacctatcaaggagtgcggaacaaacgagtgcttagataacaacgggggttgtagccatgtatgtaacgaactgaaaataggatatgagtgcttgtgtccagatggctttcagcttgttgcacaacggcggtgtgaggatatcgatgaatgccaagacccggatacttgctctcaattatgcgttaatctggaaggggggtacaagtgtcagtgcgaggagggcttccagctagatccacatacaaaagcatgcaaagctgtaggaagtattgcttatcttttttttacgaaccggcacgaggtacgcaagatgactcttgacagatccgagtacacatccctaatcccaaatttaagaaatgtcgttgctctagacactgaggtggccagcaatagaatctattggtccgatctttctcaaaggatgatttgctcgacacaacttgacagagctcacggtgtgagttcgtatgacacggttatcagtagggatatacaagctccagatggcctggccgttgattggatccattctaatatttactggactgatagtgtgttgggaactgttagtgtggcggataccaagggagtaaagcggaaaactctttttcgcgagaatggttccaagcctagagcgattgttgtcgatcctgtgcatggctttatgtactggaccgattgggggactccggcaaaaattaagaagggcggattgaatggcgtcgacatctacagtctggttacggagaacatccagtggcctaacggcattactctagatctcctatcaggtcgtttatactgggttgattctaagcttcacagtatctcctccatcgacgtaaacgggggaaacagaaaaaccatattggaggatgaaaaaagactcgcacatcctttcagtctcgcagtttttgaggataaagtgttttggacagacatcataaatgaagctattttctccgccaataggctcacaggtagtgatgtgaatcttttggcagaaaatttactatcacctgaagatatggttttgtttcataaccttactcaaccaaggggggtcaattggtgtgaaaggaccactctctcgaacggtggatgccagtacttgtgtcttcctgctccacagattaacccccactcgccaaaattcacatgtgcttgtccagacggaatgcttctagcacgcgatatgcgtagttgcttgacagaagctgaagcggctgttgccacccaagaaacatctactgttcgattgaaggttagttccaccgctgtccggacgcaacacacgacgaccaggcccgttcctgatacaagtaggttgcctggtgccacccccggacttactacggtggaaatcgtgactatgtcgcatcaagcactaggagacgtagcaggtagaggaaacgaaaagaaaccatcttcagtgagggcgttatcgatcgtgttgcctatcgttctgttggtgtttttgtgtctgggcgtttttttactctggaaaaattggagacttaagaacatcaatagtattaatttcgataacccagtgtatcaaaagacaactgaggatgaggtccatatttgccataaccaggatgggtatagctatccatcccgccaaatggtgtcattggaagatgatgtagct

SEQ ID NO: 16016 - DNA, 2580 bp, synthetic construct
  misc_feature 1..2580: note = source = /note="Description of Artificial Sequence: Synthetic coding sequence"
  source 1..2580: mol_type = other DNA
atgggtccttggggctggaaactcaggtggactgtcgccctgcttctcgccgccgcagggaccgccgtgggcgataggtgtgagcggaacgaatttcagtgtcaggatgggaaatgtataagctataagtgggtgtgcgatggaagtgccgagtgccaggacggtagcgatgaatcgcaggaaacatgcctgagtgtgacctgtaagtccggagacttctcatgcggaggacgcgttaaccggtgcataccccagttctggagatgcgacggtcaagtcgactgcgacaatggatcagatgagcaaggctgtcctcctaaaacctgctctcaggacgagttcaggtgccatgatgggaagtgtatttctcggcagttcgtatgtgattcagaccgggattgcctagatggttcagacgaagcctcctgtccagttctgacctgtgggccagctagctttcagtgtaacagctcaacatgcatccctcaattgtgggcatgcgacaatgatcccgactgcgaggatgggagcgacgagtggccacagcggtgtcgggggctgtacgtgtttcagggggattcttccccatgttcagcgtttgagtttcactgtttatctggagagtgcatccacagtagctggcggtgtgacgggggaccggactgcaaggacaagagcgacgaggagaattgtgcagtggccacgtgccgtcccgatgagtttcagtgttccgacggcaactgtatacatggtagtaggcaatgcgaccgggagtacgattgtaaagatatgtcagacgaagtcggctgtgttaatgtcactctgtgcgagggccccaataagttcaagtgtcactcaggtgaatgtattacccttgacaaggtgtgcaacatggcccgtgattgtcgagattggtcagacgagcccatcaaggagtgcggaactaatgagtgcctggacaataatggcggatgctcgcatgtatgcaacgagctcaaaataggttatgaatgtctgtgtcccgatggatttcagctagtggcacagaggcggtgtgaagatattgatgaatgccaggaccctgacacctgtagccagctgtgcgtaaacctggaaggcggctacaagtgccagtgtgaagaggggttccagttagacccgcacactaaggcatgtaaagccgtaggttcaatcgcgtacctttttttcacaaacagacacgaagtcagaaaaatgaccttagaccgctctgagtacacctctctcataccaaacctaaggaatgtagtcgctcttgacaccgaggttgctagcaatagaatctactggtccgatctatctcagagaatgatttgctccacgcagctggatcgcgcacacggggtgtccagttatgatacagttatatcgcgcgacatacaggcacctgacggtctcgccgttgattggatccactctaacatttactggactgactccgtgctgggtaccgtgagcgtggccgacacaaaaggtgtgaagagaaagaccctgttcagagaaaatggttctaaacccagggcaatcgtcgtggatccagtgcatggtttcatgtattggactgactggggtaccccggctaagatcaagaaaggcgggttgaacggtgtagatatatattctttagtcacagagaacattcaatggcccaatggcattactctggacctgctgagcgggcgactgtactgggtcgactccaaattgcactctatctcaagcatagacgtgaatggcggtaataggaaaacgattctcgaggacgaaaagcgcctcgcccatccgttcagcctggccgtcttcgaggacaaggtattctggactgatatcataaatgaggcaatattctcagcaaaccgacttaccggttctgacgtcaacctgctcgccgagaatttactctcccctgaagatatggtgctcttccataacttgacccagccacggggcgtgaattggtgcgagcgcacaactctgtccaatggaggttgtcagtacctctgtctaccggcgccccagatcaatccccactctcctaagttcacttgtgcttgcccggacggtatgttactggcgcgggacatgaggtcatgtttgaccgaggcagaggccgctgtggccacccaagaaacaagcaccgtgcgactgaaagtttctagtactgcagtgagaacccagcatacaacaaccagaccagtgcccgatacaagcagattacctggggcgactcccggtcttaccacagtggaaatcgtcaccatgagtcaccaggccctgggtgacgtggccgggcgcgggaatgaaaagaaaccgtcatccgtgagggcactttctattgtgttacctatagtccttctcgtgtttctgtgtctgggcgtgttcctgctatggaaaaactggcggcttaaaaacataaattcgatcaatttcgacaatccagtgtatcagaagaccacagaggacgaggtgcacatttgtcacaaccaagatggttatagctacccatctcggcagatggtgagtctcgaagatgatgtagct

SEQ ID NO: 16017 - DNA, 2580 bp, synthetic construct
  misc_feature 1..2580: note = source = /note="Description of Artificial Sequence: Synthetic coding sequence"
  source 1..2580: mol_type = other DNA
atggggccatggggatggaaattgcggtggaccgtggctcttctcttggccgccgctgggacggccgtgggggaccggtgtgagagaaatgaattccagtgtcaggacggtaaatgcatcagctacaagtgggtgtgtgatggcagtgccgagtgccaggatggctctgatgagtcccaagagacatgcctgtccgttacctgtaagtctggggactttagttgtggcggacgggtgaaccgttgcatccctcagttctggcgctgtgatggtcaggtggattgcgataacggctctgatgagcagggttgtcctccgaaaacctgtagtcaggacgagtttcgatgtcatgatggaaagtgtatctcccgccagttcgtgtgtgatagcgatcgggactgtctggacgggtctgacgaggcaagctgtccggttctcacatgtggccctgcgtcctttcaatgtaattcaagcacctgtatcccgcagctctgggcatgcgataatgatcccgactgtgaggatggatccgatgagtggccgcagcgatgccggggcctttacgtctttcagggagactcaagcccatgttctgcctttgagttccactgtctgtccggcgagtgcatccactcatcctggcggtgtgacggcggccctgattgtaaagacaaatcagacgaggagaactgcgctgtcgccacctgccggcctgacgagttccagtgttcagatggcaactgcatccatgggtcccgtcaatgtgaccgcgagtacgactgtaaggatatgtccgatgaagtcgggtgcgtaaacgtcactctctgcgagggtcccaacaagtttaaatgccacagcggggagtgtatcaccttggataaggtctgtaacatggctcgagattgcagagactggtctgatgagccgattaaggaatgcggtaccaatgagtgcctggataataatggtgggtgttcacacgtgtgtaatgaactgaagatcggatacgagtgtttatgtcctgacggatttcagctcgtggctcagcgccggtgcgaagacattgatgagtgccaagacccggacacatgtagccagctctgtgtgaatttggagggaggttacaagtgtcaatgcgaagaaggtttccaactcgacccacatactaaggcctgcaaggccgtggggtctatcgcctacctcttctttaccaaccgccacgaagtcaggaagatgacccttgaccggagcgaatatacctccctcattcccaatttgagaaacgtagttgccctggacaccgaagttgcgtcaaataggatctactggagtgatctaagccaaagaatgatctgcagcacgcaactggacagagcgcacggggtatccagttatgataccgtcatctcccgcgacatccaggctcccgacggtctcgccgtggactggatccatagcaacatctattggaccgattcagttcttggaacagtgtctgtggcagataccaaaggcgtgaagaggaagaccctgttcagggagaatggttccaaacctcgagccatcgtagtggacccagtgcacggatttatgtattggaccgattggggcacacctgccaaaataaagaagggaggcctgaacggagtggacatttactcactggttacagaaaacatccagtggcccaacggcattacccttgacctattatccggtcgcctctattgggtggatagcaagctccactctatcagttcaatcgacgttaacggagggaaccgaaaaacgatcttggaggacgagaaaagactcgctcaccccttctccctcgccgtatttgaagacaaggttttttggaccgacatcattaatgaggcaatttttagcgccaacagacttactgggtccgacgtcaacctgctggcagagaatttgctaagtccagaagatatggtcctattccacaatttaacgcaacctagaggggtgaactggtgcgaacgcactaccctgtccaacggaggctgccagtatctgtgcctgccggctccacagataaatccacacagccctaaattcacatgtgcttgtcccgatggaatgctgctggcacgcgatatgagatcttgtctgacagaggccgaagcagcggtggctacacaggagacatccactgttcggctgaaggtgtcctctaccgccgtgcgaacacagcacaccactacccgtcctgtgcccgacacatcccgcttacctggtgcaaccccaggcctgaccacagtggaaattgtcacaatgagccaccaggcccttggagacgttgcaggacgtggaaatgaaaagaagcccagttcagtcagagccttaagcattgtgctgcccattgtcctgctcgtgttcctctgtctcggggtattcctattgtggaagaattggcgacttaagaacattaacagtattaatttcgacaacccagtttaccagaagacaacagaggatgaggtgcatatatgccacaatcaagacggctactcttatccgtcaaggcagatggtgtctcttgaagatgatgtagcc

SEQ ID NO: 16018 - DNA, 2580 bp, synthetic construct
  misc_feature 1..2580: note = source = /note="Description of Artificial Sequence: Synthetic coding sequence"
  source 1..2580: mol_type = other DNA
atgggtccgtggggctggaagctcagatggacagtggcgctattgttggccgccgctggcacggcggtcggtgataggtgcgagaggaacgagtttcagtgccaggacgggaagtgcatctcctataagtgggtctgcgacggcagcgccgaatgccaggatggcagcgacgagtcgcaggagacctgcctatccgtcacgtgcaagagcggcgatttttcctgtggcggccgtgtgaaccgatgcatcccccaattttggcgatgtgatggacaggtcgactgcgacaacggctcggatgagcaaggatgcccccccaaaacatgtagccaagacgaattccggtgccatgacggtaagtgtatcagtcgccagttcgtctgcgactcggatagggactgtctagatggctcagatgaggcctcgtgcccggtccttacgtgcggccccgcctcatttcaatgcaactccagcacatgcattccacagctgtgggcgtgcgacaatgatccggactgtgaggacggatccgacgagtggccgcagaggtgtcgaggcctgtatgtgttccaaggagactcgtcgccatgctcggcctttgaatttcactgcttgtccggagaatgcatccatagcagctggcgatgcgacggcggccctgattgcaaggacaagagcgatgaggaaaactgcgcggtggcaacgtgccgcccagacgaatttcagtgctcggatggcaactgcatccacggctcgcgtcagtgtgaccgcgaatatgactgcaaggacatgtcagacgaggtcggctgcgtcaacgtgacactgtgcgagggccccaataagttcaagtgccactccggagagtgtatcacattagataaggtttgcaacatggcccgcgattgccgcgactggtcggacgagccaatcaaagagtgtggcactaatgagtgcctggacaataatggcggatgttcccacgtgtgtaacgagttgaagattggttatgagtgcttgtgtccagacgggttccagcttgttgctcagaggagatgcgaagatatcgatgagtgccaagacccggacacatgtagtcaactctgtgtcaacctggagggcggctacaaatgtcagtgcgaagagggatttcagttggatccgcataccaaggcatgcaaagctgtcggctcgatcgcgtacctattttttacgaaccgtcacgaagtccgtaaaatgactttggatcgctccgagtacacatctctaatccccaaccttcgcaatgtggtcgcgctggacactgaggtagccagcaataggatctactggagcgatttgtcccagcgcatgatatgctcgacacaattggatagggcacacggcgtcagttcgtacgacaccgtgatttcgcgcgacattcaggccccagatggccttgccgtcgattggatacattctaacatctactggacagactccgtgctaggcacggtaagcgtcgccgatacgaagggagtgaagaggaaaaccctgttccgcgagaacggcagcaagcctcgcgctatagtcgtggatccggttcacggattcatgtattggacggactggggcactccggcaaagatcaaaaaaggcggactgaatggtgtagatatttatagtcttgtgactgagaacatccaatggcccaatggcataaccttggacctcctctcaggccgcctgtattgggtagacagcaaactgcacagcatttcaagtatagatgtgaacggaggaaaccgtaagactatcctggaggacgaaaaacgtctcgcccacccctttagccttgctgtgttcgaggacaaagttttctggacagatataatcaatgaggccatcttcagcgctaatcgcctcacaggctccgatgtgaatctgctagctgagaacctactgtccccggaggatatggtcctgtttcacaacctaacccaaccacgtggtgtgaactggtgcgagaggaccaccctgtccaacggaggctgccagtacttgtgccttccggcaccccaaatcaatccccatagcccaaagtttacatgcgcgtgccccgatggtatgctgcttgccagggacatgaggagctgcctgaccgaggcggaggccgccgtggccacccaggaaacatcgaccgtccgcctgaaagtaagtagcaccgcggttaggacgcaacacaccacaacccgtcccgtccccgacaccagccgtttgcccggcgccacgcccggtctgactaccgttgagatagtgacaatgagccaccaagcgttgggagacgtagcaggacgaggaaacgagaagaaaccgagctcggtaagagccctgagcatagtactccctatagtgctactggtgttcctgtgtctgggggtgttcctgctgtggaagaactggcggttgaagaatattaacagtatcaacttcgacaacccagtgtaccaaaagaccacggaggacgaggtgcacatctgccacaatcaggatggttatagttatccgtcccgccagatggtgtctctcgaagacgacgtggcc

SEQ ID NO: 16019 - DNA, 2580 bp, synthetic construct
  misc_feature 1..2580: note = source = /note="Description of Artificial Sequence: Synthetic coding sequence"
  source 1..2580: mol_type = other DNA
atgggcccctggggttggaaacttcgctggactgtggcgctgctgctggccgccgcaggtacagcagttggagataggtgcgaacgtaatgagtttcagtgccaggatggaaaatgcatcagctacaagtgggtgtgcgatggtagtgcggaatgtcaggacggatctgatgaaagccaagaaacctgtctctccgtgacttgtaaatccggagacttctcttgcggcggtagggtgaaccgatgtataccccagttctggagatgcgatggacaggttgactgcgataacggttctgatgagcaagggtgtccacccaagacctgctcacaggacgagtttcggtgccacgacggaaaatgtattagtagacagtttgtgtgcgactctgaccgtgactgcttagatggaagtgacgaggcgtcctgccccgtcttgacctgcgggcccgctagttttcagtgcaacagctccacgtgtattccccagctctgggcctgcgataacgatcctgactgtgaagacggcagcgatgagtggcctcagcggtgccgggggctgtacgtgtttcaaggggacagtagcccctgcagcgcatttgaatttcattgcttaagcggcgagtgtatccactcatcctggaggtgcgatgggggcccagactgcaaagacaagagtgatgaggagaattgcgccgtagcgacatgccgtcctgatgaatttcagtgcagcgatggcaactgcatccacggcagcaggcagtgcgacagagagtatgactgtaaggacatgtctgacgaggtggggtgtgttaatgtgacattgtgcgagggtcccaacaaattcaagtgccactcaggggagtgtattaccttggacaaggtgtgcaatatggcccgagattgccgcgactggtctgatgagcccattaaggaatgtggcacaaatgaatgtctggataacaacgggggctgctctcatgtctgtaacgaacttaaaataggatacgagtgtctctgccccgatggtttccagttggtggcacagcggcggtgtgaggacattgatgagtgccaggatcccgacacctgctcccagctctgtgtcaatctagaaggggggtataaatgccaatgtgaggaaggctttcagctcgacccacacacaaaggcctgtaaggctgtgggcagtatagcatacctgttctttactaaccggcacgaggtccgcaagatgacgttagacagaagcgagtatacaagcctcatccccaatctgcggaacgttgtggcacttgacacagaagttgcgagcaatagaatctattggagtgatctgagtcagagaatgatttgttctacccagctggaccgggcccatggggtaagtagctatgacacggtcatcagtagagatatccaagccccggacggacttgccgttgattggatccactccaatatatactggacagattctgttcttgggaccgtctcggttgccgacaccaagggagttaagcgcaagaccctgttccgcgagaatgggtctaagccaagagcgatagtggttgacccggttcacggcttcatgtactggactgattggggaacacctgccaagattaagaaaggggggctaaacggggtagatatctattctctcgtgactgagaacatacaatggcctaacgggatcactctggacctcctaagcggtcgactctactgggtggattcgaaacttcattcaatcagttccatagacgtgaacggcggaaaccgaaagactattttggaagatgagaagcgccttgcccatcccttctcactggcggtatttgaggacaaggtattctggacagacataatcaatgaagccatattttcagcgaatcgcttaacaggttcggacgtgaacttgcttgccgaaaatttactgagtcccgaggatatggttctgtttcacaatctgacacaaccccgaggagtcaattggtgcgaaaggactacgttatccaacggaggctgtcagtacttatgtcttccggctcctcagatcaatccccattctcccaaattcacctgtgcctgccccgatggcatgctcctggcaagagatatgcggagttgcttgacagaggcagaggcagcagttgcaacacaggagaccagcactgtaaggctgaaagttagttccactgccgtgcgtactcagcatactaccactcgccctgtccccgacaccagcagactcccaggagcgactcccggactgactaccgtggagattgtgaccatgtctcaccaggctcttggagacgttgcaggccggggtaacgagaaaaaaccttctagcgttagggcccttagtatcgtccttcccattgtactcttggttttcctatgcctgggcgtgttcctactgtggaagaactggagacttaagaacattaatagcataaatttcgacaacccggtgtaccagaaaactacggaagacgaggtgcacatatgtcacaatcaagacgggtatagttatccttctaggcaaatggtgagcctcgaagatgatgttgcg

SEQ ID NO: 16020 - DNA, 2580 bp, synthetic construct
  misc_feature 1..2580: note = source = /note="Description of Artificial Sequence: Synthetic coding sequence"
  source 1..2580: mol_type = other DNA
atgggaccatggggctggaaactgagatggaccgtggcgctactattagccgctgcgggaacagctgtcggcgatagatgtgaacggaacgaattccagtgccaggatggcaaatgcatctcgtataagtgggtctgcgatgggagtgcagaatgtcaggatggctccgacgaatcgcaggaaacatgtctttctgtgacctgcaaatctggggatttctcatgtggtgggagagtgaaccgttgtattcctcagttctggaggtgtgacgggcaggtggattgtgacaatgggagtgacgaacagggttgcccgcctaagacgtgtagtcaggacgaattccggtgtcatgacgggaagtgcatatcaaggcagttcgtctgtgacagcgatcgcgattgtctggatggcagtgacgaggcttcttgccccgtgctcacgtgcggccccgcttcattccagtgtaactcttctacgtgcatcccccagctttgggcctgcgacaatgatcccgactgcgaggacggttcagacgaatggccccagcggtgcaggggtttgtatgttttccaaggcgattcctctccatgtagcgcctttgagttccactgcctctccggggaatgcatccactctagttggcgatgtgatgggggaccagactgcaaggataagtccgatgaagagaactgcgccgtcgctacatgtcggcccgacgaatttcagtgctctgacgggaattgtatacacggttctcggcagtgcgatagagaatacgactgcaaggacatgagcgatgaggtcggctgcgtgaacgtgaccctgtgcgaaggacccaacaagttcaaatgccactctggcgagtgcataactctcgacaaagtgtgtaacatggcccgcgactgtcgggactggtcagacgagcccataaaggaatgcggaacgaacgaatgcctagacaacaacggggggtgctctcatgtgtgtaacgaactgaagattggctacgaatgcctgtgtcctgatggcttccaacttgtcgcacagagaaggtgcgaggacatagacgagtgccaggaccctgacacatgcagccagctgtgcgtgaatttagaaggtggatacaagtgtcagtgtgaggaaggatttcaactcgatccacatactaaggcatgcaaagcagtgggctcaatcgcttatctcttctttaccaatcgccacgaagtaagaaaaatgaccctggaccggtcggagtatacctcattgatccctaatctgaggaatgtagtcgccctcgataccgaggtggcctcaaacaggatctattggtccgacctgagtcagaggatgatctgctctacccaacttgatcgggcacacggtgtttctagctacgacacggtcatctcaagggacatccaggctccagacggtctagcagtggactggatacacagcaacatatactggaccgattctgtacttggtacggtatcagtggcagacacgaaaggagtgaaacggaagacccttttcagggagaatgggtctaagccccgcgccatcgtggtggaccccgtacatgggttcatgtactggacagattgggggactcctgcaaagatcaaaaagggcggactgaacggagtcgacatctacagtctggtcacagaaaacattcagtggccaaacggaataaccctggatctcctgtccggtaggctgtactgggtagactctaaattgcactctataagctcaatagacgtgaatggcgggaatcggaagaccatcttagaggatgagaagaggctagcacaccccttctcactagctgtcttcgaagataaggtcttctggaccgacatcataaatgaagcgattttttcagctaatagattaaccggcagcgatgtgaacctactcgcggagaatctcttatcacccgaggacatggtgctttttcataatctcacacagcctcggggggtgaactggtgcgaacgtactaccctgagtaacggtggatgccaatacctttgcttgccggcgccacagataaacccccactccccaaaattcacgtgcgcttgtccggatggcatgctgctagcgcgtgacatgaggagctgcctcactgaggcagaagctgcagtggccacgcaggaaacatctaccgtgcggctgaaagtttctagcaccgccgtgaggactcaacatacaaccacgcgtcccgtccctgacacgtcacggctcccaggtgccacccccggattgacaaccgtggaaatagtgaccatgtctcatcaggctctcggagacgtagcgggccgagggaatgaaaagaagccgtcaagcgtccgggcccttagcatagtgctccctattgtgctcctcgtatttctatgtctgggggtcttcctcttgtggaagaattggcggctgaagaatatcaatagtattaatttcgacaaccctgtctatcagaaaacaacagaagacgaggtgcacatctgccacaatcaagacgggtacagttatccttcaaggcagatggttagtctggaggacgacgtggcg

SEQ ID NO: 16021 - DNA, 2580 bp, synthetic construct
  misc_feature 1..2580: note = source = /note="Description of Artificial Sequence: Synthetic coding sequence"
  source 1..2580: mol_type = other DNA
atgggaccctggggctggaaactcaggtggaccgtagcgctgttgctggcggccgcaggcactgcagtgggcgaccggtgcgagcgcaatgagtttcagtgccaggacgggaaatgcatatcgtacaagtgggtctgcgatggctctgcagaatgtcaggacggaagcgacgaaagtcaggagacctgtctgtctgtgacgtgcaaaagcggcgatttttcttgtgggggacgggtcaatcggtgcattccacagttttggcgctgcgacggtcaggtcgactgtgacaatgggtcagacgaacaaggctgtccacctaagacatgttcccaggatgagttccgatgtcacgatggcaagtgtatttctcgccagttcgtatgcgattcggaccgcgactgtctcgacggatccgacgaagcatcttgccctgtcctgacgtgtggaccagcttcctttcaatgcaactcttctacctgtattccacagctttgggcctgtgacaacgatcccgactgcgaggatggttctgacgagtggccgcaaaggtgtcgtggactctatgtgtttcagggcgatagctccccctgttccgctttcgaattccactgtctctcaggggaatgcatccacagctcctggaggtgcgacgggggtcctgactgtaaggataagtccgatgaagaaaattgtgctgtggctacgtgtcggcctgatgaatttcaatgttccgatggcaactgtattcacgggtcccgacagtgtgatcgtgaatatgactgcaaggatatgagtgatgaggtcgggtgtgtcaacgtgaccctgtgtgaaggtcccaataagtttaaatgtcattccggcgagtgtatcacgctcgataaagtctgcaacatggcacgtgactgcagagactggagcgatgagcctataaaggaatgtgggaccaacgagtgcctggacaataacgggggatgcagtcacgtatgtaatgaattgaaaattggctacgagtgcctatgcccagacggcttccagctggtggcccaacgtcgctgcgaggatatcgatgaatgccaggaccctgatacatgctctcaactgtgtgtgaatctggaaggaggctataaatgtcagtgcgaagaagggtttcagctggacccacacaccaaggcatgtaaggcggtcggtagcatcgcttacctgttctttactaatcggcatgaggtgcgcaagatgaccttagatcggtccgaatacacctccttaatcccgaacctcaggaacgtggtcgcccttgacaccgaagtggcttcaaatcgaatctactggtctgatctgtcccagcgaatgatctgtagtacccagctagatcgggcccatggagtctcctcctatgataccgtgatctcaagagacatccaagcaccagatggcttagctgtcgattggatccactcaaacatctattggaccgactcagttttaggaacagtttccgtcgcagacaccaagggtgtcaagcgcaaaaccctctttcgcgaaaatggaagtaaacctcgcgcgattgtcgtggatccggtccacggatttatgtactggaccgactggggcacaccggcgaagattaagaaggggggactgaatggagtagatatctattcactcgttacagagaacattcagtggcccaacggcattacactagacttgctgagcggccgcctgtattgggtcgattccaaactgcactccatcagcagtatcgatgttaacggagggaatcgcaaaactatactcgaggacgaaaagagactggcacacccctttagcttggccgtcttcgaagacaaggttttctggaccgacattatcaatgaggcaatcttcagtgcaaatagacttacagggagtgacgtgaacttgctggcagaaaatttgctgagccctgaggacatggttctgttccataacctgacacagccacgaggagtgaactggtgtgagagaaccaccctttccaatggtggctgtcagtatctctgtttgccagctccacagattaacccacacagcccgaagtttacatgtgcatgccctgacgggatgctgctcgcacgcgacatgagaagctgcctgacggaggccgaggcggccgtggccacccaagagacaagcaccgtcagactgaaggtgtcctctaccgccgttaggacgcagcatacaacaaccaggccggtgccagataccagccgcctgcctggcgccacacctgggctgacaactgtggagatcgtaaccatgtcccatcaagcactgggagatgtcgctggccgcggaaatgagaagaaacctagctccgttcgggcgctttccatagtactcccgatcgtccttctggtttttttgtgcttaggagtgttccttctctggaagaactggcggctgaaaaatatcaactctataaattttgacaatccagtctaccagaagaccacagaagacgaggttcacatctgtcataaccaggatggctactcctacccgtcccgtcagatggtctccctggaagatgacgttgcg

SEQ ID NO: 16022 - DNA, 2580 bp, synthetic construct
  misc_feature 1..2580: note = source = /note="Description of Artificial Sequence: Synthetic coding sequence"
  source 1..2580: mol_type = other DNA
atgggtccgtggggttggaaattacgatggacggttgcgttattattagcggcggcgggtacggcggtaggtgatcgatgtgaacgtaatgaatttcaatgtcaagatggtaaatgtatatcgtataaatgggtttgtgatggttcggcggaatgtcaagatggttcggatgaatcgcaagaaacgtgtttatcggtaacgtgtaaatcgggtgatttttcgtgtggtggtcgagtaaatcgttgtataccgcaattttggcgatgtgatggtcaagtagattgtgataatggttcggatgaacaaggttgtccgccgaaaacgtgttcgcaagatgaatttcgatgtcatgatggtaaatgtatatcgcgtcaatttgtatgtgattcggatcgtgattgtctagatggttcggatgaagcgtcgtgtccggttctaacgtgtggtccggcgtcgtttcaatgtaattcgtcgacgtgtataccgcaactatgggcgtgtgataatgatccggattgtgaagatggttcggatgaatggccgcaacgatgtcgaggtttatatgtatttcaaggtgattcgtcgccgtgttcggcgtttgaatttcattgtttatcgggtgaatgtatacattcgtcgtggcgatgtgatggtggtccggattgtaaagataaatcggatgaagaaaattgtgcggttgcgacgtgtcgtccggatgaatttcaatgttcggatggtaattgtatacatggttcgcgacaatgtgatcgagaatatgattgtaaagatatgtcggatgaagtaggttgtgttaatgttacgttatgtgaaggtccgaataaatttaaatgtcattcgggtgaatgtataacgttagataaagtatgtaatatggcgcgtgattgtcgagattggtcggatgaaccgataaaagaatgtggtacgaatgaatgtctagataataatggtggttgttcgcatgtatgtaatgaactaaaaataggttatgaatgtttatgtccggatggttttcaattagtagcgcaacgacgttgtgaagatatagatgaatgtcaagatccggatacgtgttcgcaattatgtgtaaatctagaaggtggttataaatgtcaatgtgaagaaggttttcaattagatccgcatacgaaagcgtgtaaagcggttggttcgatagcgtatttattttttacgaatcgtcatgaagtacgtaaaatgacgctagatcgatcggaatatacgtcgctaataccgaatttacgaaatgtagtagcgctagatacggaagttgcgtcgaatcgtatatattggtcggatttatcgcaacgaatgatatgttcgacgcaactagatcgtgcgcatggtgtatcgtcgtatgatacggttatatcgcgtgatatacaagcgccggatggtttagcggttgattggatacattcgaatatatattggacggattcggttttaggtacggtatcggttgcggatacgaaaggtgttaaacgtaaaacgttatttcgtgaaaatggttcgaaaccgcgtgcgatagtagttgatccggttcatggttttatgtattggacggattggggtacgccggcgaaaataaaaaaaggtggtctaaatggtgtagatatatattcgctagtaacggaaaatatacaatggccgaatggtataacgttagatctattatcgggtcgtctatattgggtagattcgaaattacattcgatatcgtcgatagatgtaaatggtggtaatcgtaaaacgatattagaagatgaaaaacgtctagcgcatccgttttcgctagcggtatttgaagataaagtattttggacggatataataaatgaagcgatattttcggcgaatcgtctaacgggttcggatgtaaatctactagcggaaaatttactatcgccggaagatatggtactatttcataatttaacgcaaccgcgtggtgtaaattggtgtgaacgtacgacgctatcgaatggtggttgtcaatatctatgtctaccggcgccgcaaataaatccgcattcgccgaaatttacgtgtgcgtgtccggatggtatgttactagcgcgtgatatgcgatcgtgtctaacggaagcggaagcggcggttgcgacgcaagaaacgtcgacggttcgattaaaagtttcgtcgacggcggtacgtacgcaacatacgacgacgcgaccggttccggatacgtcgcgtctaccgggtgcgacgccgggtttaacgacggttgaaatagtaacgatgtcgcatcaagcgctaggtgatgtagcgggtcgaggtaatgaaaaaaaaccgtcgtcggtacgtgcgttatcgatagttttaccgatagtattattagtatttttatgtttaggtgtttttttattatggaaaaattggcgtctaaaaaatataaattcgataaattttgataatccggtttatcaaaaaacgacggaagatgaagtacatatatgtcataatcaagatggttattcgtatccgtcgcgtcaaatggtatcgttagaagatgatgtagcg

SEQ ID NO: 16023 - DNA, 2580 bp, synthetic construct
  misc_feature 1..2580: note = source = /note="Description of Artificial Sequence: Synthetic coding sequence"
  source 1..2580: mol_type = other DNA
atgggaccttggggttggaagttgagatggactgtggccctgttgttggcggcggctggcaccgcggtgggagacagatgtgagagaaacgaattccaatgccaggatggcaagtgtatctcttataagtgggtctgcgatggttccgcagaatgccaagatggctctgacgagagccaggagacatgcctctctgtgacctgtaaaagcggagatttcagctgtgggggtcgcgtgaatcgttgcatcccacaattttggcggtgtgatggacaggtggattgtgacaacggtagtgacgagcaaggctgtccccctaagacctgttcccaagacgagttccgctgccatgacggcaagtgcatcagtaggcagtttgtttgcgattcagatagggactgtctggatggatctgacgaggccagttgtccagtgttaacctgcggcccggcgagcttccaatgtaatagctctacttgtataccccagctttgggcttgcgataatgacccggactgcgaagatggcagtgatgaatggccacaaagatgcagaggattgtacgtcttccagggagactctagtccttgcagcgcctttgagttccactgtctgagcggtgagtgcattcattctagctggcggtgcgacggcggacctgattgtaaggacaagagtgatgaggagaactgtgccgtggcgacatgtcgcccggatgagttccagtgctccgatggaaactgtatccacggatcacgacaatgcgacagggaatacgattgcaaggatatgagtgacgaggtagggtgcgtgaacgttacactttgcgagggaccaaacaaatttaaatgccattctggcgagtgtatcacactggataaagtctgcaacatggcccgcgactgtagggattggtccgacgagccaatcaaagaatgtggcacaaacgagtgtctcgacaacaacgggggttgcagccacgtttgcaacgagctgaaaatcggttatgagtgtctgtgccctgatggcttccagctggtggcgcagcggagatgtgaggacattgatgaatgccaggatccagatacatgttcccaactctgtgtcaatctggagggcggctataagtgccagtgtgaagaaggattccagctcgatccgcacacaaaggcgtgcaaagctgtaggatccatagcttatcttttcttcactaatcggcatgaggttagaaagatgaccctggatcgctcggaatatacctctctgatccctaacctccgcaacgtggtggcgcttgacaccgaggttgccagtaacagaatctactggagcgacctcagccagcgcatgatctgttcaacccagcttgacagggctcatggcgtgagcagctatgacacggttataagtcgagacattcaggctcccgatgggctggccgtggattggatccacagcaacatttattggaccgacagtgttcttggcactgtgagcgtggctgataccaagggggtgaaaaggaagaccctctttagggaaaacgggagcaagccccgtgccatcgtggttgacccggtccatggattcatgtactggaccgactggggaaccccagctaaaataaagaaaggaggactgaatggcgtggacatctactcactcgtgaccgagaacatccaatggcccaacggcatcacactagatctgcttagcgggcgcttgtactgggttgattccaaactgcacagcataagcagcatcgacgtgaacggaggaaaccgaaaaacgatactcgaggatgagaaacgcctggcacatcctttcagcctggcggtgtttgaagacaaggtgttctggaccgacatcattaatgaagctattttctctgcaaacagactcaccggaagcgatgtgaatcttcttgctgaaaacctgctgagtccagaagatatggttctgtttcataatctgacacagcctaggggagtcaactggtgtgaacggaccaccctctccaacgggggttgtcaatatttgtgcttgccagctcctcaaataaatccacatagccccaaatttacatgtgcctgccccgacggcatgctgctggcacgagatatgcggagctgcttgaccgaggcagaggcagccgtggctacacaggagacatctaccgtgcggctgaaagtgagtagtacagcagtcagaacccagcatactaccacccggccagtgccagatacttcaagactgcccggcgcaacacccgggctgacaacagttgagatagtgacaatgagccaccaggccctcggcgatgtggcaggacgcgggaacgagaagaaaccttccagcgtgagggccctcagcatcgtgttgccaatagtcctgttggtctttctgtgcctgggggtgttccttctctggaagaactggaggctgaaaaacattaactctatcaacttcgataatcctgtgtaccagaaaacaaccgaagacgaggttcacatttgtcacaaccaggacggatattcctaccccagccgccagatggtctcactggaggatgacgttgca

SEQ ID NO: 16024 - DNA, 2580 bp, synthetic construct
  misc_feature 1..2580: note = source = /note="Description of Artificial Sequence: Synthetic coding sequence"
  source 1..2580: mol_type = other DNA
atgggcccgtggggctggaaactccggtggacggtggccctgttgctggccgccgcaggaaccgcggtgggagatcgctgcgaacgcaacgagttccagtgtcaggacggtaagtgcatctcctacaagtgggtgtgtgacggatccgccgaatgtcaagacggatcagatgagagccaggaaacctgtctgtccgtgacctgcaagtcgggcgacttctcgtgcggaggccgggtcaatcgctgcatcccacagttttggcggtgtgatggacaagtggactgtgataacggaagcgacgaacagggatgtcccccaaagacttgttcgcaagacgaatttcgatgccacgacggcaaatgtatctctaggcaatttgtctgcgattccgaccgggattgcctggacggatcggatgaagcgagctgccctgtcctgacttgtggaccagcgagctttcaatgtaactcctcgacctgtatcccgcagctgtgggcctgtgataatgatccggactgcgaggatggctccgacgaatggcctcaaagatgccgcggcctgtacgtcttccagggtgatagctccccctgctccgcttttgagttccactgcttgagcggagaatgcattcattcaagctggcgctgtgacggcggtccagattgtaaggataagtcagatgaggagaactgcgccgtggccacttgccgcccggatgaattccagtgcagcgacggcaactgcattcacggatcgagacagtgcgaccgcgagtacgactgtaaagatatgtcggacgaggtgggctgcgtgaacgtcaccctgtgcgagggacccaacaaattcaagtgtcactcaggcgaatgcatcactcttgataaggtgtgcaatatggcgcgggactgtcgggactggagcgatgaaccgatcaaggaatgtggcactaacgagtgcctggacaacaacggaggatgctcccatgtgtgtaacgaactgaagatcggatacgaatgcctgtgcccagatggttttcagctggttgctcagcggcgctgcgaagacatcgacgagtgccaggatccggatacctgtagccagttgtgcgtgaacctcgaaggcggatacaagtgccagtgcgaggagggatttcagctcgaccctcataccaaggcgtgtaaggcggtgggatcaatcgcctacctctttttcaccaatcgccacgaggtgcgaaagatgaccctggatagatccgaatacacttcgctcattcctaatttgcggaatgtcgtcgccctggatactgaggtggcatcaaatcggatctattggagcgatctctcacagcggatgatctgttcgactcaactcgaccgcgcccacggagtcagctcgtacgacaccgtgatatcgagagatatccaagcccctgacgggctggcagttgactggatccattccaacatctattggaccgactccgtgctgggtaccgtgagcgtggcagacactaaaggagtcaagcggaagaccctgtttagggagaacgggagcaaacctcgggccatcgtggtggacccggtgcacggatttatgtactggaccgattggggcaccccagctaagatcaagaaaggagggcttaatggagtcgacatctactcgctggtgaccgagaatatccagtggcccaatggcatcactctggacttgctgtctggccggctctactgggtggactccaagctgcactcgatctccagcatcgatgtgaacggcggtaacagaaagaccattctcgaagatgaaaagcgcctcgctcacccattttcgctcgcagtctttgaagacaaggtgttctggactgacatcatcaatgaagctatcttttcggcgaataggctgaccggctcagatgtgaacctccttgcggagaaccttctttcgccagaagacatggtgctcttccataatcttacccagccacgcggcgtgaactggtgcgaaaggactactctcagcaatggtggatgccaatacctctgccttccggccccgcagatcaatcctcactcgccgaagttcacttgcgcgtgcccagacggcatgctgctggcgagggacatgaggtcctgtctgactgaggcggaggcggccgtggccacgcaggagacttcaactgtgcgcctgaaggtgtcctccaccgccgtgcggacccagcataccactacccgtccggtgccggacacgtcacggctgccgggagcgaccccggggcttactaccgtcgagattgttaccatgtcccaccaggcactgggagatgtggccgggcgcggaaacgagaagaaaccaagctccgtgcgcgctctgtcaattgtgctgcctattgtactgctggtgttcctctgtctgggagtgtttctcctgtggaaaaactggagactgaaaaacattaacagcattaacttcgacaacccagtctaccagaaaaccactgaagacgaggtgcacatttgtcataaccaggacggatacagctacccatcccggcagatggtgtcgttggaggacgacgtggcc

SEQ ID NO: 16025 - DNA, 2580 bp, synthetic construct
  misc_feature 1..2580: note = source = /note="Description of Artificial Sequence: Synthetic coding sequence"
  source 1..2580: mol_type = other DNA
atgggcccatggggctggaagctgcggtggactgtggcgcttctcctggcggcggcgggaactgcagtgggagatagatgtgaacgtaacgaatttcagtgccaagacggcaagtgtattagctacaagtgggtgtgcgacggttccgcagaatgtcaggacggatccgacgaatcgcaggagacttgtctctcagttacttgtaagtcgggagatttctcatgtggtggacgcgtgaatcgctgtattccgcaattctggagatgtgatggacaagtcgattgtgacaacgggagcgacgaacaaggatgccctccaaagacttgttcacaggatgaattccgttgtcacgacggaaagtgcatatccagacagtttgtgtgtgacagcgatcgggactgtcttgatggttcggacgaagcctcctgtccagtccttacttgtggacccgcgagctttcaatgtaatagctcaacgtgtatcccgcaactgtgggcgtgcgacaatgatccagactgtgaagatggaagcgacgaatggcctcagcgctgtagaggcctgtatgtgtttcaaggggattccagcccttgttcagcctttgagtttcattgcttgagcggcgaatgtattcattcctcatggcgctgtgatggagggcctgactgtaaagataaatccgatgaagaaaactgcgcagtggcaacttgccgtcccgatgagttccaatgcagcgacggcaattgcatacatggaagccgtcagtgtgatcgcgaatacgattgcaaagatatgtccgacgaagtgggatgtgtgaatgtgaccctgtgtgagggcccgaataagttcaagtgtcactcaggagagtgtattacgctggataaggtgtgtaacatggcccgtgattgtagggactggtcggatgaaccaatcaaggagtgtggtactaatgaatgtctggacaacaacggaggttgcagccatgtgtgtaacgagcttaagatcggttacgagtgcctgtgtcctgatggtttccagctggtggcacagcgacgctgtgaggacatcgacgagtgccaggaccccgacacctgctcgcagctttgcgtcaatctcgaaggcggatacaagtgtcaatgtgaagaaggatttcaactggacccccatactaaagcatgtaaagcagttgggtctattgcatacttgttctttaccaaccgtcacgaagtccgaaaaatgacgctggataggtcggaatacaccagcctcattccaaatctgcgcaacgtggtggcgctggataccgaggtggcatcgaataggatttactggtcggacctctcccaacgcatgatctgtagcacccagctcgatagagctcacggggtgtcatcttacgatactgtgatttcccgtgatattcaggcccctgatggcttggctgtcgactggatccatagcaacatatactggaccgattcggtgcttggtactgtctcggtggcagacaccaaaggcgtgaagaggaaaacgctttttagagagaacggatccaaacctagagcaatagtcgtcgatcccgtacacgggtttatgtattggacggactggggtacgcccgcaaaaatcaagaaaggaggcctcaacggcgtcgatatctactcgctggtgactgaaaacattcagtggcctaatgggatcacccttgatctgctttcagggcggctttactgggtggatagcaagctgcactcgataagctcgatagacgtgaacggcggaaatcgtaaaactatactcgaggatgaaaagcgattggcacatcctttctcactggcagtctttgaggataaggtgttttggaccgatatcatcaacgaagcgatcttttccgcaaacagacttaccggttcggacgtgaacctcctggcggaaaacctcctttcgcctgaggatatggtgttgtttcataacctcactcaaccaagaggcgtgaattggtgcgagaggaccacgttgtcaaatggaggatgccaatacctgtgtctcccggccccacaaatcaaccctcactcccccaaattcacctgcgcctgcccagatggtatgctgcttgccagagatatgcgaagctgcttgaccgaggccgaagcagcagtcgcgacccaagaaacttctactgtgaggctgaaggtatcgtctaccgcagtcagaacgcaacataccaccactagaccagttcctgatacctcgcggcttccgggggccaccccaggtctgacgacggtcgaaattgtgactatgtcgcatcaagcgcttggagacgtggcaggtcgcggaaacgaaaagaagccgagcagcgtccgggctctgtccattgtcctccccatcgtgcttcttgtgtttctttgcttgggagttttcctgctctggaagaactggagactgaaaaacatcaatagcattaacttcgataacccagtgtaccagaaaaccactgaagatgaagtccacatttgtcataaccaggacggttactcgtacccttctcgtcaaatggtgagcttggaggacgatgtggcg

SEQ ID NO: 16026 - DNA, 2580 bp, synthetic construct
  misc_feature 1..2580: note = source = /note="Description of Artificial Sequence: Synthetic coding sequence"
  source 1..2580: mol_type = other DNA
atgggaccatggggatggaaactcaggtggacggtggctcttctattggccgcggcagggaccgcggtcggtgatagatgtgagcggaatgaattccagtgtcaggacggcaagtgtatctcttacaaatgggtctgtgatgggtctgcagagtgccaagatgggagcgacgagtcacaagagacatgtttgtccgttacgtgcaaaagcggcgatttctcgtgtggtggccgagttaatcgctgtatcccacaattttggcgttgcgatggacaggtcgattgcgataacggctcggacgagcagggttgcccgcctaaaacttgcagccaggatgagtttcgatgccatgacggcaagtgtatctcccgccagttcgtctgtgattccgatagagattgcctcgatgggtcagatgaagcatcctgcccagtgctgacctgtggcccggcatctttccagtgtaattcttctacatgcattccgcagctgtgggcatgtgataatgatccggattgtgaggatggctcggatgaatggccgcagcgctgccgcggactgtatgtcttccaaggtgattcctccccatgcagcgcgttcgagttccactgcctatccggagagtgtatccactcgtcgtggcggtgcgatggtggaccagactgtaaagacaaatcagatgaagagaactgtgctgttgctacctgcagacccgacgagttccagtgtagcgatggaaactgcatccacggcagccggcaatgcgatcgagaatatgattgtaaagatatgtcagacgaagtgggctgcgttaacgtcacactctgtgaagggccaaacaaatttaagtgccatagtggtgaatgcattaccctggataaggtatgcaatatggcacgcgattgccgggattggtcggatgagcccatcaaggaatgcggcactaacgagtgccttgataacaatggcggatgcagccatgtctgcaatgaacttaagatcggctacgaatgtctttgtccagatggatttcaactagttgctcaaaggcgatgcgaggacattgatgaatgtcaagaccctgacacttgtagccagctgtgcgtcaatctcgaaggtggctacaagtgtcagtgtgaggaaggttttcaacttgacccccacaccaaagcgtgcaaggcggtgggttccattgcctatttgttctttacaaatcgtcatgaggttcggaaaatgacgcttgaccgctctgagtataccagtcttataccaaacctccgcaatgtggtcgctctcgatacagaggtggcctccaatcgtatttactggtccgatttgtcccagcgaatgatttgttctacccagttggaccgggctcacggcgtctcttcctacgataccgttataagccgggacattcaggcccccgatgggttggccgtcgattggatccattcgaacatttactggaccgattctgtattgggcactgtctcggtcgctgacacaaagggtgtgaaacggaaaacgctgttcagagagaatggatccaagcctcgggccatcgtggtggatcccgtccacggcttcatgtactggaccgattggggcacgcctgccaagataaaaaaggggggtttgaacggagtcgatatctactcgttggttacggaaaatattcaatggcctaatggtatcaccttggatctgctttcaggacggctgtactgggtggactctaagctacattccatatcgtcgatcgatgtcaacggcggtaataggaaaacgatacttgaggatgagaagcggctcgcacaccccttctcactcgctgttttcgaggataaagtgttctggacggacattataaacgaagcaattttctcagctaatcgacttaccggcagcgatgtcaatctgctcgccgagaatctgctgagtcccgaagacatggtgcttttccacaacctaacccagcctcgtggggtcaattggtgtgagaggacaaccctgtccaacggcggttgtcagtatctatgcctgccagctccgcagatcaacccacactcacccaagttcacctgcgcttgccctgacggtatgcttttagcgcgcgacatgcgaagctgccttacggaggccgaagccgcagtggcaacccaagaaacatccactgtgagattgaaggtgtcttccacagcagtccggactcagcatactacgacccgaccggttcccgacacaagcaggctccccggtgccactccgggtttgactacagttgagatcgtgactatgagtcaccaggcactcggagacgtggcggggcgtggtaacgagaagaaaccttcgtcagtgcgagcattgtcgattgtgctaccaatagttcttcttgtcttcctgtgtcttggagtattcttactgtggaagaattggagactgaagaacatcaatagcattaacttcgataaccctgtttaccagaagacaacagaagacgaggtccatatttgccataatcaggatggctattcgtatccttcacgtcaaatggtctctcttgaagacgacgtcgcg

SEQ ID NO: 16027 - DNA, 2580 bp, synthetic construct
  misc_feature 1..2580: note = source = /note="Description of Artificial Sequence: Synthetic coding sequence"
  source 1..2580: mol_type = other DNA
atgggaccctggggatggaaacttcggtggactgtggcacttctgctggcagcggcaggaaccgccgtgggtgatagatgtgagcggaacgagttccaatgtcaagatggtaagtgcatcagctacaagtgggtgtgtgatggatcggccgaatgtcaggacggctcggatgaatcgcaagagacttgtcttagcgtcacttgcaagtcgggtgatttttcgtgtggtggcagagtgaaccggtgtatcccccagttttggcgctgcgatggtcaggtcgactgtgataatggatcagatgagcaaggttgtcctccaaagacctgctcgcaagatgaatttcggtgccatgatggtaagtgtatatcgagacaattcgtctgtgattcagaccgggattgcctggacggctccgatgaagccagctgcccggtgcttacttgtggtccagcatcattccaatgcaattcctcgacttgtattcctcagctgtgggcatgtgataacgacccagattgtgaagatggatctgacgagtggcctcaacggtgtagaggtttgtacgtgttccaaggagatagcagtccttgttcagcattcgaatttcactgtttgtccggtgagtgcatccattcctcctggcggtgcgacggaggccctgactgtaaagacaagtcagatgaggaaaattgcgcagtcgcaacttgccggccagacgagttccagtgttcagatggcaactgtattcatggatcaagacagtgcgatagggaatacgattgcaaggatatgagcgacgaagtggggtgtgtcaacgtgactctttgtgaaggtccgaacaagtttaagtgtcattccggcgagtgtatcaccctcgacaaggtgtgcaatatggccagagactgtcgggactggtcggatgagcctatcaaggagtgtggaaccaacgaatgcctcgacaataacggtgggtgctcgcatgtgtgtaacgagctgaagatcggttacgaatgcctctgtcctgacggattccaattggtggcacaacgccgctgtgaggacatagatgaatgtcaagatcctgacacgtgttcgcaactttgcgtgaacctcgaaggtggctacaagtgccagtgcgaagaggggttccagctggatccacacaccaaagcctgtaaggcagtaggatcgattgcatatctgttctttactaaccgtcatgaggtccgcaagatgactcttgacaggtcagagtacaccagcctgattcctaatctgcggaacgtggtggcacttgacaccgaagtcgcttcaaatcgaatttactggtcggacctcagccagagaatgatttgtagcacccagctcgaccgtgctcatggtgtgtcgagctacgataccgtgatctccagagatattcaagcaccagatggtcttgctgtggattggatccacagcaatatctactggaccgattcggtcttgggaaccgtgtcggtggctgacacgaagggcgtcaagagaaagaccttgtttagggaaaacgggtcgaagcccagggcaattgtggtcgatcccgtgcacggctttatgtattggaccgattggggaactcctgcaaagattaagaaaggagggctgaacggtgtggacatttactcgcttgtcaccgagaacatacagtggcctaatggaattactcttgatcttctttcagggagactgtactgggtggattcaaagttgcactccatcagctcaatcgacgtgaacggtggaaacagaaagactattcttgaagatgagaaaagactggctcatccttttagccttgccgtgttcgaagataaggtcttttggaccgacattatcaatgaagcaatcttcagcgccaacagactgaccgggagcgatgtgaatttgcttgctgagaatctcctctcgcctgaggacatggtcctcttccataaccttactcaaccaaggggtgtgaactggtgtgaacgaaccaccctgtccaacggggggtgccagtacctttgtctcccggcaccacaaatcaaccctcattcgcctaagtttacctgtgcatgtccagatggaatgctgctggcaagggatatgagatcatgtctgaccgaggcagaagcagccgtggcgacccaagagactagcaccgtgcggctcaaagtttcctccacggccgtgaggactcagcataccactaccaggcctgtcccagacacctcgagactccccggagccacgcccggtctgaccacggtcgaaatagtcaccatgtcgcatcaggcattgggagatgtggcaggaaggggtaatgagaaaaagccctcgtcggtgcgagcattgtccattgtgcttcctatcgtgctcctcgtttttctctgcctgggggtctttctgctttggaagaactggcgactcaagaacataaactccatcaattttgataatcctgtgtaccaaaagaccactgaagatgaggtgcacatttgtcataaccaggacgggtattcatacccgtctcgtcagatggtgagccttgaggatgatgtcgca

SEQ ID NO: 16028 - DNA, 2580 bp, synthetic construct
  misc_feature 1..2580: note = source = /note="Description of Artificial Sequence: Synthetic coding sequence"
  source 1..2580: mol_type = other DNA
atgggtccgtggggttggaaattgcgctggacggtcgcgcttctcctcgcagccgccggaaccgcggtgggagatcggtgcgaaaggaacgagttccagtgccaggatgggaagtgtatcagctacaagtgggtctgcgacggttcggccgaatgccaggacggaagcgacgaatcgcaggagacgtgcctgtccgttacttgtaagtcgggagacttctcgtgcggtggacgcgtgaatcgctgcattcctcagttctggaggtgtgatggacaagtcgactgcgacaacggatccgacgaacagggctgccctcctaagacctgctcccaagacgagttcagatgccacgacgggaagtgcatctctcgacaatttgtgtgcgattcggaccgcgattgcctggatggctccgatgaagcatcctgtcctgtgctgacttgcgggccagccagcttccagtgcaattcgagcacttgcatcccacaactttgggcgtgtgacaacgacccagactgcgaagatggttcagacgagtggccacagcgttgccggggactgtacgtctttcaaggcgacagctccccgtgctcagcctttgagttccactgtctctcgggcgaatgcatccattcctcatggagatgcgatgggggccctgactgcaaggataagtcagacgaagagaattgtgccgtggctacctgccgcccggacgagttccaatgcagcgacggaaactgcatacatgggtcacggcaatgtgatagagaatacgattgcaaggatatgtcggatgaagtcggatgtgttaatgtcaccctttgcgaaggacccaacaagttcaagtgccactccggcgagtgcatcactttggataaggtgtgtaatatggccagggactgccgggattggtcagacgagccgatcaaggaatgcggaaccaacgaatgcctcgacaacaacggcggatgtagccacgtgtgcaacgaactgaagatcggttacgaatgtctgtgcccagacggcttccagcttgtggcccaacggaggtgcgaggacatcgacgagtgtcaggatcccgacacttgcagccagctgtgtgtcaacttggagggagggtacaagtgtcagtgtgaagaagggtttcaacttgatcctcacactaaggcttgcaaggccgtcggttcaatcgcttaccttttctttaccaatcgccacgaggtgagaaaaatgaccctcgatcgcagcgagtacacttcgctgatcccaaacttgcggaacgtggtcgcgctggacaccgaagtggcttccaatagaatatactggtctgacctgtctcagaggatgatctgctccacgcaattggatcgggcacatggagtgtcgtcctacgacacggttatctcaagggacatccaagctccggacggcctcgcggtggactggattcactctaacatctactggacggactccgtgctgggaaccgtctccgtcgccgatactaaaggcgtgaagcggaaaactctgtttcgggaaaatggcagcaaaccccgagccatcgttgtggacccagtccacggattcatgtactggactgactgggggaccccagcaaaaatcaagaagggcggactgaacggagtggacatctattcccttgtcactgagaatatacagtggccgaacggcattacgctggatttgctgtcgggccgactgtactgggttgactcgaaactgcatagcatttccagcatcgatgtgaatggaggcaaccggaaaactatcctcgaggacgaaaagcgccttgcacacccgttcagcctggccgtgtttgaggacaaggtcttttggacggacattatcaacgaggccatcttctcagcaaatagacttactggatccgatgtgaatctcctcgcagagaaccttttgtctccggaagatatggtgctcttccataacctcacccaaccgcgcggagtgaattggtgtgagcgcactaccttgagcaatgggggttgccagtacctctgcctcccggctccccagatcaatccgcatagcccaaaattcacctgcgcctgtcctgatgggatgctgctcgcgagagacatgcggagctgcctgaccgaagccgaagcggccgtggccacgcaagaaacgtcaaccgtgcgccttaaggtcagctcaactgcagtgagaactcagcataccaccacccgccctgtcccggacacctcccggctgccaggagccacccccggcctgacgaccgtggaaattgtgaccatgagccaccaggcgctgggcgacgtggcgggacgcggaaacgagaagaagccgtcatctgtgcgcgcgctgtcaatcgtgctgcctattgtcctgcttgtgttcctgtgcctgggcgtgttcctgctgtggaaaaactggaggctcaaaaacatcaactcaatcaatttcgataacccggtctaccagaaaaccactgaggacgaggtgcacatttgccataaccaggacggatactcctatccgtccagacaaatggtgtctctggaagatgacgtggcc

SEQ ID NO: 16029 - DNA, 2580 bp, synthetic construct
  misc_feature 1..2580: note = source = /note="Description of Artificial Sequence: Synthetic coding sequence"
  source 1..2580: mol_type = other DNA
atgggcccgtggggatggaagctccgctggaccgtggctctcctcctcgctgccgccggaactgccgtgggtgatcgatgcgagcggaacgagttccaatgccaggatggaaagtgcatttcatacaaatgggtgtgtgacggcagtgcggaatgccaggacggttccgatgagtcgcaagagacttgtctgtcggtcacttgcaaaagcggagacttcagctgtggtggacgagtgaaccggtgcatcccgcagttctggagatgcgatggccaggtcgattgcgacaacggttcagacgaacagggatgcccaccgaaaacctgctcccaggacgagtttaggtgccacgatggcaaatgtatttcccgccagttcgtgtgtgattccgacagggattgtctggacggctcggacgaggcgtcatgcccggtccttacttgtggtccggcctcattccaatgcaattcaagcacctgcatcccccaactgtgggcatgcgataacgatccggactgcgaagatggtagcgacgaatggccacagagatgccggggactctacgtttttcaaggggatagctcgccttgctctgcatttgagtttcactgtctttccggagagtgtatccactcctcgtggcgctgtgacgggggacctgactgcaaagacaaatcggatgaggaaaattgcgcggtcgctacctgcagacccgacgaatttcagtgttccgatggcaactgtatccacgggagtcggcagtgcgaccgtgagtacgattgcaaggacatgtcggacgaagtggggtgcgtcaatgtgacgctgtgcgaagggcccaacaaattcaagtgccactctggagagtgcatcaccctggacaaggtctgcaatatggcacgcgactgcagggattggtcagatgagccgataaaggaatgtggaactaacgagtgtttggataacaacggcggttgctctcacgtgtgcaatgaattgaagatcgggtacgaatgcctgtgcccagacggttttcagctggttgcgcagcgcagatgtgaggacatcgacgaatgccaagacccggacacttgttcacagctgtgcgtcaatcttgaaggtggatacaaatgccagtgcgaagaaggtttccaacttgacccgcacactaaggcctgcaaggcagtcggatcgattgcttatctcttcttcaccaaccgccatgaggtgcggaagatgaccttggaccggtcagaatacacgtccctcatcccgaatctcagaaacgtggtggccctcgacaccgaagtggcctccaaccgcatctactggtccgacctttcacagcggatgatctgctcgacgcaactcgaccgggcacatggagtgagtagctacgacactgtgatctcgcgggatatccaggcaccagatgggctggctgtggattggatccattcaaacatctactggaccgactccgtgctgggcactgtgagtgtggccgacactaagggagtcaagcgcaagaccttgttcagggaaaacgggagcaaacccagggctatcgtggtggaccccgtgcacggcttcatgtactggaccgattgggggaccccggcaaaaatcaagaagggcggactgaatggagtggacatctactcgctggtgaccgagaacattcagtggccaaatggaatcactctggatctgctgtcaggtaggttgtattgggtagactcgaagctgcattccatctcctcaatcgatgtgaacgggggaaacaggaaaacgatcctcgaggacgaaaaacggctggcgcacccattttcactggccgtgttcgaggataaggtcttttggactgacatcattaatgaagctatcttctccgcaaatcgcctcacgggctccgatgtgaatctgctcgcagagaatctgctgtcgccagaggacatggtgctgttccacaaccttacccaacctcgcggggtcaactggtgcgaaagaactaccctgtccaatggtggatgccagtacctttgtctcccggcgcctcagatcaacccgcatagcccgaagttcacgtgtgcatgcccggacggaatgctgctcgcccgggacatgagatcgtgcctgactgaagcggaggccgccgtggccacgcaggaaacttcaactgttaggctcaaggtgtcgtcgacggccgtcagaacgcaacataccactacccgccctgtgcctgacactagcagactcccaggagccaccccgggactgactactgtggaaatagtgactatgtcgcatcaagcactcggagatgtcgcgggacgcggaaatgagaagaaaccgtccagcgtgcgagcgctgtcgattgtcctcccgatcgtcctgttggtgttcctgtgtctcggagttttcttgctctggaagaactggcgtctgaagaatatcaatagcattaacttcgacaacccggtttaccagaaaactaccgaggacgaagtgcacatctgtcataaccaggacggatactcgtacccaagccggcagatggtatccctggaagatgacgtggcc

SEQ ID NO: 16030 - DNA, 2580 bp, synthetic construct
  misc_feature 1..2580: note = source = /note="Description of Artificial Sequence: Synthetic coding sequence"
  source 1..2580: mol_type = other DNA
atgggcccctgggggtggaagctgcgttggaccgtggcgctgttgctggccgccgcggggacggctgtgggggatcgatgtgagcggaacgagtttcaatgccaggacggtaaatgtatatcctacaaatgggtgtgtgatggtagcgctgaatgtcaggatggaagtgacgagtctcaagagacttgcctgagcgtaacctgcaagtctggagacttttcttgtggcggaagggtcaacaggtgcataccacaattttggcgctgtgatggccaggtcgactgcgataatggcagcgatgagcagggttgtccacccaagacatgcagtcaggacgaattccggtgtcatgatggaaagtgtatctctaggcagtttgtgtgtgatagtgatcgggattgtctggatggcagcgacgaagctagctgccctgtcttgacttgtggacccgcttcattccagtgcaattctagcacttgcattccacagttatgggcgtgcgataacgatcccgattgtgaggatggcagcgacgagtggcctcaaagatgtcgcgggctctacgttttccagggggactcatccccatgctctgcattcgagttccactgtctatccggagagtgcattcacagcagctggaggtgtgacggcgggccagactgcaaagataagtcagatgaggagaattgcgcagttgccacctgtaggccagatgagttccaatgtagtgatgggaattgtatacacggctccaggcagtgtgatagagagtacgactgcaaggacatgtctgatgaagttgggtgcgtgaatgtaacactgtgcgagggaccaaataaattcaagtgccatagcggcgagtgtattacgctggataaagtttgcaacatggctagagactgtcgggattggtctgacgaacccattaaagaatgtggcactaatgaatgcctcgataacaatggggggtgcagccatgtttgtaacgagctgaagatcggatacgagtgtctgtgtcctgacgggtttcagttggttgcccaacgcaggtgtgaagatattgatgagtgccaggatcctgatacgtgcagccagctctgcgttaacttagagggtgggtacaaatgtcagtgcgaggagggatttcaattagaccctcatacgaaagcatgcaaggctgtggggtctatcgcttatctcttttttacaaatcgacatgaggtgaggaagatgacgttagatcggagtgagtatacctccctgattcccaatctgcgcaatgttgtcgcgcttgacactgaggtcgcatctaatcgcatctattggagcgatctgagccaaaggatgatctgttccacccagctggatcgagcccacggggtcagttcctatgataccgtgatttccagagacattcaggccccagacggcctggccgttgactggatccactccaatatctactggactgattccgttctggggactgtgtccgtggctgacactaaaggggtcaaaagaaagactctgtttagagagaatggttccaaaccaagagcgatcgtcgtggaccccgtgcatgggtttatgtattggacagactggggaacacccgccaaaatcaagaaaggtggcctgaacggcgtcgatatctatagtctcgtcaccgaaaatatccaatggcccaacgggattactcttgatctgctctccgggcggttatactgggtcgacagtaagttacacagtattagttccatcgacgtgaacgggggcaatagaaagaccatcctggaggatgagaaaagactggctcatccattctccctggccgtgtttgaggataaggtgttctggaccgatatcattaatgaagccattttcagtgcaaatcggcttaccggttctgacgtaaatttgttagccgaaaatctactcagtcctgaagatatggtcttgttccacaatctcactcagcctcgtggggtgaattggtgcgagaggacgacgctttccaacgggggttgtcagtatctctgcctgcctgctccgcagataaatccgcatagtccgaaatttacttgcgcctgcccagatggcatgctgctagcccgagacatgagaagctgcttgacggaggctgaagccgctgtagccacccaggagacgagcacagtccgactaaaagtgagctcaaccgctgttcgcactcagcacacaaccaccagaccggtgcccgatacatcacggctccctggtgcaactccaggcctcaccaccgttgaaatagtgacaatgtcccaccaagccctaggcgacgtggcaggccgcggcaacgagaaaaagccgagttcggttcgggccctaagtattgttttacctatcgtcctgctggtcttcctgtgcctgggagtgttccttctgtggaaaaactggaggctgaaaaacattaacagcatcaactttgacaacccggtctaccagaagactaccgaggacgaagtgcacatttgtcacaatcaggatggctactcctaccccagtagacaaatggtcagcttggaggatgacgtcgcc

SEQ ID NO: 16031 - DNA, 2580 bp, synthetic construct
  misc_feature 1..2580: note = source = /note="Description of Artificial Sequence: Synthetic coding sequence"
  source 1..2580: mol_type = other DNA
atgggcccttggggttggaagctgcggtggaccgtcgctctgcttttggcagcggccgggaccgcagtgggcgatcgctgcgaacggaacgagttccagtgtcaggatggaaagtgtattagctacaaatgggtatgcgacggtagcgcggagtgccaggatggcagtgatgagtcccaggaaacgtgcctatcagtcacgtgtaagtccggcgattttagttgcggcgggcgggtgaacagatgcatccctcagttctggcgttgcgatggtcaggtcgattgcgacaacggatctgacgagcagggctgcccgccaaaaacctgttcgcaggacgagtttagatgtcacgacgggaaatgcatatctagacagttcgtttgtgactcagatcgagactgcctggacgggagtgatgaggcctcctgccctgttctcacgtgtgggccagcctctttccagtgcaattcttccacttgcatccctcagctgtgggcttgcgacaacgatcctgactgtgaggatggatctgatgaatggcctcagaggtgccgcggactgtatgtcttccaaggggatagctccccatgcagcgccttcgaattccactgtctgagcggtgaatgcatccacagtagctggcgttgcgacggtggacctgactgcaaagataagagcgatgaggaaaactgcgccgtagcgacctgcaggccggacgagttccagtgtagtgacggtaactgtatccacgggtcccgtcagtgtgatcgggagtacgactgtaaggacatgtccgatgaagtcggctgtgtgaacgtgacactctgtgaaggcccgaacaagttcaagtgtcactctggggagtgcattacgctagacaaagtatgcaatatggctcgggattgtcgggactggagcgatgaacctatcaaagagtgtggtaccaacgaatgtcttgataacaatgggggctgctcacacgtgtgcaatgaattgaagatcgggtatgaatgcctctgtccggacgggtttcaactagtggcacagcgccgttgcgaggacattgacgaatgccaggaccctgacacgtgcagccagctgtgtgtgaacctggagggcggctacaagtgtcagtgcgaagagggcttccagctcgatccccacaccaaggcctgtaaggccgtaggcagcattgcatatctgttttttactaatagacacgaagtccggaagatgacgttggacaggtccgagtacacctcactgatcccaaatctgagaaatgtcgtggcgctggataccgaggtagcttcgaacagaatctattggagcgatctgtcgcaacggatgatctgctccacccagctggaccgggcccatggtgtcagtagctatgacactgtcatcagccgggacattcaggcgcctgacggcctggccgtggattggatacattccaacatctactggactgattctgtgcttggcaccgtttcagtggccgacacaaaaggtgtcaagaggaaaaccctttttagagagaacggttcaaagcccagagccatcgtggttgaccccgtgcatggcttcatgtactggaccgattgggggactccagcaaaaataaagaaaggtggccttaacggagtggacatctactctctcgtgactgaaaatatacagtggcctaatggcattaccctggacctgcttagcggtcggctgtattgggtggactctaagctgcattcaatttctagtatagacgtaaatggggggaacagaaagaccattctggaggatgagaaacgccttgctcacccgtttagcctggcggtatttgaagacaaggttttctggacagacatcattaacgaggcgatcttctccgccaacaggctcacagggtctgatgttaacctgttggctgaaaacctgcttagccccgaggacatggtgctttttcacaatctgacacagccccgcggcgtgaactggtgcgaacggacaacactgtccaacggaggatgtcaatatttgtgcctcccagccccccagattaatcctcacagtccgaaattcacatgcgcttgccccgatggaatgctcctggctcgcgatatgcgaagctgcctgacagaggcagaggctgccgtcgccacccaagaaaccagtactgtgcgattaaaagtctccagcaccgcagttagaacccaacataccaccacgcgtccggtgcccgacaccagcaggctccctggcgcaaccccaggcttgactacagtcgagattgtgacaatgagccaccaagctttgggggacgttgccgggcgaggaaatgagaagaaaccctcttcggtccgcgccctgagcatcgtgttacctattgttttactcgtttttctatgccttggagtgttcctgctctggaagaactggagactgaagaatatcaacagcattaattttgacaatccagtgtatcagaagacaaccgaggacgaagtccatatttgccacaatcaggacggttactcatacccatcacggcagatggtttccttggaggatgatgtggcc

SEQ ID NO: 16032 - DNA, 2580 bp, synthetic construct
  misc_feature 1..2580: note = source = /note="Description of Artificial Sequence: Synthetic coding sequence"
  source 1..2580: mol_type = other DNA
atggggccgtgggggtggaagctgcgctggaccgtggcattgttgctcgcagccgccgggacggccgttggtgacagatgtgaaaggaatgagtttcagtgtcaagatggcaaatgtatttcatataaatgggtgtgtgacggatctgctgaatgccaagacggttcagacgagtctcaggaaacgtgcctgagcgtgacgtgtaagtctggggattttagttgtggaggccgggtgaatagatgcattccccagttttggcgctgcgacggacaggttgactgcgacaatgggagtgacgagcagggctgcccgcctaagacctgctcccaggacgagttccgctgccatgatggtaagtgtatttcacggcagttcgtgtgtgactccgatcgggactgcctggatggctccgacgaagccagctgccccgtgctgacatgcggtcccgcctccttccagtgtaactcatctacctgcatcccccaactgtgggcctgtgataatgaccccgattgtgaggatggatccgacgagtggcctcagcggtgtagggggttatatgtgttccaaggcgactccagcccctgtagcgcatttgagtttcattgcctgtctggagagtgcattcattcctcttggaggtgcgacggggggccagactgcaaggataagtcagatgaggagaattgtgccgttgctacttgtcgcccagacgagtttcaatgctctgatggtaactgcatccacgggtctaggcaatgcgatcgggaatacgactgcaaggatatgtctgacgaagttggttgcgtaaatgtgacattgtgcgaggggcctaacaagtttaaatgtcattcaggggagtgtattacgttggacaaagtgtgtaacatggctcgcgactgccgagactggtctgacgaaccaattaaagagtgcggcaccaacgagtgcctcgataacaatggtggctgttcgcatgtctgcaacgagctgaaaatcgggtacgagtgcctgtgccccgatggatttcagttggtggctcaacggcggtgtgaagacattgacgagtgtcaggacccagatacatgttcccagctttgcgttaacttggagggagggtacaaatgccaatgcgaagaggggttccaactcgacccccacaccaaagcgtgcaaggccgtgggttctatcgcatacctcttcttcacaaatcgtcacgaggtccgtaaaatgacccttgatcggagcgaatataccagcctcattccaaacctgcgcaacgtcgtggctctggatactgaagtcgccagcaatcgaatttattggtccgacctctctcaacggatgatctgttccacacagctggatagggctcatggggtgagctcctatgataccgtgatcagcagggacatccaagcccccgacgggctggcagtcgactggatccactccaatatctattggactgattccgtgctgggcaccgttagcgtggccgacacaaagggagtgaagcggaagaccctgtttcgcgaaaacggttctaaacccagagcgattgtggtggatcctgtgcatgggtttatgtactggaccgattggggcaccccagctaagatcaagaagggaggcttgaacggggtcgacatttattctctggtgacagagaacatccagtggccaaatggcatcaccctggacttattatctggcagactatactgggtggattccaagttgcactccatttcatcaatcgacgtcaatggtggcaatagaaagacgatcctggaggatgagaaacgcctagctcacccattcagtctggcagtctttgaggataaagtgttttggaccgatatcatcaacgaggcaattttctcagccaatcgcctcaccggaagcgatgtcaacctactggccgagaacctgttatccccagaagatatggtcctgttccacaatctcactcagcctcggggcgttaattggtgcgaaagaaccactctatcaaatgggggctgccagtatttgtgcctacccgccccgcaaatcaatccccacagtcctaaatttacctgcgcatgtccggatgggatgctcctggcccgggatatgcgtagttgccttacggaagctgaggccgcggttgcgactcaggagacctctacagtgaggctgaaggtctcgtccactgcggtcaggacgcagcacactaccacccggccagtccccgataccagccggcttcctggggcaacccctgggctgaccacagtggagatagtcactatgagccatcaggccctcggcgatgtggccggcagagggaatgagaagaagccttcttcagtgagggcgctgtccatcgtactccctatcgttctactggtattcttatgtttgggcgtgttcctcctgtggaagaactggaggctcaagaatattaattccataaattttgataatccggtttaccagaagacaaccgaggacgaggtacacatatgtcacaatcaggacggctatagctacccctctagacagatggtctccctggaggacgacgtagcg

SEQ ID NO: 16033 - DNA, 2580 bp, synthetic construct
  misc_feature 1..2580: note = source = /note="Description of Artificial Sequence: Synthetic coding sequence"
  source 1..2580: mol_type = other DNA
atgggtccctgggggtggaagttgcgatggactgtggcccttttgttagctgccgccggcacagctgtaggcgaccgttgcgaacgcaatgagtttcagtgccaggacgggaaatgcatcagttacaagtgggtgtgcgacggttcggccgaatgtcaggacggctccgacgaatctcaggaaacctgcctatctgttacctgcaaatcaggcgatttctcttgtgggggtcgagtgaacagatgcataccgcagttctggaggtgcgacggacaggtagattgcgacaatggatcagatgagcagggctgcccaccaaaaacctgtagccaggatgagttcagatgtcacgatggtaaatgcatatcccggcagtttgtatgtgactctgatcgcgattgcctggatggctctgacgaagcaagctgccctgtgctcacctgcggtcctgccagtttccaatgtaactccagcacctgcatcccccagctgtgggcgtgcgacaacgaccctgactgtgaggatggttctgacgagtggccacagcggtgcagaggcctgtacgtattccaaggcgactcaagtccttgtagtgctttcgagttccactgcctgtccggggagtgcatccacagttcttggcgctgcgacggcgggcctgattgtaaggacaagtcagatgaggagaattgtgccgttgcaacttgtcggcctgacgaattccagtgctctgatggaaattgcattcacgggtccaggcagtgcgaccgagaatacgattgcaaagatatgtccgatgaagtagggtgtgtgaatgtaacattatgtgagggtcccaataaatttaagtgccacagtggcgagtgcattacattggacaaggtgtgcaacatggctcgcgactgtagggactggtccgacgagcccatcaaggagtgtggtaccaacgaatgcctggacaataacgggggatgttctcatgtctgtaacgagttaaagattggctacgaatgcttatgcccggatggctttcagctcgtcgctcagaggaggtgcgaagacatcgacgagtgccaggatccggatacctgctcccaactatgtgtgaatctggagggtgggtacaaatgccagtgtgaagaggggttccagctcgaccctcatactaaggcctgtaaggccgtgggcagcatagcttatcttttcttcacgaacaggcacgaggttagaaagatgacactcgataggtctgagtacacttcactgattccaaacctgcggaacgtggtggccctggatacggaggtcgcgagtaatcgcatttattggtcggacctctcgcagcgaatgatatgtagcactcagctggaccgcgctcatggtgtaagtagctatgatactgtcatctctcgggatatacaggctccggacgggctggcggttgactggatccattcaaacatttactggactgatagcgtgctgggaaccgtaagcgttgccgacacaaaaggcgtgaagcgaaaaaccttgtttagggaaaacgggagcaagccaagggccattgtcgtcgaccccgtgcacggatttatgtactggacagattggggaaccccagcgaagattaagaagggcggattgaacggcgttgatatttacagtttagtgacagagaatatccagtggccgaacggcatcacacttgacctactgagcggccgattgtattgggtcgactctaaactgcatagtatcagcagtatagacgtgaacggagggaataggaagactatccttgaggatgagaagcgactagctcaccctttcagcttggcggtgttcgaagacaaggtgttttggaccgatattataaatgaagcaatttttagtgcaaaccgactaacagggagtgacgtcaacctgctagcagaaaacctgttgtctccagaggatatggtgctttttcacaacctgacccaacctagaggcgtcaactggtgcgagcgtactacactgagtaacggtggctgtcagtatctgtgtcttcccgccccacagattaaccctcattctcccaagtttacttgtgcatgtccagatggtatgctgctagcgcgggacatgcggtcttgcttaacagaggccgaagctgcagtggcaacacaagagaccagtacagtacgcttgaaggtctcttccacggccgtacgaacgcaacacaccaccacccgtccggtcccagacactagccgtctgccaggagcaacaccagggctgaccacagtggaaatcgtgacaatgtctcaccaggccctgggggacgtcgctggccgggggaatgagaaaaaaccgagcagcgtgcgagccttgtctatagttctgcctattgtgttgctggttttcctttgcctgggcgtgtttcttctgtggaagaattggaggcttaagaatattaacagcataaatttcgacaaccccgtgtaccaaaagacgaccgaggacgaagtgcacatttgccacaatcaggatggctacagctatccttcccggcagatggtgtccctcgaggacgacgtggct

SEQ ID NO: 16034 - DNA, 2580 bp, synthetic construct
  misc_feature 1..2580: note = source = /note="Description of Artificial Sequence: Synthetic coding sequence"
  source 1..2580: mol_type = other DNA
atggggccctgggggtggaagctcagatggaccgtggccctcctgcttgccgccgccggcactgcagttggtgatagatgcgaaaggaatgagttccagtgccaggacggcaagtgcattagctataagtgggtttgcgacggttctgcggagtgtcaggatggctcagatgagtctcaggagacttgtctctccgtgacgtgcaagagtggagacttcagctgtggtggcagagttaaccgctgcattcctcaattttggcggtgtgacggccaggtggattgtgacaacggttccgatgagcagggatgcccaccgaagacttgctcccaggacgagtttcgctgccacgacggtaaatgcatttctcggcagttcgtgtgcgactctgatcgtgactgccttgacggttccgatgaggccagctgcccagtgctcacgtgcgggcccgcttcgttccagtgtaactcctccacatgcatccctcagctctgggcgtgtgacaacgatcccgactgcgaggacggatcagacgagtggccacagcgttgccggggcctgtacgtctttcagggtgactcgtccccttgctcagccttcgagttccactgcttatcgggcgagtgcattcactcgtcgtggagatgcgacggcggacctgattgcaaggacaagtctgacgaggagaactgtgccgtggccacctgtcggcccgacgagtttcagtgtagtgatggtaactgtattcatgggagccgacagtgcgatagggaatacgactgtaaggacatgtccgacgaggtgggctgcgtgaacgtcaccctgtgtgagggccctaacaagttcaagtgtcacagtggtgagtgcatcactcttgataaggtttgcaacatggctcgggattgtcgtgattggagcgacgaacccatcaaggagtgcgggaccaacgaatgcctggacaataacggcggctgttctcatgtttgcaatgagctgaagatcggttacgaatgcctttgccccgacgggtttcagctcgtagcccagcgtcggtgcgaggacattgatgagtgtcaggacccagacacctgtagtcagctttgcgttaatcttgagggcggttacaaatgtcagtgcgaggaaggtttccagctggacccccacaccaaggcctgcaaggccgtaggtagcatcgcttacctgttctttaccaaccgccacgaggtccgcaagatgactcttgaccgtagtgaatacacgagcctgattccgaacctgagaaacgtcgtcgccttagacaccgaggtggcaagcaaccgcatctattggagcgatttgtcgcagcgcatgatttgctccacccagctcgatcgcgctcacggcgttagcagctatgatactgttatctcgcgtgacatccaggcaccggatggcctcgccgtcgactggatccacagcaacatctattggaccgattcggtcctgggtacggtctccgtcgccgataccaagggtgttaagcggaagaccctgttcagagagaacggctctaagccccgtgcgattgttgtcgacccagtccatggtttcatgtactggaccgactggggcacacccgccaagataaagaaaggcggtctaaatggtgtcgacatctactcccttgtcaccgagaatatccagtggccaaatggtataacattagacctgctcagcggtagactttactgggtggattccaagctccatagcatctcctcgatcgacgtaaacggtggcaaccgtaaaactatcttggaggatgagaagagacttgctcatccattctctctggctgtcttcgaagacaaagtgttttggacggatatcatcaacgaggcgattttctccgccaaccgcctgaccggctccgacgtcaacttgctggcagagaatctcctctcccccgaggacatggtgctctttcacaacctgacccagcctcgcggcgtcaactggtgtgagcgcaccacgttgtccaacggcggctgccagtatctttgtctgcccgctccccagatcaacccacactcacccaagttcacttgcgcttgccccgatggcatgttgctcgcccgcgatatgaggtcttgcctcacagaggccgaggcggccgttgctactcaggagacgtcgaccgtacgactgaaggttagctccacggccgtcagaacccagcacaccacgacccgcccagttcctgatacctcccgtctgccgggcgccacccccggactgaccaccgtcgaaatcgtcaccatgtcacatcaggctctcggcgatgtcgccggccgcggtaacgaaaagaaacccagcagtgtccgagctctgtccatcgtgctacccattgtcctgctcgtgttcctgtgtcttggggtctttctgttgtggaagaactggaggctgaagaacataaattcgatcaacttcgacaacccggtgtaccagaagacgactgaagatgaggtccacatctgccacaaccaggacggctactcctacccctctaggcagatggtgtccctcgaggacgacgtcgct

SEQ ID NO: 16035 - DNA, 2580 bp, synthetic construct
  misc_feature 1..2580: note = source = /note="Description of Artificial Sequence: Synthetic coding sequence"
  source 1..2580: mol_type = other DNA
atgggcccttggggttggaagctccggtggacggtggccctgcttctcgccgcggcggggactgcggtgggcgaccgttgcgagcgaaacgagttccagtgccaggacgggaaatgtatctcctataagtgggtgtgcgacggctccgcggaatgccaggatggctcagatgaatcccaagaaacctgcctgtcggtgacgtgtaagtcgggagacttctcctgtggtggaagagtgaatagatgcattccgcagttctggcgctgtgatggtcaagtggactgtgacaacggctccgacgaacagggctgcccaccaaaaacctgctcccaagatgagttccgctgccatgacggaaagtgcatctcacggcaattcgtctgcgacagcgatagagattgcctggatgggtccgacgaagcctcctgcccggtgctcacctgcggtccggccagcttccaatgcaactcctcgacttgcatccctcagctttgggcatgcgacaatgacccggattgcgaggacgggtctgatgagtggccccagcggtgcagaggactgtacgtgttccagggcgacagttcgccatgttccgctttcgagtttcattgcctgtcaggagagtgcatccactctagctggcggtgcgacggggggcctgattgtaaggacaaatcggatgaggaaaactgcgcggtggcgacttgcaggccggacgagtttcagtgctccgacggcaattgcatccatggatcgcgccagtgcgaccgcgagtacgactgcaaggatatgagcgacgaagtcggatgtgtcaatgtgactctgtgtgaaggaccaaacaagtttaagtgccactccggagaatgcatcaccctcgacaaggtctgcaacatggctcgcgattgccgagattggtcggacgagccgatcaaggaatgtggtaccaacgagtgtctggacaataacggcgggtgctcacacgtttgcaacgaactgaagatcggatatgagtgtctttgtcctgatggctttcagttggtggctcaacgccggtgcgaggacatcgacgaatgtcaagatccagacacctgttcacaattgtgcgtcaatctcgagggagggtacaagtgccagtgcgaagaaggattccagttggatccgcatacgaaggcctgtaaagccgtgggatccatagcttatctgttcttcaccaaccgacacgaggtcagaaagatgaccctggacagatcggaatacacctcgctcatcccgaacctgcgcaatgtggtggcgcttgacactgaagtggcatccaaccggatctattggtcagacctctctcagaggatgatctgctccactcagctggaccgcgcgcatggagtctcatcatacgataccgtgatctcgcgcgatatccaggcaccggacggcctcgccgtcgattggatccacagcaacatttactggactgattccgtgcttggcaccgtgtccgtggcggacactaaaggagtgaagcgcaagacgttgttccgggagaacgggtcaaagccgcgagcaattgttgtcgatccggtgcacggatttatgtactggaccgactggggcactccagcaaaaatcaagaagggcggactgaacggtgtggacatctactccctggtgaccgaaaacattcaatggccgaacggcattaccctcgacctcctttccggtcggctgtactgggttgattccaaactccattcaatttctagcatcgacgtgaacggaggaaatagaaagacgatcctggaggacgaaaagagactcgcgcacccgttctcactggccgtgtttgaggacaaagtgttctggactgacatcatcaatgaggccatcttctccgcaaaccgcctgaccggcagcgacgtgaacctgctggccgaaaacttgctgagcccagaggatatggtgctgttccataatcttacccagccaaggggggtgaactggtgcgaaagaaccacgctctcgaatggcggatgtcagtacctgtgcctgccagcaccgcagataaacccgcattccccgaagtttacctgcgcgtgcccggatgggatgctgctcgcgcgggacatgaggagctgtctgactgaggcggaagccgccgtggcaacccaggaaacctctactgtgcgcctgaaggtgtcgtccaccgcggtgcgcacccaacataccaccactcgccctgtcccagatacttcacgcctgcccggcgccaccccgggcttgaccactgtggagattgtgactatgtcgcaccaagccctgggtgatgtggctgggcgcggaaacgaaaagaagccaagctcggtgagggccctctcgattgtgctgccaatcgtcctgctcgtgttcctgtgcctgggtgtgttcctcctttggaagaactggcggttgaagaacatcaacagcatcaatttcgacaatccagtgtaccaaaaaaccactgaggacgaagtgcatatctgccacaaccaagatggctacagctacccaagccggcagatggtgtcgcttgaggacgacgtggcc

SEQ ID NO: 16036 - DNA, 2580 bp, synthetic construct
  misc_feature 1..2580: note = source = /note="Description of Artificial Sequence: Synthetic coding sequence"
  source 1..2580: mol_type = other DNA
atgggtccgtggggttggaagctgcggtggactgtggcattgctcctggctgcggcgggaactgcagtgggggatcgctgcgagcggaacgagttccagtgccaggacggaaagtgcatctcctataagtgggtgtgcgatggctcagccgagtgtcaagacggtagcgacgaatcgcaagagacttgcttgtcggtgacgtgcaaatcaggggatttctcgtgcggaggacgggttaaccgctgcatccctcagttttggaggtgtgatggacaggtggattgcgacaatggaagcgacgagcagggttgtccgccgaaaacctgttcccaggacgagttcagatgtcatgatgggaagtgcatctcgcggcaatttgtgtgtgatagcgaccgcgactgcctcgatggatcagacgaggcgtcgtgcccggtcctcacgtgtggcccggcctcctttcaatgtaacagctcgacctgtattccccaactctgggcgtgcgacaatgacccggattgcgaggacggctctgacgagtggccgcaacgctgcaggggactgtatgtgtttcaaggggatagctccccgtgctcggcattcgaatttcactgcctcagcggggaatgcatacactcatcctggcgctgcgacggaggccctgactgcaaagacaagtccgacgaagaaaattgcgcagtggccacgtgccgcccggatgaatttcagtgctcggacgggaactgcatccacggatcacgccagtgtgaccgcgaatacgattgcaaggatatgtcggacgaagtgggatgcgtgaacgtgactctctgtgagggaccaaacaagtttaagtgccattcaggcgagtgtatcactctggacaaggtgtgcaacatggccagagattgccgggattggtcggatgaacccatcaaggagtgtgggactaacgagtgcctggataacaatggagggtgctctcacgtgtgcaacgaactgaaaatcggatacgaatgcctgtgcccggatggtttccagctggtggctcaacggcgttgcgaggatattgacgaatgtcaggacccggacacctgtagccagctgtgcgtgaacctggaaggcggatacaagtgccaatgtgaggaaggcttccaattggaccctcataccaaggcctgtaaagcagtcggttcaatcgcttacctcttcttcactaatagacacgaagtgcgcaagatgaccctggataggtcggaatacacttcgctcatccctaatctgcggaatgtggtcgcactggataccgaagtggcttcaaaccgcatctactggtcagacctctcgcagcgcatgatctgctctactcaactcgacagggctcacggtgtgtcatcctacgacaccgtgatctcccgcgatatccaggcaccagatggactggctgttgattggatccacagcaacatctattggactgacagcgtgctcggaactgtgtcggtcgcagacaccaaaggggttaagcgcaaaaccctgtttcgcgaaaatggctcaaagccacgggccatcgtggtcgatccggtgcacggattcatgtactggactgattggggaacccccgctaaaatcaagaaggggggacttaacggagtggacatctattccctcgtgaccgaaaacatacaatggcccaatggaattaccctggacctcctctctggacgcctctactgggtggattccaaactgcactcgatctcatcaatcgatgtcaatggaggaaacagaaagaccatcctggaggacgaaaaaaggctggcacacccgttctcgctggccgtctttgaggacaaagtattttggaccgacatcattaacgaggccatcttctcggcgaatcggctgactggctccgacgtgaacctcctggcagaaaatctgctttcgcccgaggacatggtcctctttcataacctgactcagccgaggggcgtgaactggtgcgaacggaccactctttcaaatggcggttgccagtacctgtgccttccggctcctcagataaatccgcacagcccaaagttcacttgtgcctgccctgacggcatgctcttggctcgcgatatgcgctcatgtctgacggaggcagaagccgcggtggccacgcaggaaacctctactgtccggctcaaggtgtcgtcaaccgctgtccggactcagcacactactacccgcccggtgccggataccagccggctcccaggagcgacccctggacttaccaccgtggaaatcgtgactatgtcccaccaggcccttggagacgtggcgggcagagggaacgagaaaaaaccgtcgtccgtccgcgcgttgagcattgtgctcccaatcgtgctgctcgtgtttttgtgcctcggagtgttcctgctgtggaagaattggcggcttaagaacatcaactccatcaacttcgacaaccccgtctaccagaaaactacggaggacgaggtgcatatttgccacaaccaggatggctactcctacccttcgcggcagatggtcagcctggaagatgatgtcgcg

SEQ ID NO: 16037 - DNA, 2580 bp, synthetic construct
  misc_feature 1..2580: note = source = /note="Description of Artificial Sequence: Synthetic coding sequence"
  source 1..2580: mol_type = other DNA
atgggtccctggggttggaaattgcgctggaccgtggccttactccttgccgctgcagggacagccgtgggagatcggtgtgaaaggaacgaatttcaatgtcaggatggcaaatgtatcagttacaaatgggtttgtgatggatccgcagagtgccaggatggaagcgatgagagccaagagacatgcctgtctgtcacatgtaagagcggcgattttagctgtgggggccgtgtaaacaggtgcatcccacaattctggagatgcgatggacaagtggattgcgataatggcagcgatgaacaggggtgtcccccaaagacgtgttcacaggatgagtttcgatgccacgatggcaaatgtattagcagacagttcgtttgtgacagcgaccgcgactgcctcgacggaagcgacgaggcctcctgtcctgtgctcacctgcggccccgctagcttccagtgtaatagctccacctgcatcccacagctgtgggcttgtgacaacgatcctgactgcgaagacggtagcgatgaatggccccaaagatgtagaggactatatgtgtttcagggagatagtagcccatgttccgcgttcgaatttcattgcctgtccggcgagtgcattcactctagctggagatgcgacggcggccctgactgcaaggataagtctgacgaagaaaactgtgctgtggccacctgccggccagatgagttccagtgtagcgatggcaactgcatccacggttctcgtcaatgcgatagagagtacgactgcaaagatatgtctgacgaagtcgggtgcgttaacgtgaccctttgtgaaggaccaaataagtttaagtgtcactcaggcgagtgtatcactctggataaggtgtgcaacatggccagggactgcagggattggagcgacgaaccaattaaagaatgcggcaccaacgaatgcctggacaacaacggaggttgttcccacgtgtgcaacgagcttaaaatcggctatgaatgcctgtgcccagatggattccagctagttgctcagaggagatgtgaggacattgatgagtgccaggaccctgacacatgttcacaactttgtgtcaacctggaaggcggctacaaatgtcaatgtgaggaagggttccagctcgacccccacactaaggcttgtaaggcggttggctctatagcatacttgttcttcacaaatagacacgaagtacggaaaatgaccctcgaccgctcagagtatacctctctcatccctaatctgcgcaacgtcgtggcattggacactgaagttgcctccaatcgcatctattggagcgacctatcgcagagaatgatttgttcaacacagctggatcgcgctcacggagtgtccagctacgacacggtcatctctagggacatacaggcacccgatggactcgcggtcgattggatacactcaaacatctactggacggattctgtcctcggaacagtgagcgtggcagataccaaaggggtgaagaggaagacattattcagggagaacggatctaagccgagagctatcgtagtggatccagtccatgggttcatgtactggacagactgggggacccccgccaaaatcaaaaagggcgggctcaacggcgtggacatctatagcttggttactgagaatatccagtggcccaatggaataactcttgatctcctgagcggacggctctattgggtagacagcaaattgcattcaataagctccatagatgtcaacggaggaaaccgcaaaaccatactggaggacgaaaagcgcctggcacatccattttcgctggccgtgtttgaggacaaggtgttctggacagatatcatcaacgaagccatattcagtgcgaacaggttgacaggatccgatgttaacctgctggctgaaaacctgttgagcccagaggatatggtgctgtttcataacctgacccagcccaggggagtgaactggtgcgaacggactaccctgtcaaatgggggttgtcaatacctgtgcctgcctgctccccagataaaccctcacagcccaaagtttacctgcgcctgcccggacggaatgctcctcgctagggacatgaggtcctgcttaacagaagcggaggccgcagtggctacccaggagacatccactgtccgattgaaggtgagctccacagctgtccgcacccaacataccactacccgcccagtacccgatacctccaggcttccaggagccaccccaggactgacaaccgtcgagattgttaccatgagccatcaggcactgggcgacgtagctggacgaggaaacgaaaaaaagcctagcagcgtcagagcattatcaattgtgctgcccatcgttttactggtgttcctctgtctcggagtctttctactgtggaagaactggcggctcaagaatatcaactctattaacttcgataacccagtgtaccagaaaactaccgaggatgaagtgcatatttgccataaccaggacgggtactcctatccttcccgacaaatggtctcactggaggatgacgtggca

SEQ ID NO: 16038 - DNA, 2580 bp, synthetic construct
  misc_feature 1..2580: note = source = /note="Description of Artificial Sequence: Synthetic coding sequence"
  source 1..2580: mol_type = other DNA
atggggccatgggggtggaagctgcgttggacagtggccttgctcctcgctgcggcgggcaccgctgtcggtgataggtgcgaacgaaatgagttccaatgtcaggatggaaagtgtatttcttacaagtgggtgtgcgacgggtctgctgagtgccaggacggttccgacgaaagtcaggaaacttgtttgagtgtgacttgtaagagtggggacttcagctgcgggggacgagtaaataggtgcatcccacaattctggagatgcgacggacaagtggactgcgataacggatccgacgaacagggatgtcccccaaagacatgctctcaggatgagtttcgttgtcatgacggaaagtgcatcagccggcaatttgtttgcgactccgatcgcgactgcctagatgggagcgatgaggccagctgcccagtgctgacatgcggtcctgcctcttttcagtgtaattcttcaacatgcattccacaactgtgggcgtgtgacaatgaccccgactgcgaagacgggtcagatgagtggccccagcgctgccgcggactctacgtgtttcaaggtgattctagcccatgcagcgcgtttgaattccactgcctcagcggggaatgcatccatagttcctggcggtgtgacggcgggccagattgcaaagataagagcgacgaggaaaactgcgcggtggcaacgtgccgcccagatgagttccagtgcagcgatggtaactgcattcacggctccaggcagtgcgatcgcgagtatgattgcaaagacatgtcagacgaggtcggctgtgttaacgtgactctgtgcgaaggacccaataaattcaaatgccacagcggagagtgtataactctcgacaaggtatgcaatatggcgagggactgtagggactggagcgatgagcctataaaggaatgtggcaccaatgaatgtctcgataataatgggggctgctcacacgtatgcaacgaattgaaaatcggatatgaatgcctctgtccggatggattccaactcgtcgcccaaagacgctgcgaggatattgacgagtgccaagacccagacacgtgctcacagctctgcgtcaatttagagggcggctataagtgccagtgcgaggaggggttccaactcgatccccacaccaaagcctgcaaagctgtgggaagcattgcatacttgttctttacgaatcgacacgaggtcagaaagatgactttagacagatcagagtacacctccctgattcctaacctgaggaatgttgtggcgctcgacactgaggtcgcatccaaccgaatctattggagcgatctgtcccaacgtatgatttgttctactcagctcgatcgagcccacggggtcagcagttacgacacagtgatatcccgggacatccaagctcccgatggactggccgtggattggatccattcgaacatctactggactgatagtgtccttggaacagtgtcagtggcggacaccaagggcgtgaagaggaaaacactatttcgagaaaacggtagtaaacctcgagccatagtggtcgacccggtccacggatttatgtattggaccgactggggcactccggccaagataaaaaaaggcggcctgaatggggtggatatctactcgcttgtgactgagaacatccagtggcccaatgggataaccctagacttacttagtggcaggctatactgggtggatagtaagctgcactcgatttcaagcatcgacgtcaacgggggaaaccgaaagacaatcctggaggacgaaaaacggcttgcgcaccccttttctttagcagtgttcgaggataaggtcttctggaccgatatcatcaacgaagcgatcttcagcgcaaaccgattgacaggttcggatgtaaacttgcttgcagagaatctgctaagtccagaagatatggtgctgtttcacaacttgacccagcctcggggcgtgaactggtgtgagaggaccaccctgtctaatggtggatgtcagtacctgtgcttgccggcccctcagattaatccacattccccaaagtttacctgcgcctgcccggacggaatgctcctggcgagagacatgcggagctgcttaacagaagctgaagcggccgtagcaacgcaggagactagtacggtccggctaaaagtgtcctctacagctgtgcgcacccagcacactactacccgcccagtgcccgatacatccaggctgccaggcgcaacaccaggattaactacggtggagatcgtgacaatgtctcaccaggcgctgggtgacgtggccggaaggggtaatgaaaaaaaacctagctctgtcagagccctgagtatagtacttccaatagttctgctggtctttttatgcctgggtgtgttcctgctgtggaaaaattggcgccttaaaaacattaatagcatcaacttcgacaaccctgtttatcagaaaactaccgaagatgaagttcatatctgccacaaccaggacgggtatagctaccccagccgccagatggtgagcctggaggacgacgtggcc

SEQ ID NO: 16039 - DNA, 2580 bp, synthetic construct
  misc_feature 1..2580: note = source = /note="Description of Artificial Sequence: Synthetic coding sequence"
  source 1..2580: mol_type = other DNA
atgggaccctggggctggaaactcagatggaccgttgccctactgctggccgccgctgggactgctgttggagatagatgcgaacggaatgagtttcaatgccaggacggtaaatgcatctcatacaaatgggtgtgtgacggatccgccgagtgccaggatgggagcgatgaatcccaagaaacctgcctgtccgtgacctgtaaaagcggggatttctcatgcggaggaagggttaatcggtgcatcccacagttctggcgctgcgacggtcaggtggattgcgacaacggtagtgatgaacagggatgccctcctaagacatgctcacaggatgagtttaggtgccatgatggtaaatgtatttctcggcagttcgtttgtgactcagaccgggactgtctcgatggatcagatgaagcctcctgtcctgtgctgacctgcggcccggcatcgtttcagtgtaatagtagtacctgcattccccagttgtgggcctgcgacaacgatcccgactgcgaggatggcagtgatgagtggcctcagcgctgccgtggactttatgtgttccagggagacagttctccatgctcagcctttgagtttcattgtctatctggcgaatgtattcactcctcatggagatgtgatggcggcccggattgcaaggataagtccgacgaagaaaactgcgctgtagccacatgtagacccgatgagtttcaatgctcggacggcaattgcattcatggatcccgtcagtgcgatagagagtatgactgtaaggacatgtcggatgaagtcgggtgtgttaatgttacgttgtgcgagggcccaaacaaattcaaatgtcatagtggcgaatgcattacactcgacaaggtgtgcaatatggctagggactgtagagactggtccgacgagccaatcaaggagtgcggaaccaacgagtgtctcgacaataatggcggatgttcacatgtttgtaacgaactcaagattggctacgagtgcctttgccctgacggttttcagctcgttgcgcagagacgctgcgaagatatcgacgaatgtcaggacccggatacctgtagccaactgtgcgtcaacttagaaggaggctacaagtgccagtgtgaagagggtttccagttggatccgcacactaaagcctgcaaggcagtcggttccatcgcatacttgttctttacaaaccgtcacgaagtacgcaaaatgactcttgaccgctccgagtacacctcactgatccctaatctacgcaacgttgttgctttggacaccgaagtggcctctaaccgcatctactggtcagatctatcccaacgtatgatctgtagcacacagctcgacagggctcacggagtgagctcctacgataccgtgatcagccgagatatacaggcccccgacggtctggctgtggactggatccactccaacatttactggactgactctgtgctcgggaccgtgtccgtcgctgacactaaaggagtcaagcggaagacactgtttcgggagaacggaagcaagcctcgagcgatcgtggtcgatcccgttcatggctttatgtattggaccgactgggggactcctgcaaaaattaaaaagggaggacttaatggcgttgatatatactctcttgtcactgagaacatccaatggcctaatggtataacgctggacctattgagtggtaggctctattgggtcgattctaagctgcactctataagtagcatcgacgtgaatgggggtaatcggaagaccatcctagaagacgagaagagattggctcacccgtttagtctggccgtgttcgaggataaagtgttctggactgacattattaacgaagccattttctcggccaatcggctgactggttctgatgtgaacctgctcgcagagaacctcttgtccccagaagacatggtactgtttcacaacttaacccagccgagaggggtgaactggtgtgaacgaaccacattgtctaatggcggctgtcagtacttgtgcctgccagcgccccagatcaacccacacagtccaaaattcacttgcgcgtgcccagacgggatgcttctcgcccgggatatgaggagctgcctcaccgaagctgaggctgccgtggcaacacaagagactagcactgtacgcctgaaagtctcgtcaacagccgttcgaacacagcacacgactaccaggccagtgcctgacacatcacggcttccaggggctacaccgggacttaccaccgtggagattgtcaccatgagccaccaggccttgggagacgtggccgggcgcggaaacgagaaaaagccatcttccgtgcgggctttatctatagtgttgccaatcgtcttgttggtctttctctgccttggcgtcttcctgctttggaaaaattggaggctgaagaatattaacagtatcaactttgacaatccggtataccaaaaaaccactgaagatgaagtgcatatttgtcataaccaggacggctatagttatccaagccggcagatggtgtctctggaggacgatgtcgca

SEQ ID NO: 16040 - DNA, 2580 bp, synthetic construct
  misc_feature 1..2580: note = source = /note="Description of Artificial Sequence: Synthetic coding sequence"
  source 1..2580: mol_type = other DNA
atgggaccctgggggtggaagctgcgctggacagtggcactgcttttggcagccgctggaactgctgtgggagataggtgtgagagaaacgaatttcagtgccaagatggaaagtgcatcagttataagtgggtttgtgacggcagcgcggaatgccaggatggcagtgacgagtcgcaggaaacttgtttgagcgtgacctgcaagagtggcgacttttcttgcgggggtcgggtcaaccgatgtatccctcagttctggaggtgcgatggtcaggtggactgtgacaacggttcagacgaacagggatgcccccccaaaacctgctcccaggatgagttccgctgtcacgacgggaaatgtataagcaggcagttcgtctgtgactccgatcgggattgcctggatgggtcggacgaggcctcatgccccgtgctcacgtgcggtccagcctcttttcaatgtaacagcagcacatgtattccccagttgtgggcttgtgacaatgatccagactgcgaagacggatctgatgagtggccgcagagatgtcgaggattgtacgtttttcagggcgattcttcaccatgcagcgcctttgaattccactgcttgtctggggagtgcatccattcctcttggcgatgcgacgggggccctgattgcaaggataaaagcgatgaggagaattgcgccgtggcaacctgcaggcccgatgaatttcaatgctcagacggcaattgtatccatggcagcagacagtgcgaccgagagtatgattgtaaagacatgtccgacgaggttggctgtgttaacgtgacactgtgcgagggccccaataaattcaagtgtcacagcggggaatgtattactctggataaggtgtgcaatatggctagggactgcagggactggagtgatgaaccaataaaggagtgtggcactaatgagtgcctagataataacggcggttgcagtcatgtgtgcaacgagctcaaaatcggctacgagtgcctgtgcccagacggattccagctggtggctcagcggagatgtgaggatatcgatgagtgccaggatccagacacatgcagccagctgtgcgttaacctggagggcggatacaagtgccagtgcgaggagggttttcagctagatccccacacgaaagcgtgtaaggcggttggttccattgcctacctcttcttcacgaaccgtcatgaggtgagaaaaatgacacttgacagatctgagtacacctccctcattccaaacctgaggaacgttgtcgctctggataccgaagtcgccagcaacagaatttactggtcagacctgtcccagcgcatgatatgctccacccaactggacagggctcatggagtttccagctacgacacagtaatctctagggatatccaggcccccgacgggctcgcagtggactggattcactccaacatctactggacagacagcgtactgggcaccgtttcagtggccgacaccaagggagttaagcggaagactttgttcagggaaaacggaagtaagcctagagcgatcgtcgttgacccagtccatggctttatgtactggaccgattgggggactccggcaaagatcaagaaggggggtctgaatggcgtggacatctacagcctggttacagaaaatatccagtggccaaacggcatcacccttgatctgctgtcaggtcgactctattgggtggattcaaaactacattccatttcaagcatcgatgtcaacggggggaacagaaaaactatcctagaggacgaaaagcgactcgcacatcccttcagcctagcagtcttcgaagacaaagtattctggactgacatcatcaacgaagccattttctcggccaacaggctgaccgggtcagacgtgaatctgttggccgagaatctactgagtccagaagatatggtgttattccacaatctaacccaacccagaggggtgaactggtgtgagcgtacaaccctcagcaacggcggttgtcagtacctgtgcctgcctgccccacagatcaacccccactcccccaagttcacttgcgcgtgcccagacgggatgctcctggctcgcgatatgcgctcttgtcttacagaagccgaagccgctgtagctactcaggaaacctccaccgtccgcctgaaagttagcagcactgccgtgaggacccagcacacgacaactagaccggtgcccgacacaagcagactcccaggggctacccccggtttaaccacggtagagatcgtgacaatgtcacatcaggctcttggggatgtggccgggcgcggcaacgaaaagaagcctagtagcgtgagagctctgtccattgtgctgcctatcgttctgctagtgttcctgtgtttaggcgtgtttttgctctggaagaactggcgtctgaagaacataaactccattaacttcgacaaccccgtctatcagaagaccaccgaggatgaagtccacatctgtcacaaccaggatggctactcctaccctagtaggcaaatggttagcttggaggatgacgtggca

SEQ ID NO: 16041 - DNA, 2580 bp, synthetic construct
  misc_feature 1..2580: note = source = /note="Description of Artificial Sequence: Synthetic coding sequence"
  source 1..2580: mol_type = other DNA
atggggccctgggggtggaaactgaggtggactgtggcactccttctggcagccgctgggactgctgtgggagatcggtgtgaacgcaatgaattccagtgtcaggatgggaagtgcatctcttataaatgggtttgcgatgggtccgccgagtgccaggatgggtctgatgaatcccaggagacatgtctctccgtcacatgcaaaagtggggatttctcgtgcgggggaagggtgaaccggtgcatcccccagttttggcggtgtgacggacaggtcgattgcgataacgggtccgatgagcaggggtgcccacctaagacatgctcgcaggatgaattccggtgccatgatggaaaatgtatatctcgccagtttgtatgtgacagtgatagggattgtctggatgggagtgatgaagcatcttgtcccgtgctaacatgtggaccagcaagttttcagtgcaatagttctacttgtatacctcagctctgggcttgtgataatgatcccgattgcgaagatgggtcagatgaatggcctcagaggtgcagagggttatatgtctttcagggagattcatctccctgctctgccttcgaatttcactgcttatccggggaatgtatccacagttcttggcgctgtgatggagggccggactgtaaagataaaagtgatgaggagaattgcgcggttgctacatgccggcccgatgaatttcagtgttccgatgggaattgcatccacggaagtagacagtgtgatagggagtatgactgtaaagatatgagtgatgaggtgggatgcgttaacgtaacactctgcgagggacctaataaattcaagtgtcattcaggagaatgcatcacactcgacaaggtgtgtaacatggctagagattgtagagattggtcagatgaacccatcaaagaatgtgggactaacgaatgcctcgataataacggggggtgttctcatgtttgtaatgaactcaaaataggatatgaatgcctgtgtcccgatgggtttcagttagtggcccagcgccgatgcgaggatattgatgaatgtcaggatcctgatacttgcagtcagctgtgtgtaaatctcgaggggggatataaatgccagtgcgaagaagggtttcagctggatccccacactaaagcttgcaaagctgtgggatctatagcctacctattttttacaaatcggcatgaagtgaggaagatgacactggatagatctgaatatacatctctcatcccaaacctacgcaatgtggtggccctggatactgaagtggcctcaaaccgaatctattggagtgacttaagtcagcgaatgatatgctcaactcagctggatagagcccatggagtttcaagttatgatacagtgatatctcgagatatacaggcccccgatggactagctgtggattggatacattcaaacatatactggacagattcagtcttgggaactgtgagtgtggctgatactaaaggggttaaacgcaaaacactgtttagagaaaacgggtctaaaccccgggccattgttgtcgatcctgtccatgggttcatgtattggactgattggggaactcctgcaaaaatcaaaaaagggggactcaacggagttgatatctacagtctcgtcacagaaaatatacagtggccaaacgggattacactagatttattgtccggaagactatattgggtcgatagtaaactgcactcaatttcttctatagatgttaatggggggaacaggaaaacaatacttgaagacgaaaaacggctcgcccacccattctccttggctgtgttcgaagataaagtgttctggactgatattataaacgaggccatattttcggcaaacagactcactggatcagacgttaacctcctggctgaaaacctgctctcccccgaggatatggttcttttccataatcttactcagccaaggggggtcaattggtgtgagcggactactctcagtaatggggggtgtcagtatctctgcttacccgcaccccagattaacccacacagtccaaagttcacatgtgcctgcccagatggaatgttattagcccgcgacatgcggagttgcctcacagaagccgaggccgctgtggccactcaggaaactagtacagtgcgccttaaggtgagtagtacagcagtgcggacacagcacacaacaactaggccagttcctgatacatctcgccttccaggagccactcccgggcttacgactgtcgaaattgttacaatgtctcaccaagcacttggagacgtggccggacgaggaaacgagaaaaaacctagttccgtgcgcgctctttccatagtgctaccaatagtattactcgtcttcctatgcctcggagtatttcttctctggaaaaactggaggcttaaaaacataaactcaatcaatttcgataatcccgtttatcagaaaacgacggaagatgaggtccatatctgtcacaaccaggatggatattcttatccttccaggcagatggtgtctttagaggacgatgtggca

SEQ ID NO: 16042 - DNA, 2580 bp, synthetic construct
  misc_feature 1..2580: note = source = /note="Description of Artificial Sequence: Synthetic coding sequence"
  source 1..2580: mol_type = other DNA
atggggccttggggttggaagctcaggtggactgtggctcttcttcttgcagcggcagggacggctgtgggcgaccgctgcgaacggaacgaatttcaatgccaagatggaaagtgtatttcctacaagtgggtgtgtgatgggtctgcagaatgtcaagacggttcagatgaatcacaggaaacctgtctgtcagtgacttgtaagtctggagactttagctgtggtggacgtgtcaacaggtgcattccccagttctggcggtgtgacgggcaagtggattgcgataacgggtcagacgagcaaggatgccctccaaagacgtgttcgcaagacgaatttcgttgccatgacggaaaatgtatcagccgccaattcgtctgtgactccgatcgggattgtctcgatggatcggacgaagcatcatgtccagtgcttacttgtggccccgcttcctttcaatgtaacagctcgacctgtatccctcagctttgggcgtgcgacaacgatccagactgtgaagatggttccgacgagtggccccaacggtgtcgaggcctctacgtgtttcaaggagattccagcccgtgctccgcatttgagttccactgtctctcgggggagtgtattcattcgtcatggaggtgtgatgggggtccagattgtaaggataagtcggacgaagaaaattgtgccgtcgcaacctgtcgccctgatgaatttcagtgttcggatggtaactgcattcacggtagccggcagtgtgacagagagtacgattgcaaggacatgtcggatgaggtgggttgtgtgaacgtgactctgtgtgaaggcccaaacaagtttaagtgtcattcaggggaatgtattaccctggacaaggtgtgtaacatggccagagactgccgagattggtccgatgaaccgattaaagaatgcgggaccaatgagtgcctcgataacaatggaggttgtagccacgtgtgcaacgaactcaagataggatacgaatgcctgtgtcctgatggtttccaactcgtggcgcagcgacgctgcgaagatattgatgaatgccaggaccccgatacctgctcccaactgtgtgtcaacctggaaggaggatacaagtgccaatgcgaggagggtttccagctggatcctcacactaaggcatgtaaggccgtgggttccatcgcatacctgttctttacgaatcgacatgaagtgaggaagatgactcttgataggtcggaatacacctctctgattccaaatcttcgcaacgtggtggcgctggatactgaagttgcatccaatcgcatttactggtcggatctgtcgcaaaggatgatttgttctacgcagctggacagagcgcatggagtgtcatcgtacgatacggtgatcagccgtgatatccaggctcctgatggccttgctgtggattggatccattcgaacatttactggaccgatagcgtgcttggcaccgtcagcgtggcagatactaagggtgtaaagcgcaagaccctgtttagggaaaatggatccaagcctagagcaatcgtcgtcgacccagtccatggttttatgtactggactgattggggaacgccagcaaagatcaagaaagggggacttaatggcgtggacatttactcattggtcactgaaaacatccagtggcccaacggaatcaccctggacttgttgtctggtagactgtactgggtggactcgaaactgcatagcatttcctcaattgatgtgaacggaggaaatcggaaaactatcctggaggacgagaagaggcttgcacaccccttttccctggcagtgtttgaagataaggtgttctggaccgatatcattaacgaggcgatattctcagcaaacagactgactggaagcgacgtgaatcttctggctgagaatctcctgtcccccgaagatatggtgctgtttcataacttgacccagccaaggggcgtcaactggtgcgaaagaaccaccctctcaaacggtggttgtcaatacctgtgtttgccagcaccccagattaaccctcactcaccaaaattcacctgcgcatgtccagatggcatgctccttgcaagagatatgagatcctgtctcaccgaggccgaagccgcagtcgcaacccaagagactagcactgtgcgtctcaaggtgagctcgactgccgttcggactcaacatacgaccactaggccggtacctgatacctccaggctccccggagcaactcctggccttactaccgtggaaattgtgaccatgtcacatcaagcgctcggagatgtcgccggcagaggtaatgaaaagaaaccttcgtcagtgcgtgccttgtcgatagtactgccgatagtgctgttggttttcctgtgtctcggagtctttctgctttggaagaactggaggctcaagaacatcaactccattaacttcgacaaccctgtgtaccaaaagaccactgaggacgaagtgcacatatgccacaatcaggacgggtactcttacccatcgcgccaaatggtgtcgcttgaagatgatgtcgcc

SEQ ID NO: 16043 - DNA, 2580 bp, synthetic construct
  misc_feature 1..2580: note = source = /note="Description of Artificial Sequence: Synthetic coding sequence"
  source 1..2580: mol_type = other DNA
atggggccttggggatggaaactgagatggaccgttgctctgctgttagccgccgctggtaccgcagttggagacaggtgcgaacgcaatgagtttcagtgccaagacgggaaatgcatctcctataagtgggtctgtgacggatctgctgagtgccaggatgggagcgacgagtctcaggaaacatgtctgtctgtaacctgcaagtccggtgacttcagctgcggcggccgggtaaatcggtgtatcccacaattttggcgctgtgacggccaggtggattgtgacaacggatctgatgaacagggatgcccccctaagacctgctcacaggacgaattcagatgtcacgatggtaaatgcatttcaagacaatttgtgtgtgactctgacagagactgcctggatggtagcgatgaggcaagctgccccgtgttgacttgcggaccagcttcttttcaatgcaactcaagtacatgtattccccagctttgggcctgcgacaatgaccctgattgcgaggatggtagtgatgagtggccacagaggtgcaggggtttatatgtgttccagggtgatagttcaccttgctctgccttcgagtttcactgtctgagcggtgagtgtatacattcctcctggcgctgcgacggagggcccgactgcaaggataaatccgacgaggagaactgcgccgtggccacgtgtaggcctgacgaattccaatgctccgacggtaattgtatccacggatctcgtcagtgtgaccgcgaatatgactgcaaagatatgtccgatgaagttggctgcgttaacgtaactctctgcgaggggcctaacaagtttaagtgtcattccggcgagtgtatcacgctggacaaggtgtgtaatatggcgcgtgactgcagagattggtccgacgaacctattaaggaatgcggcacaaatgagtgtctcgacaataacgggggatgcagccatgtctgcaatgagctcaagatcggctacgagtgcctgtgcccggacggctttcagctggtcgcccaacgaagatgcgaggacattgatgagtgccaggacccagacacatgttcacaactgtgtgtaaatctggaggggggatacaaatgtcagtgcgaagaaggatttcaactagacccacataccaaggcctgcaaggcggtaggatccatagcctacctgtttttcactaaccgacacgaggtgagaaagatgactcttgacagaagtgaatacacctctctgatcccaaacctgcgaaatgtcgtggctctggacactgaagtcgcctccaatcgcatctactggtcagatctgtctcagaggatgatatgttccacccagctggacagggctcacggagtgtccagttacgacacagtgatttcccgagatatccaggctcctgacggactggccgtggactggattcactcaaatatctactggacggatagtgtgctgggcactgtgtctgtcgcggacacgaagggggtcaagcgcaagacgcttttccgtgagaatgggtccaaaccccgcgcaatcgtcgtcgacccagttcatggttttatgtattggacagattggggtacccccgcaaagattaaaaaaggcggcctcaacggggtcgatatctatagcctcgtgaccgagaacatccagtggcctaatggcattacactcgacctgcttagcggacgactgtattgggtggactctaaacttcactccatcagcagcatcgatgttaacggaggcaaccgcaagacgatcttagaggatgaaaagaggctcgcccaccctttctccctagccgtgtttgaagacaaggtgttttggactgacatcataaacgaggctatctttagtgcaaacaggttgacggggagcgatgtgaatttgctcgccgagaaccttctcagtcccgaggacatggtcctgttccataacttgacccaaccaaggggagtcaactggtgtgaaagaaccacgttaagcaacggagggtgccagtacctgtgtttgccagccccacaaatcaatcctcattcaccgaagttcacctgcgcctgtcccgatgggatgctcctggcgcgggacatgagaagttgtctgaccgaagccgaggcggccgtcgccacacaagagacttctactgtccgcctgaaggttagttccaccgctgtgcggacacagcacaccacaaccagaccagtgccagacacttcccgcctccctggcgccacacctgggctgactaccgtagaaatcgtaactatgtcccatcaagccctcggagacgtcgctggtcgggggaatgaaaagaagccctcgtctgtgagggcgctgtccattgtcctgccgatagtgctgttggttttcctctgccttggggtgttcctactttggaagaactggcggctcaagaatattaatagcatcaatttcgataatccggtgtaccagaagaccaccgaggacgaggtgcacatttgccacaaccaggacggctactcttacccctccaggcaaatggtgtccctggaggatgacgtcgca

SEQ ID NO: 16044 - DNA, 2580 bp, synthetic construct
  misc_feature 1..2580: note = source = /note="Description of Artificial Sequence: Synthetic coding sequence"
  source 1..2580: mol_type = other DNA
atgggtccgtggggatggaagctcaggtggaccgtcgccctgctcctggctgccgcgggaacggcggtcggagacaggtgcgagcggaacgaattccaatgccaagacggcaagtgcattagctacaagtgggtctgcgacggaagcgccgaatgtcaggatggctccgacgaaagccaggaaacctgcctgtccgtgacttgtaaatccggtgacttctcctgcggcggaagggtgaaccggtgtatcccgcagttttggcggtgtgatgggcaggtcgactgtgataacggatccgatgagcagggttgccctccaaagacttgctcacaggacgagttcaggtgccacgatggaaaatgcatctcccgccagttcgtatgcgatagcgacagagactgtctcgacggctcggatgaggcaagctgcccagtccttacctgcggtccagcgtcgttccaatgcaactcctccacctgcatcccccagctttgggcatgcgacaacgaccccgattgcgaggatggatcggatgaatggccgcagcgctgtcgggggctctacgtctttcagggggactcatcgccgtgctccgccttcgaatttcattgtctgtcgggcgaatgcattcattcgtcctggcgctgcgatggaggaccagactgcaaggacaagtcagacgaggaaaattgcgccgtggcgacgtgccgccctgatgagttccaatgttcggacggtaactgcatccacggctcccggcagtgcgatcgcgaatacgattgcaaagacatgagcgacgaggtcgggtgtgtcaacgtgaccctgtgcgagggaccgaataagttcaaatgccactccggtgagtgcataactctcgataaggtgtgcaatatggcccgcgactgcagggactggagcgacgaaccgatcaaggaatgtgggaccaacgagtgtctcgataacaacggaggctgtagccacgtgtgcaatgacttgaagatcggatacgagtgcgattgtcctgatggatttcagctggtggcacaacgccgctgcgaagatatcgatgaatgccaggacccagatacgtgctcccagttgtgtgtgaacctggaaggcggttataagtgccaatgtgaggagggtttccagctggacccgcacaccaaggcgtgcaaggccgtcggatccatcgcttacctcttcttcaccaacagacacgaggtgcgcaagatgactctggatagatccgaatacacttcgctgatccccaatctccgcaacgttgtggctctggacaccgaagtggcttcaaatagaatctactggtcggatctgagccagagaatgatttgctcgacgcaactcgaccgcgctcatggagtcagcagctacgacaccgtgatctcaagagatattcaggcaccggacgggctcgctgtagactggatccactccaatatctactggaccgattcggtgctgggtactgtgtcagtcgccgataccaagggagtaaagcgcaagactctgttcagggaaaatggaagcaaaccaagagcgatcgtcgttgacccggtgcatggcttcatgtattggaccgattggggcacgcctgccaagatcaaaaagggaggtcttaatggagttgatatctacagcctggtcaccgagaacatccagtggcccaacggcatcacgctggatctgctgtcaggacggctgtactgggtcgactcgaaactgcattcgatttcctccatcgatgtgaacgggggcaacagaaagactatcctggaggacgagaagcgccttgcccatcccttctcgctcgctgtgtttgaagataaagtgttctggaccgatatcatcaacgaagccatcttttccgctaatcggctgacggggtcagacgtgaatttgctggctgagaacctgctgtccccagaagatatggtcctgtttcataacctgactcaaccgagaggagtgaattggtgtgaacgcactacgctctctaacgggggatgccagtacctctgcctccctgcaccgcaaatcaacccacactcgccgaagtttacgtgcgcgtgtcccgatggaatgctcttggcgcgggacatgcggtcctgcctcaccgaggcggaggcagccgtggccactcaagaaaccagcactgtccggcttaaggtgtcaagcactgctgtccgcacccagcatactaccactaggccagtgccggacacgtcccggctgcctggagccactccgggcttgaccacggtggagattgtgaccatgtcccaccaggcgctgggagacgtcgcgggtcgcggtaacgaaaagaagccgagctccgtgcgcgcgctctccatcgtgctgccaatcgtcctcctggtgtttctgtgtctcggcgtgttccttctttggaaaaactggcggctcaagaacatcaatagcattaacttcgacaacccagtgtaccagaaaactaccgaagatgaagtgcacatctgccacaaccaagatggttactcatacccatcaaggcagatggtgtcgctggaagatgacgttgcc

SEQ ID NO: 16045 - DNA, 2580 bp, synthetic construct
  misc_feature 1..2580: note = source = /note="Description of Artificial Sequence: Synthetic coding sequence"
  source 1..2580: mol_type = other DNA
atggggccatgggggtggaagctacgttggacagtagccctgctgctcgccgcagctgggacagccgtgggagacaggtgtgaacggaatgagttccaatgtcaggatggaaaatgtatctcctataaatgggtgtgtgatgggtccgcagaatgccaggatgggtccgatgaatctcaagaaacatgtctgagtgttacttgtaaatctggggacttctcatgcgggggaagggtcaacaggtgtattccacagttctggcggtgtgatgggcaggtggactgcgacaatggaagtgatgagcaggggtgcccacctaagacatgctctcaggatgaatttcgctgtcacgatggaaagtgtatttcaaggcaattcgtctgtgactctgatcgagattgccttgatgggtccgatgaagcctcttgtcctgttctcacatgcggaccggcttctttccagtgcaactcttccacatgtataccccagctgtgggcgtgtgacaacgaccccgattgtgaagacggatcagatgaatggcctcagcgatgtcgggggctgtatgtcttccagggagattcttcaccttgcagtgcattcgaattccattgcctctccggagagtgtatccatagtagttggcggtgtgatgggggacccgattgtaaagacaaatccgatgaagaaaattgtgctgtggcaacatgccgcccagatgaatttcagtgttctgatgggaattgtatccacgggtccagacagtgcgatagggagtacgattgtaaggatatgtccgacgaagtgggatgtgtgaatgttacactgtgtgaagggcctaataaattcaagtgccacagtggagaatgtatcacattagataaagtctgtaacatggcccgggactgccgggattggtctgatgaacctataaaagaatgtgggacaaacgagtgcctcgataacaacggaggatgttctcatgtatgcaatgacctgaaaatagggtacgaatgcgactgtcccgatggattccagctcgttgcccagcgccgttgtgaagatatagatgagtgccaggaccctgatacatgtagtcaactatgtgtgaacttagaagggggatataaatgccagtgtgaagagggattccagctcgatccccacacaaaagcctgcaaagcagtggggtctatcgcatatcttttcttcactaaccgccatgaagtgcgcaaaatgacattagatcggtctgaatatacatctctcatacccaatctccgcaacgtggtggctctcgatactgaagtagcttcaaatcggatttattggtcagatctgagtcagagaatgatctgctctactcagctcgatcgagctcatggggtgtctagttatgatactgtgatttcccgcgatatacaggcccccgacgggctagccgttgattggatccattcaaatatttactggacggattccgttctgggaactgtgtctgtggcagatactaaaggagtcaagcgaaaaactctttttagggaaaacgggagtaaacccagggctatcgtcgtggacccagtccacggatttatgtactggactgattgggggacacctgcgaaaatcaaaaaaggaggactcaatggggtcgacatatattctttggtgacagagaacattcagtggcctaacggaatcacactggatctcctgagtggacggctgtactgggtagattccaaactccactctataagttctatagacgtgaacggagggaatagaaaaacaattctcgaggatgaaaaacgccttgcacaccctttcagtctcgcagtcttcgaggataaagtgttctggactgatattatcaacgaagccattttctctgccaatagacttacaggatcagatgtcaacctattggctgaaaacctcctgagtcctgaagatatggtgctgttccacaatctgacacagcccaggggagtgaactggtgcgagcgcacaacactgtctaacggggggtgccagtatttatgtcttcctgctccacagataaaccctcactctcccaaatttacatgtgcctgcccagacgggatgctactagcaagggatatgagatcttgcttgactgaggcggaggcggctgtagcaactcaggaaacatccacagtaaggttaaaagtctcttctactgccgtgcgaacacagcacacaacaactaggccggtcccagatacatctcgccttcctggagctactcctggattgactactgtcgaaatagtgactatgtcacatcaggcgctaggagatgtagcagggcgtgggaacgaaaaaaaaccatcttccgtcagggcactcagtatagtgctgcccatagtgctactcgtatttctatgtctgggagtattcctcctgtggaaaaactggcggttaaaaaatatcaattccatcaatttcgataaccccgtgtatcagaaaacaacagaagatgaggtacatatctgccataatcaagatgggtactcatacccttctcgccagatggtgtctcttgaggatgatgttgcc

SEQ ID NO: 16046 - DNA, 2580 bp, synthetic construct
  misc_feature 1..2580: note = source = /note="Description of Artificial Sequence: Synthetic coding sequence"
  source 1..2580: mol_type = other DNA
atgggaccctggggctggaagctgcggtggaccgtggcgcttctgttggcggcggcaggaaccgcggtcggtgacaggtgcgaaagaaacgaattccaatgccaggacgggaaatgcatctcgtacaaatgggtctgtgatgggtcagctgaatgccaggatggaagcgacgagtcgcaggagacttgcctctcagtgacgtgcaagtcaggagatttctcgtgcgggggtcgcgttaatcggtgcatcccgcagttctggcggtgtgacggccaggtggactgcgataacggatccgacgaacagggctgtcctcccaagacctgcagccaggacgagttcagatgccatgacggcaagtgtatctcccggcaattcgtgtgtgactcagaccgcgactgcctggacggttctgatgaagcatcctgccctgtgcttacctgtggccccgcgtcatttcaatgcaactcctcgacctgcatcccgcaactctgggcttgcgacaacgatccggactgcgaagatggatcagacgagtggccacagagatgccgggggctttacgtttttcaaggtgatagctcgccgtgctcggcattcgagttccattgtttgtccggcgagtgcattcactcatcctggcgctgcgacggaggtccggactgcaaggacaagagcgacgaggagaattgcgcggtggcgacttgcagaccggacgagttccaatgttctgatggaaattgtatccacgggtccagacagtgcgacagagaatacgattgtaaggatatgtcggatgaagtgggatgcgtcaacgtcaccctctgtgaaggtcccaacaaattcaagtgccactcgggagaatgcatcacccttgacaaagtgtgcaacatggcgcgggactgccgcgattggtccgatgagccgatcaaagaatgcggtactaacgaatgcctcgacaacaatgggggttgcagccacgtgtgtaacgacctcaaaatcgggtacgaatgcgattgtccagacggattccagcttgttgcgcaaaggcgatgcgaggacattgacgaatgccaagacccggatacctgttcgcagctctgtgtgaatctggaaggagggtacaagtgccagtgcgaagagggattccaactcgaccctcataccaaagcatgcaaggccgtgggaagcattgcttacctgttctttaccaaccgacacgaagtccgcaaaatgactctggaccgcagcgaatacacctccctgatcccgaatctgcggaacgtggtggccctcgacactgaggtggcttccaacaggatctactggtccgacctgtcgcagaggatgatctgtagcacccagctggatcgcgcacacggtgtgtcctcgtatgataccgtcatctcacgggacatccaagcaccagatggactggcggtcgactggatccactcgaacatctactggactgactccgtgcttggaaccgtgagcgtcgccgacactaagggggtcaaacgcaagacgcttttccgcgaaaacggatccaaaccccgggccattgtcgtcgaccctgtccacggatttatgtactggactgattggggcaccccagccaagatcaagaagggagggctgaatggcgtcgacatatactcactggtgaccgagaacatccagtggccaaatggcatcactctcgatttgctgtcgggcaggctgtattgggtggatagcaagctccattcaatctcgtcgatcgatgtgaatggaggaaatcgcaagactatactggaggatgagaaacggctcgcgcatccgttttccctggctgtgttcgaggacaaagtgttttggaccgatatcatcaacgaggccatcttctcggccaatagactcactggatcggatgtcaatttgcttgccgagaatctgctgtcaccggaagatatggtgctgttccacaacctcacgcagcctcggggcgtcaattggtgtgagcgcactaccctgtccaacggaggatgtcagtacctgtgccttcccgcgccacaaatcaacccacacagcccaaaattcacttgcgcatgcccggacggtatgctgctggcgagggacatgaggtcatgtctcaccgaagccgaagcagcggttgcgactcaagaaacttcaaccgtcagactgaaggtgagctcaactgccgttcgcactcagcacactactactcgaccggtgccggatacctcgagactgcctggcgcaacgcccggactgaccactgttgaaatagtgactatgtcgcaccaggccctcggggacgtggcaggacgcggaaacgaaaagaagccgtctagcgtgcgcgcgctttcaatcgtgctccctattgtgctcctggtgttcctgtgcctgggcgtgtttctcttgtggaagaattggagactgaagaatatcaacagcatcaattttgacaatccggtgtaccaaaagaccaccgaagatgaggtccatatctgccataaccaggatggctactcgtacccgtctaggcagatggtgagcttggaagatgacgtggcc

SEQ ID NO: 16047 - DNA, 2580 bp, synthetic construct
  misc_feature 1..2580: note = source = /note="Description of Artificial Sequence: Synthetic coding sequence"
  source 1..2580: mol_type = other DNA
atgggaccatggggctggaagctcagatggactgtggcactgctgctggccgccgccggaacggcagtgggtgatcgctgtgaacgcaacgaattccaatgccaggacggtaagtgtatttcatataagtgggtctgcgatgggagtgctgagtgtcaggatggatccgacgaatctcaagagacttgtctttccgtgacctgtaagtctggagacttctcgtgcggtggtagagtgaaccgctgtatcccccaattttggcggtgtgatgggcaggtggactgtgataacggcagcgacgaacagggctgtcctcctaaaacctgttcacaagatgaattccgttgtcatgatggaaagtgtatttctcgacagttcgtgtgcgattcggaccgggattgcctcgacggttcggacgaagcctcatgtccggtgctgacttgtggacctgcttcctttcagtgtaactcatcgacttgcattccacaactctgggcatgtgataatgatccggactgcgaagatggatcggacgagtggcctcagagatgtaggggtttgtacgtgtttcagggggattcatcgccatgctcagcctttgaatttcactgtctttcaggcgagtgcatccattcgtcgtggcgatgcgatggaggtcctgattgcaaagacaaaagcgacgaggagaactgtgccgtggcgacttgtcgcccggacgaatttcaatgttcagatggcaactgcatccatggaagccgtcagtgcgaccgagaatacgattgtaaggacatgtcggatgaagtgggatgcgtgaacgtaactctgtgtgagggacctaacaagttcaagtgtcatagcggtgaatgtatcacccttgataaggtgtgtaacatggctagagattgtagagactggagcgatgaacccatcaaagaatgtggtactaacgagtgcctggataacaacggtgggtgttcacatgtctgcaacgatctgaaaattgggtacgaatgtgactgcccggacggttttcagttggtggcacaaaggaggtgcgaagatatcgatgaatgccaggatccagatacctgctcccaactttgcgtcaacctggaaggaggatacaagtgtcaatgtgaagaaggatttcaacttgacccacatactaaggcctgtaaggcagtagggtccatcgcatacctgttctttaccaaccgtcatgaagtgcgaaagatgacccttgatagatccgagtacacttcgctcattcctaaccttagaaatgtcgtggcactcgacaccgaagtcgcgagcaacagaatatactggtccgatctttcccagagaatgatctgttcaactcaactggatcgtgcgcatggtgtgtcgtcgtatgatacggtcatcagccgggatatccaagccccagatggcctggcagtcgattggatccattcaaacatttactggactgattccgtgctcgggaccgtttctgtggcagatactaagggagtgaagcgaaagaccctgttcagagagaacgggtcgaaacctagagcgattgtggttgatccagtgcatgggtttatgtactggactgactgggggaccccggcaaagataaagaaagggggtctgaacggtgtcgacatctactcacttgtgaccgagaacatacagtggcccaacggtataactcttgatctcctttctggacgcctttactgggtggattcaaaattgcactcaatttcctctatagatgtgaatggaggcaatcggaaaactattctggaggatgaaaagcgtctggcacatcctttctcacttgcggtgttcgaggacaaggtgttctggactgacatcatcaatgaggcaatcttttccgccaatcgacttactggcagcgacgtcaatcttctcgcagagaatctgctttcaccagaggatatggtcctgtttcataatcttactcagcctagaggagtgaactggtgcgaaagaaccacgctcagcaatggcggatgtcaatacctgtgtctcccagcgcctcaaatcaatccccattcgccaaagtttacttgtgcatgtcccgatggcatgctgctggccagagacatgaggtcatgtctcactgaagccgaggccgccgtggcaacccaggaaacctcaacggttagacttaaggtgtcgtccacggctgtgcggacccaacatactaccactcggcctgtgcccgacacttcccggctccctggtgcaacccctggtctgaccaccgtggaaattgtgactatgtcgcaccaggcacttggcgatgtggcaggtagaggaaacgaaaagaaaccctcatcagtaagagcactttcgatcgtgcttccaatagtgctgctcgtgtttctgtgcttgggagttttcttgttgtggaagaactggcggctgaagaacatcaattccattaactttgacaaccccgtgtaccagaaaaccaccgaggacgaagtccacatctgtcataatcaggatggctattcctacccttcgcgtcaaatggtcagcctggaagatgatgtggca

SEQ ID NO: 16048 - DNA, 2580 bp, synthetic construct
  misc_feature 1..2580: note = source = /note="Description of Artificial Sequence: Synthetic coding sequence"
  source 1..2580: mol_type = other DNA
atgggaccgtggggatggaagctgcgctggaccgtggcactcctgctcgctgccgccggtaccgcggtcggtgacagatgcgagcgcaatgagttccagtgccaggatggcaagtgtatttcatacaagtgggtgtgtgatgggtcggcggaatgccaggatggatcggacgaatcacaggaaacgtgtctgtccgtgacctgcaaatccggggatttcagctgcggtggtcgcgtgaatcggtgcatccctcagttctggcggtgcgacggacaagtggattgcgacaacggcagcgacgaacaaggatgccctccaaagacttgctcccaggatgaattcaggtgccacgacggaaagtgtatctcacggcagttcgtgtgtgactccgatagagattgtctggacgggagtgacgaagcctcctgccctgtgctgacttgcggaccagcttccttccagtgcaatagctctacttgcatcccccaactctgggcctgtgacaatgaccctgactgtgaggacgggtcggacgagtggccgcagcgctgcagaggactctatgtgttccagggagactcctcgccgtgctcggcattcgagtttcactgcctctccggagaatgtatccactcctcgtggcgctgcgacgggggaccagactgcaaggataaatctgacgaagagaactgcgctgttgcgacctgccggcctgacgagttccaatgttccgacggaaactgcatccatggttcccgccaatgcgaccgggagtacgactgcaaggacatgtcggatgaggtgggatgtgtcaatgttaccctctgcgaagggccgaataagttcaaatgccactcaggcgagtgtatcaccctggataaggtgtgcaatatggcgagggactgccgggattggagcgacgaaccgatcaaagaatgtggtactaatgagtgcctcgacaataatggcggctgcagccacgtgtgcaatgatctgaaaattggatacgaatgtgactgcccagacggattccaattggtcgcacagcggcgctgcgaggacattgacgagtgccaggaccctgatacttgttcgcagctgtgcgtgaaccttgaaggtggatacaagtgccaatgtgaagaaggcttccaactcgacccgcataccaaagcgtgcaaagctgtgggatcaattgcatacttgttctttactaatcgccatgaagtccgcaagatgactctcgacagatctgaatacacttcccttatcccgaacctccggaacgtcgtggctctggacaccgaagtcgccagcaacagaatttactggtccgatctgtcacagcgcatgatttgctccacccagttggaccgggcacatggagtgtcgtcttacgataccgtgatttcaagggacattcaggcaccggatggactggcggttgactggatccattcaaacatctactggactgattcggtgttgggaacggtatcagtggccgatactaaaggggtcaagagaaagactctgtttagagaaaacggatcgaaaccacgggctatcgtcgtggatccggtgcacggatttatgtactggaccgactggggcaccccagcaaagatcaaaaagggaggtctgaacggcgtggacatttactctctggtcactgagaacattcagtggccaaatgggatcacgttggacctgttgtcgggaaggctttattgggtggactctaagctgcactccatttcctccatcgacgtcaacggaggaaatcggaaaactatcctcgaggacgaaaagaggctcgctcacccgttctcactggctgttttcgaggacaaggtcttttggactgacatcatcaacgaggcgatattctcagctaatcggttgaccggatccgacgtgaacctccttgccgagaacctgctttcgccggaggatatggtcctgttccacaaccttactcagccgcgcggagtgaactggtgtgaacgaactaccctcagcaatggagggtgccagtatctgtgcttgccggcgccgcagatcaacccacactcaccgaaattcacctgtgcgtgcccggatggtatgctgctggcgcgcgatatgcgatcatgcctgaccgaggctgaagccgcggtcgctacgcaagagacttccacggtgcgtctcaaggtgagcagcacggcagtgaggactcaacatactaccacccgtcctgtgcccgatacctcgagactgccgggcgccacccctggcctgactaccgtcgaaatcgtaaccatgtcgcatcaggcgctgggagacgttgccggtcggggaaatgaaaagaagccgagctccgtgcgcgcgctgtcaatcgtactgcccatcgtgctgcttgtgtttctgtgcctcggagtgtttctcctgtggaagaactggcggctgaaaaacatcaactcgatcaacttcgacaaccctgtgtaccaaaagacgaccgaggacgaagtgcatatctgccacaatcaagatgggtactcgtacccctcccgacagatggtgtctctcgaggacgatgtggcc

SEQ ID NO: 16049 - DNA, 2580 bp, synthetic construct
  misc_feature 1..2580: note = source = /note="Description of Artificial Sequence: Synthetic coding sequence"
  source 1..2580: mol_type = other DNA
atgggaccttggggatggaagttgagatggaccgtagctctgctcctggcggctgccggcaccgccgtgggtgatcgatgcgagaggaatgagtttcagtgccaagatgggaagtgtattagctataaatgggtgtgtgacggatcagcagaatgccaggacggaagcgatgagagccaggaaacttgtctgagtgttacatgcaaaagcggcgacttttcctgcggggggagagtaaatcgctgcatcccacagttttggcgttgcgacgggcaggtggactgtgacaacggatccgatgaacaggggtgccctccgaaaacctgctcgcaggatgagttccgctgtcacgacggtaagtgcatctcccgacagttcgtctgcgattctgatcgcgactgtctggacgggtccgacgaggccagctgccccgtgctaacatgtggtccagccagttttcagtgtaatagtagtacttgcataccacagctttgggcctgcgataatgatcccgactgcgaggatggatcagacgagtggccccaacgctgccggggcctgtatgtgtttcaaggggactctagtccgtgcagtgcttttgagtttcattgtctttccggtgagtgtatccactcttcgtggagatgcgatggcggaccagattgtaaagacaaatcagacgaggagaattgtgcagtagctacttgtagacctgacgaattccagtgctctgacggaaattgcattcatggctcaagacagtgtgaccgggaatatgattgcaaggatatgtccgatgaagtgggatgcgttaatgtcaccctgtgcgagggaccaaacaaatttaagtgccactccggggagtgcataacgctggataaggtgtgtaatatggcaagagactgccgagattggagcgatgagccgatcaaggagtgtggtaccaatgagtgtctggataacaacggagggtgctcacacgtgtgtaacgatctgaagataggatatgaatgcgactgcccagatggtttccagctggttgcccagaggcgatgtgaggatatcgacgaatgtcaggatccagacacctgctcccaattatgtgtgaacctcgaagggggctacaagtgccagtgcgaggagggattccaactcgatccgcacacaaaggcatgcaaggccgttggaagtatagcttatttgttctttacaaaccggcacgaagtgcggaagatgaccctggatagatccgaatatacatcacttatcccaaatcttcgaaacgtcgtggcgttggacaccgaggtggcctccaatcgaatctactggagtgatctgagccagcggatgatttgctccacgcagctcgaccgcgcgcatggtgtctcctcttacgacaccgtaatcagccgtgatatacaggcgccagatggcctggcggtggactggatccattcaaatatctactggactgactccgtcctggggactgtgtccgtggccgacacaaaaggcgtgaaacgtaagacactgtttcgggagaacgggtctaagccgagggccattgtagttgaccctgtacacggctttatgtactggaccgattggggaacccctgccaaaatcaaaaagggcggcctgaatggagtcgatatctacagcctggtcaccgagaacattcagtggcccaacgggattacgttagacctgctctcagggcggctatattgggtagattccaagttgcactccatctcttcaatagacgtaaatggtggcaatcgaaaaaccattctggaggatgagaagcgtctggcccacccattcagccttgctgtgtttgaggataaagtgttttggactgacattatcaatgaggccatctttagcgccaatcggctcaccggttctgacgtgaacctgctagccgagaacctcctgagccccgaagatatggtattgtttcacaacctgacccagccgcgcggggtgaactggtgtgaaagaacaaccctcagtaacggtggttgccagtacctgtgcctgcctgcacctcagataaatcctcactctcccaaattcacctgcgcgtgccctgacggcatgctgttagcgagggacatgcgatcttgtctgacagaggccgaggccgcggtcgctacacaggagacttcaactgtaaggctcaaagttagttcgactgccgtgagaactcagcacaccactacgcggcctgtgcccgacacctcaaggttgcccggtgcaactccagggttaaccaccgtcgagatcgtcactatgagccaccaggcactcggggatgtggcaggcaggggaaacgagaagaagccctcttccgtgcgcgctctgtcaatcgtcttacccattgtgcttcttgtatttctgtgccttggggtatttttactgtggaagaattggaggctgaagaatattaacagtataaattttgacaatccagtctaccagaagacaactgaggacgaggtgcatatttgccataatcaagacgggtattcctacccttctcggcagatggtctctctcgaagatgacgtggcc

SEQ ID NO: 16050 - DNA, 2580 bp, synthetic construct
  misc_feature 1..2580: note = source = /note="Description of Artificial Sequence: Synthetic coding sequence"
  source 1..2580: mol_type = other DNA
atgggcccttggggttggaagctgcgctggactgtggcactgctgttggcagcagctggaactgccgtgggagatagatgcgaacgcaacgaattccagtgccaggacggaaaatgcattagctacaaatgggtctgcgacggctcagcggagtgtcaagacggaagcgacgagagtcaggaaacctgtctgtcagtgacttgtaagtccggcgacttctcgtgcggcggtcgggtgaatagatgcatccctcagttctggcgttgcgacggtcaggtggactgtgacaatggatccgacgagcaggggtgtccacccaagacttgttcgcaggatgaattcagatgccatgacggaaagtgcatttcgcgccagttcgtgtgcgactcggatcgcgattgcctcgatgggtcagacgaagccagctgtccggtcctcacctgcggaccggcttccttccaatgcaactcgtccacgtgtatcccacagctctgggcgtgcgacaatgaccccgattgtgaggacggatccgatgaatggccgcagagatgtcgcggactctacgtgtttcaaggagactcgtcaccgtgctccgcgttcgagttccattgcctgtccggagaatgcatacacagctcatggaggtgtgacggaggcccggattgcaaggacaagtcggatgaggaaaactgcgcggtggcgacttgccgcccggatgaatttcaatgtagcgatggaaactgcatccatggctcacgtcagtgtgaccgggagtacgactgcaaagatatgtcagacgaagtggggtgcgtcaacgtgacgctctgcgaaggaccaaacaagttcaaatgccattccggcgaatgcattactctggataaggtctgcaacatggcgcgggactgccgggactggtcggacgaacctatcaaggagtgtggaacgaatgaatgcctcgataacaatggaggttgctcacacgtgtgcaacgacctgaagataggctatgagtgtgactgccccgatggcttccagctggtcgcacagcgccggtgtgaagatatcgacgaatgccaagatcccgacacctgctcccagctctgtgttaacctggaaggaggctacaagtgccagtgcgaggaggggtttcagctggatcctcacactaaggcttgcaaagcggtgggatcgattgcctaccttttcttcactaatagacacgaggtccgcaagatgactctggaccggtcggagtacacctctctgattccaaacttgcggaacgtcgtggccctggacactgaagtggcgtcaaatagaatttactggtccgatctgagccagaggatgatctgtagcactcagttggaccgtgctcacggagtctcgtcgtacgatacggtaatctcgcgcgatattcaagcaccagatggcctggcggtggactggatccactcgaacatttactggactgattccgtgctcggcaccgtttcagtggccgataccaagggggtcaaacgcaagactctgttcagagaaaatggatccaagccacgggcgatcgtggtggatccggtccacgggtttatgtactggactgactggggtactccggcgaaaatcaaaaagggagggcttaatggagtcgacatctactcgctcgtgactgaaaacatccaatggccgaacggaatcaccctggatctgctgtcgggccgcctctactgggtggactcgaaacttcactcgatctctagcatcgacgtcaatggcggaaataggaaaactatcttggaggatgagaagcggctggcgcaccctttcagcctggccgtgttcgaggacaaggtgttctggacggacatcatcaacgaggccatcttcagcgccaatcgtctcactggctccgacgtcaacctgcttgctgagaatctgctttcgcccgaggatatggtgctgtttcataaccttacccaaccacggggcgtgaattggtgcgaacggaccaccctgtccaacggtggctgccagtacctctgcctcccggcccctcaaatcaacccgcactcgcctaaattcacttgcgcatgcccggacggtatgttgctggcgagagacatgcggtcgtgccttaccgaagccgaggccgccgtggccacgcaagaaacctccaccgtgcgcctgaaggttagcagcaccgccgtgagaacccaacataccaccaccagaccagtgccggacacctcccgactcccgggggccacccctgggttgaccaccgtggaaatagtgaccatgagccatcaggcacttggggatgtggctggacgcggaaacgaaaagaagccttcctcggtgcgggctctgtcaatcgtcttgcccatcgtcctcctcgtctttctctgcctgggagtattcctcttgtggaagaactggcgcctgaagaacatcaactcaataaactttgataacccagtgtaccagaaaaccactgaggacgaagtgcatatctgtcacaatcaagatggatattcttacccgagcaggcagatggtgagcttggaggacgacgtggca

SEQ ID NO: 16051 - DNA, 2580 bp, synthetic construct
  misc_feature 1..2580: note = source = /note="Description of Artificial Sequence: Synthetic coding sequence"
  source 1..2580: mol_type = other DNA
atgggcccttggggatggaagttgcggtggaccgtggcactcctacttgcggcagcaggaacggctgtaggtgataggtgcgagaggaatgagttccagtgtcaggatggaaaatgcatttcctacaaatgggtgtgcgacggttctgccgagtgccaggatggatcagatgaaagccaagaaacttgtctgtcggtcacttgtaagtcgggggatttctcttgcggcgggagggtaaatcgatgtattcctcagttctggcgctgcgacggacaagttgattgcgataacggcagcgatgaacagggatgccctcctaagacttgttcccaggatgagttccgatgtcacgatggaaaatgtattagccgccaatttgtgtgcgatagtgacagagattgcctggatgggagtgatgaggcatcttgccctgtgttaacctgcggcccagccagtttccagtgtaattcatcgacatgcatcccacagctgtgggcatgtgataacgaccccgattgtgaggatggtagtgacgaatggccacagcgctgccgaggattgtatgtctttcaaggcgatagtagcccgtgttccgcttttgagttccactgtcttagcggcgagtgtattcactcctcttggcgctgcgacggaggccctgactgtaaagataagagtgatgaggagaattgcgcagttgctacatgtcgcccagatgagtttcagtgttccgacggaaactgtatacacgggagcaggcagtgcgaccgtgagtacgattgcaaagacatgtcagatgaggttggctgcgtgaacgtcacgctctgtgaaggacccaacaaatttaagtgtcacagcggtgagtgtattaccctggataaagtgtgtaatatggccagagattgccgagactggagcgacgaaccgataaaagagtgcggcacaaacgagtgccttgacaataatggcggttgttcacacgtgtgcaacgatctgaagatcggatatgaatgcgattgtcctgatggatttcagctagttgcacagcggcgctgcgaggatattgacgagtgtcaagatccagatacatgtagccaactatgcgtgaatctggagggcggatataagtgccaatgtgaggaggggtttcagcttgatccacatacaaaggcttgtaaggccgtgggctctattgcgtacttgtttttcactaatagacacgaggttcgcaaaatgactttggacagatcggaatacacttccctcatcccaaaccttagaaatgttgtcgccctggatactgaggtggccagtaaccgtatttactggtccgatctgagccagagaatgatatgcagcactcagctggaccgcgcacatggagtgtcttcttacgacacagtgatttctcgagatatacaggcccccgacggcctggcagtggattggattcacagcaacatttattggaccgattctgtccttggaacagtcagcgtggcggacacaaaaggcgtcaagcggaaaacattgtttcgggaaaacggcagtaagcctagagctatcgtagtcgatcccgtccatggtttcatgtactggaccgactgggggacaccagccaaaatcaaaaaaggtggtttaaatggagtggacatttattccctggtaacggagaacattcagtggcccaacggtataactttggatttactttctggacgcctttactgggtggatagtaaactacacagtatcagttcaattgacgtcaacggaggtaatcgtaaaactatcctggaggatgaaaaacgtcttgcccacccattctcactcgctgtcttcgaggacaaggtattctggaccgacataatcaacgaagcaatctttagcgccaaccgtctgactggcagcgatgtgaaccttcttgccgaaaatttattgagccccgaggacatggtactgtttcacaatttgacacagccccgaggagtgaactggtgtgaacgaactaccctgagcaacggaggttgtcagtacttgtgcctgccggctccacaaattaatccccatagtccaaaatttacatgtgcctgtcccgacggaatgctgctagcacgggatatgcgctcgtgtcttaccgaggctgaggcagcagtcgccacccaggaaacctccaccgtgagactgaaagtctctagcaccgcagtgcgcacacaacacaccacaacccgtcccgtgcccgatacatcccggctgccaggggcaacaccaggtctgacaaccgtggaaatagtaaccatgagccaccaagcgctgggggacgtggccggacggggcaacgagaagaagcctagttccgtcagagcactttctatcgtgctgccaattgtcctgctagtgttcctctgcctgggcgtctttctgctgtggaaaaattggagactgaaaaatattaacagcattaactttgacaaccccgtgtaccaaaagacaactgaggacgaagttcatatctgccacaaccaggatggatattcctaccccagtcgccagatggtttctctggaagacgacgtggcc

SEQ ID NO: 16052 - DNA, 2580 bp, synthetic construct
  misc_feature 1..2580: note = source = /note="Description of Artificial Sequence: Synthetic coding sequence"
  source 1..2580: mol_type = other DNA
atggggccttggggatggaagctgcgctggacagtcgctctgctcctggctgcggcgggtaccgccgtgggggataggtgcgagagaaatgaattccaatgccaggacggaaagtgcatcagctacaaatgggtatgtgatggctcagcagagtgccaggacggaagtgacgaaagtcaagaaacctgtctatcggtgacatgtaagtctggcgactttagctgcggaggccgagtgaatcgatgtattccacagttttggaggtgtgatggccaagtggattgcgacaacggttcagacgagcaggggtgtcctccaaagacctgtagccaggatgaattcagatgccatgacgggaagtgcatctcaaggcagtttgtctgcgacagtgatagggactgcctggatggctccgatgaagcgtcatgtcccgtgttaacttgcggccctgcgtcattccaatgtaattcatcgacctgcattccccagctctgggcctgcgacaatgaccctgattgcgaagacggtagcgacgaatggccccagaggtgtcggggcctgtacgtttttcagggtgattcatctccttgttcagccttcgagttccactgcctgtctggggagtgcatacattcgtcttggcggtgcgacggaggtcccgattgtaaggataaatcagacgaagagaactgtgctgtagctacatgcaggccagatgagttccagtgcagcgacgggaactgcatacacggatctaggcagtgcgatcgggaatatgattgtaaagacatgtctgacgaggtcgggtgtgtgaatgtgacactgtgcgaaggtccgaataagttcaagtgtcactctggggagtgtatcaccctggataaagtctgcaatatggcacgagactgcagagattggagcgacgagcctataaaggagtgcgggaccaatgagtgtctggacaataacggaggatgcagccacgtctgcaacgatctcaagatcgggtacgaatgcgactgtcctgacggtttccagctagttgcgcaaagaagatgtgaggatatagatgaatgtcaggaccccgatacgtgcagtcaactctgtgtgaacctcgaaggcggatataagtgtcaatgcgaggagggcttccagctcgatccccatacaaaagcctgtaaggcggtcgggagcatagcctacctgttcttcactaacagacacgaggtacggaaaatgacattagacagatcagagtacacatctcttattcctaatcttaggaatgtggtggccctggatacagaagtcgcttctaatcggatctattggagtgacctaagtcagcgcatgatctgttccacccagctagatagagcccacggcgtgtcttcatacgacaccgtgataagcagggatatacaagccccagatggactcgcggtcgactggatccacagcaatatctattggacagattcggtgctgggcacagtaagcgtagccgatactaagggggtgaagcgcaagacgctcttcagggaaaatggttccaaaccgagagccatcgtggtagatccagtccacgggtttatgtactggaccgactggggaacaccggcaaagataaagaagggtggccttaatggggtcgacatctacagcctggtgactgaaaacatccaatggcccaacggcataaccctcgacttactgtcaggccgactctattgggtcgattccaagcttcatagtatttcttccattgatgtgaacgggggcaatagaaaaacaattctcgaagatgaaaaacggctcgctcatcctttctccttggcggtgtttgaagacaaggtgttctggactgacataataaacgaggcgattttttccgctaatagactgaccggctcagatgtgaatttgctggcggaaaacctgctgtcgccagaggatatggtccttttccacaacttaacccagccacggggcgtaaactggtgcgagagaacaacattgagcaacggtggctgccagtatctatgcctgcccgctccacagataaacccccacagtccgaagtttacttgtgcatgccctgacggaatgctgcttgcccgtgatatgcgatcgtgcctgaccgaagcagaagccgcagtagctacacaagaaacatcaaccgttcggctgaaggtgtcttcgactgctgttagaacacagcacaccaccacccggccggtcccggatacaagcaggctccccggagccacaccaggactgaccaccgtggaaattgtcaccatgagccatcaagcccttggagatgtggccggccgcgggaacgaaaaaaaaccctctagtgttagagctctgtctatcgttttgcctattgtacttctcgtcttcctgtgcctgggagttttcctgctgtggaagaactggcgcctcaaaaatatcaactcaatcaattttgataaccccgtctatcaaaagacaactgaagatgaggtccatatctgtcacaatcaggatggatattcatacccctctcggcagatggtctcgctggaagatgacgttgcc

SEQ ID NO: 16053 - DNA, 2580 bp, synthetic construct
  misc_feature 1..2580: note = source = /note="Description of Artificial Sequence: Synthetic coding sequence"
  source 1..2580: mol_type = other DNA
atgggaccttggggctggaaattgcggtggacggtcgctctcttacttgccgccgcaggtaccgcagtcggtgataggtgtgagcgcaacgaattccagtgtcaggacggaaaatgtattagttacaagtgggtgtgcgacggatctgccgagtgtcaggatggaagcgacgagtctcaggaaacctgtctcagcgtaacctgtaaatccggcgactttagttgcggcgggcgggtgaaccgctgcatcccccaattctggaggtgtgacggccaggtggactgcgataatgggagcgatgaacaagggtgtccaccaaagacttgcagccaggacgaattccggtgtcatgatgggaaatgcataagccgccagtttgtctgtgactccgatcgcgactgccttgacggctcggatgaggcctcttgcccggttctgacatgcgggcctgcgtccttccagtgcaatagttcaacctgcattccccagctgtgggcttgtgacaacgatccggattgtgaggatggctccgatgaatggccccagcgatgccgtggactttacgttttccagggggacagcagcccctgcagtgctttcgagtttcactgcttgagcggcgagtgcatccacagctcttggcggtgtgatggaggacctgattgtaaggataagtctgacgaggagaactgcgcagtggctacctgtaggcccgacgagtttcagtgttccgacggaaactgtatccacggtagcaggcagtgcgatcgagaatacgattgcaaagacatgtccgacgaggtggggtgtgtaaatgtgactctctgcgagggaccaaacaagttcaaatgtcatagtggggagtgcattactctggataaagtgtgtaatatggcacgggattgcagagactggagtgatgaacccattaaagagtgcgggactaatgaatgcctggacaacaacggcggctgtagtcacgtttgtaacgacctgaagatcggttacgaatgtgattgcccagacggcttccaactggttgcccagcggcgatgcgaagacatcgacgagtgtcaggatcctgatacatgttcacagctctgtgtaaatctggaagggggttataagtgtcagtgcgaagaagggttccagctggacccccacactaaagcatgcaaagctgtcggctctatcgcctacttgttcttcacaaaccggcatgaggtcaggaaaatgactttggataggtctgagtacaccagtctgatccccaacctcaggaacgttgtagcgttggacacagaagtggctagtaatcgtatctactggagtgacctgtcacagaggatgatatgtagcacccagctggacagggcccacggggtgagctcttacgacaccgttatcagtagagatatacaggccccagatgggcttgctgtagattggatccatagcaatatttactggaccgattcagttttagggacagtgagtgttgctgacacgaaaggagtcaagaggaaaaccctgttccgtgagaatgggagtaaaccgcgagcaattgttgtggacccagttcacggcttcatgtattggaccgattggggtaccccagccaaaatcaaaaaaggtgggctgaacggtgtggatatctatagcctggttactgaaaacatccagtggccaaacggcatcactctggacctgctttctggtcggttgtattgggtagattcgaagctgcacagcattagctccatagatgtgaacggaggcaatcgaaagaccattctcgaagatgaaaaaaggcttgcccatcctttttctctcgctgttttcgaagataaggtgttttggaccgacatcatcaacgaagctatcttttccgctaaccggctaaccggctccgacgtgaatctgctggccgagaatctgctctctcctgaggatatggtgttgtttcacaatctgacccaaccacgtggtgtgaactggtgtgagcgaaccacactctctaatggtgggtgccagtatctatgcctgccggctccccagattaatccccattcacctaaatttacctgcgcttgtcccgatggaatgctgctggcccgggatatgcgatcctgcctcaccgaagccgaagccgcggtggctacacaggagacatccacggtccgcctgaaggtctcaagtactgcagtgcgtactcagcacacgacgacacgccctgtcccggatacttcacggctccccggggccaccccgggcctgaccactgtggaaattgtaacaatgtcacaccaagctctgggcgacgttgctgggaggggaaacgagaagaaaccgtcaagtgttcgcgccctatcgattgttttaccaatagtgttgctggtctttctgtgtctgggtgtgttcctcctatggaaaaactggcggctcaagaatattaattcaatcaattttgataacccagtctaccagaaaactacggaagatgaggtccacatttgccacaaccaagatggctactcatacccttctagacagatggtgtcattggaggacgatgtcgct

SEQ ID NO: 16054 - DNA, 2580 bp, synthetic construct
  misc_feature 1..2580: note = source = /note="Description of Artificial Sequence: Synthetic coding sequence"
  source 1..2580: mol_type = other DNA
atggggccctggggctggaagttacgctggaccgtggctttgctgttggccgccgccggcacagctgtaggagatcgctgtgaacggaacgagtttcagtgtcaagatgggaaatgtatcagctataagtgggtgtgcgatggcagcgctgaatgtcaagacggcagtgacgagtctcaagagacttgcctgagtgttacctgcaaatctggcgactttagctgcggcggcagagtgaatagatgtataccacaattctggcggtgtgatggccaggtggattgtgacaatggaagcgacgagcaaggatgcccgcccaaaacctgctctcaggacgagtttcgatgtcacgacggtaagtgtatctccaggcaattcgtatgtgactcagaccgtgactgcctcgatggcagtgacgaagcatcatgcccagtattaacctgtgggcccgcatccttccaatgtaattcctcaacttgtattccacagctctgggcctgcgacaacgacccagattgcgaagacggctccgatgagtggccgcagagatgtaggggcctctacgttttccagggcgacagttctccttgcagcgccttcgaatttcactgcttgagtggagagtgtatccactccagctggagatgtgacggcggtccagattgtaaagacaagtcggatgaggagaattgcgcagtagccacatgcagacccgatgaattccaatgttccgacggaaactgcatccacggaagtcggcagtgtgatagagagtacgattgcaaggacatgtctgacgaagtaggatgtgtgaacgtaaccctgtgcgaaggccctaataaattcaagtgccacagtggggagtgtatcactttggataaggtgtgcaatatggctagggactgcagggattggtccgacgagccaatcaaagagtgcggcactaatgagtgtcttgacaacaacggcgggtgtagtcatgtctgcaacgatctcaagatcgggtacgagtgtgactgtccagatgggttccagttggtggctcaacgccgatgcgaagatattgatgagtgtcaggatcctgacacttgttcccagctgtgcgttaatctggaggggggatacaaatgccagtgcgaggaagggttccagctcgatccacatacaaaggcgtgtaaggcagtgggtagcatagcctatctgttttttaccaaccgccatgaggttaggaaaatgacccttgatcgttcggaatataccagccttatcccaaacttgagaaatgtggttgccttggacactgaggtggcctctaaccgcatatactggtccgacctgagtcagcggatgatctgttctacacagctggaccgcgcccatggtgtctcctcatatgataccgtcataagccgcgatattcaagcccctgatggactggcagttgattggatccatagcaacatatactggacagattcggtcctgggcacagttagcgtggcagacaccaagggcgtcaaaagaaagaccctctttcgagaaaacggatcgaaaccgcgagcaatcgtggtggaccccgtccatgggtttatgtactggactgattggggtaccccggccaaaatcaagaaaggcggattgaacggagtcgacatttactctctggttacagagaacattcagtggccaaacggtatcacactggacctgctctcaggccgtctctattgggtcgacagtaaactgcattccatcagctccatcgatgtaaatgggggaaaccgtaagaccattctggaggacgagaagcggttggctcaccccttctccctcgccgttttcgaagacaaggtattttggaccgacattatcaacgaggctatattttctgccaataggctcacaggctcagacgtcaacttgctggcggaaaacctcttgtccccggaagacatggtactgttccacaacttgactcagccccgcggagtcaactggtgcgagcggactactcttagcaacggggggtgccagtacctgtgtcttccggccccccaaattaacccccactcacctaagttcacctgcgcctgtccagatggcatgctgctggcccgagatatgaggtcatgtcttactgaggcagaggccgccgtagctacccaggaaacctcaactgtgagactgaaggtatcctctactgctgtgaggacccagcatacaaccactcgacctgtcccagacacgagcaggctgcccggtgcaacacccgggctgaccacggtggaaattgttactatgagccaccaagccctgggcgatgtggctggccggggcaatgagaagaagccctcttccgttcgggccttgagcatcgtccttcctattgtgctgttggtatttctttgtctcggcgtattcctgctgtggaaaaactggaggttgaagaacatcaactctattaattttgataaccctgtgtatcagaagaccacagaagatgaggttcacatctgccataaccaagatggctactcttatccatcccgacagatggtttccctcgaagacgatgtcgct

SEQ ID NO: 16055 - DNA, 2580 bp, synthetic construct
  misc_feature 1..2580: note = source = /note="Description of Artificial Sequence: Synthetic coding sequence"
  source 1..2580: mol_type = other DNA
atggggccctggggctggaaactgcgttggactgttgcccttctgctcgccgccgccggcaccgcggtcggtgaccggtgcgaacgaaacgagtttcagtgccaggacggaaagtgtatctcctacaagtgggtctgcgacggctctgcggagtgtcaggacggctctgacgagagccaggagacttgcctctctgttacgtgcaaatcaggcgatttcagttgcggcggtcgagtaaaccggtgcataccacaattctggaggtgtgatggacaggttgactgtgacaacggcagcgacgaacaaggctgcccacccaaaacctgctcccaggatgagtttaggtgtcacgacggaaagtgtatttcccggcaattcgtgtgtgactctgaccgtgattgtctggacggctcagacgaggcttcatgccccgtgctcacgtgcgggcccgccagttttcaatgcaacagcagcacctgtatcccccagctttgggcttgcgataatgaccctgattgtgaggacggctccgatgagtggcctcaacgctgccggggtttgtatgtatttcagggcgactccagtccctgttccgcatttgagttccactgtttgtccggcgagtgtatccattcctcttggagatgcgatggtgggcccgactgcaaggacaaatcagacgaagaaaattgtgccgtggcaacgtgccgcccagatgaatttcaatgttccgatgggaattgcattcacgggtccaggcagtgtgatcgagaatacgactgcaaagatatgtccgatgaggtggggtgcgtgaatgtcacgctctgcgaggggcccaataagttcaagtgtcatagcggagagtgcatcacattggataaggtgtgcaacatggcacgggattgcagggattggtctgacgagcctatcaaggagtgtggcacgaatgaatgtttagacaataacggaggttgcagtcatgtgtgcaacgatttgaagatcggctatgagtgcgactgtcccgatgggttccaactggtggctcagcgtcgttgcgaagatatcgatgagtgtcaggaccctgatacctgcagccaactctgtgtgaacctggaaggcggatataagtgtcagtgtgaagagggtttccagcttgaccctcacaccaaagcatgtaaagccgttggcagcatcgcttacctcttttttactaaccggcatgaggtgaggaagatgaccctcgaccggagcgaatacacctcgctgattcctaacctgaggaacgtagtagctctcgataccgaggtggcctccaaccgcatctattggtcggacctcagtcaacgtatgatttgcagtacccagctggaccgtgctcacggcgtgagctcgtacgataccgtgatcagccgcgacatccaggccccggacggcctggccgtcgattggatccatagcaatatatattggacagacagcgtgctcggtacagtgtctgtggccgacacaaaaggggtgaagcgcaagacactgttccgcgagaacggttccaagccgcgcgctatcgtagtggatccagttcatggcttcatgtactggactgactggggtactcccgctaagatcaaaaaaggcgggctgaacggagtggatatatatagtctggtgacagagaacatccaatggccgaatggaattacattagacctgctgtccgggcgactctattgggtcgatagcaaactccactctatttcttctatcgacgtcaacgggggcaaccgaaagactatactggaagatgagaagcgtttagcacaccctttctctctcgctgtgttcgaggataaggtgttttggactgatatcatcaacgaggccatctttagtgctaacaggctcacgggaagcgacgtcaatttactggcagagaacttgctgagccccgaggatatggtgctgttccacaacctcactcaaccccgcggagtgaattggtgcgagcgcacaaccctaagcaatggcggctgtcaatacctgtgccttccagccccacagataaatccccactcgccaaaatttacctgcgcttgcccagacggaatgcttctagcccgcgacatgcgctcatgcctgacagaagccgaggcggccgtcgcaacccaggagacatcaacagtcagactgaaagtgagctctacggctgtgcgcacacagcataccacaactcgacccgtgcctgatacttcccggcttccaggcgcgacgcctgggctgacgaccgtagagatcgtcaccatgtcccaccaggccttaggagacgtcgcgggaagggggaacgagaagaagccttcgagtgtgagagctctgagcatcgtgctccctatcgtcctcctcgtcttcctgtgtttgggagtgtttctgctgtggaagaactggagattgaaaaacataaactcaatcaattttgacaacccagtgtaccagaagacaacagaggacgaagttcatatctgccataatcaggacggctacagctacccatcgcggcaaatggtttcattggaagacgacgtggcg

SEQ ID NO: 16056 - DNA, 2580 bp, synthetic construct
  misc_feature 1..2580: note = source = /note="Description of Artificial Sequence: Synthetic coding sequence"
  source 1..2580: mol_type = other DNA
atgggaccatgggggtggaaacttcggtggaccgtggccctgctcctggccgcagcgggtacggcagtgggagatagatgcgaacggaatgagttccagtgtcaggatgggaagtgtatcagttacaagtgggtgtgcgatggatcagccgaatgtcaggacggttccgacgaatcccaagaaacctgcctgagcgtcacttgcaaatctggggacttttcgtgcggagggcgggtgaaccgctgtataccgcaattctggcgctgtgatggtcaggtcgactgcgataacggatccgacgaacaaggctgcccaccaaagacctgctcgcaagatgaattccggtgccacgacggcaagtgcatctcccgccagtttgtgtgtgatagcgatcgggactgtctggacggaagcgacgaagcgagctgtccagttctgacgtgcggcccggccagcttccagtgcaattcgtcgacctgtatcccgcagctctgggcatgcgacaacgatcctgactgcgaagatggctcggacgaatggccgcaaagatgcaggggactgtacgtttttcagggagactcgagcccttgctcggctttcgaattccactgcctctccggtgagtgtatccactcaagttggcgttgcgatggcggcccggattgtaaggataagtcagacgaggaaaattgtgccgtggcgacctgccgccctgacgagttccagtgcagcgatggaaactgcatacacggcagccggcagtgtgaccgcgagtacgattgcaaagacatgtcggacgaggtggggtgcgtcaacgtgaccctttgcgagggacctaacaaattcaagtgtcactcgggagaatgtatcactctggataaggtctgcaatatggctcgcgactgccgggattggtccgatgagcccatcaaggaatgcggaaccaacgaatgcttggataacaatggaggttgctcccacgtgtgcaacgatttgaaaatcgggtacgagtgcgattgccctgacggattccaattggtggctcagcgccggtgcgaagatatcgacgagtgccaggatcctgatacctgttcccagttgtgtgtcaacctcgaaggaggttacaagtgccagtgtgaggagggattccagttggacccccacactaaagcgtgcaaagcagttggctcgatcgcgtacctgttcttcactaatcgacatgaggtgcgcaaaatgaccttggacagatcggaatacacgtcgctcattccgaaccttcgcaacgtagtggccctggacactgaggtggcttccaatcgcatctactggtcagatctgtcgcagaggatgatctgttccactcagctcgatagagcacatggagtgtcgtcgtacgacaccgtgatctcacgcgacatccaagccccggatggattggctgtcgactggatccacagcaacatctactggaccgactccgtgcttggaactgtgtcggtggccgataccaagggtgtcaagagaaaaaccctgttccgcgagaatggaagcaagcctagagcgatcgtggtcgacccggttcacggatttatgtactggaccgattgggggacgccagcaaagatcaagaagggaggactgaacggtgtcgatatctactctctggtcactgagaacatccagtggccaaacggaattaccctggatctcctttccggaagattgtactgggttgattccaagctccattcgatctccagcatcgacgtgaacggcggcaataggaaaactattttggaggatgaaaagcgcctcgcgcatccgtttagcttggccgtctttgaagataaggtgttctggacggacatcatcaacgaagctatcttcagcgcgaatagactgaccggatcggatgtcaacttgctggcggaaaacctcctgagcccagaggatatggtgctctttcacaacctgacccaaccgcggggcgttaactggtgcgagcgcactaccctgtccaatggcggctgtcagtacctgtgtctgccagcaccgcagattaatccacactcacctaaattcacctgcgcctgcccggatggtatgctcttggcccgcgacatgaggtcatgtctgaccgaggcagaggctgcagtcgccactcaggagacttcgacggtgcgcttgaaagtcagcagcactgcggtgagaacccagcacactaccacccgcccagtgcccgacacgtcccgcttgccgggagccaccccaggactcaccaccgtggaaatcgtgaccatgtctcatcaagcgcttggagacgtggctggacggggaaacgagaaaaagccgagctccgtgcgagccctctccattgtcctgccgatcgtgctgctggtgttcctgtgcctgggagtgtttcttctctggaagaactggcggctcaagaatatcaactccatcaatttcgataatcccgtgtaccaaaagactactgaagatgaagtgcacatctgccacaaccaggatggatattcgtatccgagccggcagatggtttcactggaggatgatgtggct

SEQ ID NO: 16057 - DNA, 2580 bp, synthetic construct
  misc_feature 1..2580: note = source = /note="Description of Artificial Sequence: Synthetic coding sequence"
  source 1..2580: mol_type = other DNA
atgggtccttggggatggaaacttaggtggactgtggcgctgctcctggctgcggcgggtaccgcagtgggtgatcggtgcgagcggaatgagttccagtgccaagacggaaagtgcatttcgtacaagtgggtctgcgacgggtcagccgaatgtcaagatgggtctgatgaatcccaagaaacctgcctttccgtgacgtgtaagagcggtgatttctcatgcgggggacgggtgaatagatgtatacctcagttctggcgttgtgacggacaagtggactgcgataatggctcggatgaacaaggctgccctcctaagacctgctcacaagacgaatttagatgccacgatggaaaatgtatttcccggcaatttgtgtgtgacagcgatcgggactgccttgatggatcggacgaagcatcctgtcccgtgctgacctgtggtccagcatcgtttcagtgtaatagctcaacttgcatccctcagctgtgggcatgcgataacgaccctgactgcgaggatggttcagatgaatggcctcagagatgtcgcggtctgtatgtgtttcagggagattcatcgccatgctccgcgtttgaattccattgcctgtcaggagaatgtattcatagcagctggcgctgtgacggtggaccggactgtaaggataagagcgatgaagaaaactgtgcagtcgcaacttgtagaccagatgagttccaatgttcggatggaaactgtatacatggctcgagacaatgcgatcgagagtacgactgtaaagacatgtcggatgaagtggggtgtgtcaatgtcactctgtgtgaaggacccaataagtttaagtgccatagcggtgaatgtataaccctggacaaggtgtgcaacatggcgcgagattgtagagactggtcggatgagccaattaaggaatgcggaactaacgaatgtctcgacaataatggaggatgttcccacgtctgtaatgatctcaaaatcggatacgaatgtgactgtcctgatggatttcaactcgtggcacaacgaagatgtgaggatattgatgaatgccaagatccagatacttgctcacagctgtgtgtgaatctcgagggagggtacaaatgtcaatgtgaagaaggattccagctcgatccacataccaaggcatgtaaggcagtgggatcgatcgcatacctgtttttcaccaaccggcatgaagtgcggaaaatgactctggataggtccgaatacacttccctgattccaaaccttagaaatgttgtcgcacttgataccgaggtggcctcgaatcgaatctactggtccgatctgtcgcaacgcatgatctgtagcacccaactggacagagcgcatggggtgtcgtcctacgatacggtgattagcagggatatccaagccccggatggattggcagtcgactggatacattcgaacatttactggaccgattcggtccttggaactgtctccgtggccgatactaaaggagtgaagagaaagacccttttccgggaaaacgggtcaaagcccagagccatcgtggtggatcctgtgcacggcttcatgtactggaccgactggggaactccagcaaagattaagaaaggggggcttaacggtgtcgatatctacagcctggttactgagaacattcaatggcctaatgggatcactctggacctgctgtccggtcgactgtactgggtggattccaaactgcattcgatttcgtcgattgacgttaacggcggaaatcgcaaaaccatactggaagatgaaaagcgtctcgcacatcccttctccttggcggtgttcgaggacaaggtcttttggacggatatcataaacgaagcaatctttagcgcaaacagattgactggatcagatgtcaacttgctggcagaaaacctgctttccccggaagatatggtgctttttcacaacctcactcagccccggggtgtgaactggtgtgagagaaccacgctgtccaacggaggctgccagtacttgtgcctgcctgcacctcagataaatccccattcccctaaattcacctgtgcgtgcccagatggaatgcttcttgcaagggatatgcgttcctgtcttaccgaagccgaggctgcagtggccacgcaggaaacttcgaccgtcagactcaaggtgtcatcgactgcagtccgcacccagcataccaccacccgtcccgtcccagacacctcaaggttgccaggcgcaaccccaggcttgactacggtcgagatcgtcaccatgtcacaccaggcactgggagatgtggcaggacgaggtaacgaaaagaaaccatcgtctgtgcgggcactgtcgattgtgctccctatagtgctgcttgtctttctctgtcttggagtgtttctgctttggaaaaactggaggcttaagaacattaactccataaacttcgataacccagtgtaccagaaaacgactgaggacgaagtgcacatttgtcacaatcaagatggatacagctatccatcgcgccaaatggtgtcgcttgaagatgatgtggcg

SEQ ID NO: 16058 - DNA, 2580 bp, synthetic construct
  misc_feature 1..2580: note = source = /note="Description of Artificial Sequence: Synthetic coding sequence"
  source 1..2580: mol_type = other DNA
atgggaccctgggggtggaaactgcggtggaccgtggctctgctgctggccgctgccggcaccgccgtgggagaccgctgtgagaggaatgagttccagtgccaagacgggaaatgtatttcttataaatgggtgtgtgatggctcagcagagtgccaggacggttccgatgaatcacaggagacctgtctgtctgtgacctgcaagagcggggatttcagctgcggaggccgcgtgaataggtgtattccacagttctggaggtgcgacggccaggttgactgcgataatggctccgacgaacagggctgcccacctaaaacatgcagccaggatgaattccgatgccatgacggaaaatgcatttctcggcagtttgtatgcgactccgatagggactgcttagacggaagcgatgaggccagctgtcccgtgctcacctgcggtcccgcttcattccagtgcaattcctcgacttgtatcccccaactgtgggcttgtgacaatgaccccgactgcgaggacgggagtgacgagtggccacaacgctgtcggggactttacgtgttccagggggattcttccccctgttccgcctttgaattccattgcctatccggagagtgcattcatagttcttggagatgtgatggcggcccggactgtaaggataaatctgatgaagagaattgcgcagttgctacctgcaggccggatgagtttcagtgctccgatgggaactgtatccatggaagccggcagtgcgatagagagtacgactgcaaggacatgagcgatgaggttggttgcgtgaacgtaaccttgtgcgaggggcccaataaatttaaatgtcactcgggcgagtgtattactctcgacaaagtttgcaacatggctagggactgtcgtgattggagcgatgagcccattaaggaatgtgggactaacgaatgcctggacaacaacggaggatgttctcacgtgtgtaatgatctcaagatcggatatgagtgcgattgccctgatgggttccagctggtggcccagcgaagatgcgaggatatcgacgaatgtcaggaccctgacacatgttcccagctctgcgttaaccttgaagggggttacaaatgtcagtgcgaagaaggcttccagctggacccccatactaaggcctgcaaggcagtggggagtattgcatatctttttttcactaaccgccatgaggttcgaaagatgacattggatcgatccgagtacacgagcttgatcccaaacctgcgcaatgttgtagctttggacacggaagtcgccagcaacagaatttactggtcagacttgagccaaagaatgatctgtagcacgcagttagaccgcgctcacggggtgtcgagctacgacaccgtgatatctcgggatatccaagcccccgacggactcgcggtggactggatccacagtaacatctactggactgatagcgtcttgggtacagtctccgttgccgacactaagggcgtgaagcgcaagactctttttcgtgaaaatggatcgaaacctcgagcaatcgtcgtcgatcccgtgcacggattcatgtattggacagactggggtacgcccgcaaagattaaaaagggcggactcaatggggtggacatctactccctggttacagagaatattcagtggcctaatgggataacactcgacttacttagcggcaggctgtattgggtagatagtaagcttcacagcatcagtagtattgatgtgaacggaggtaatcgcaagactattctcgaggatgagaaacggctcgctcacccgttttccctcgcggtgtttgaggataaggtgttttggactgatatcattaacgaggccattttcagcgccaaccgccttactggaagcgacgtgaaccttttagccgagaacctcctcagccccgaggatatggtcctgtttcacaatctgacccagcccaggggagtcaactggtgcgagaggacaacactgtctaacgggggctgccagtacctgtgcttgcccgccccccaaattaacccccactcacctaaatttacttgtgcctgtcctgatggcatgctgttggccagggacatgcggagctgtctgacagaagctgaagctgccgttgctacccaggagacttctacagtgcgcctgaaagtgagtagtaccgctgtcaggacacagcacacaactactagacccgtccccgataccagcaggttgcccggggcaaccccaggattaacaaccgttgagattgtaaccatgtcgcatcaagcactcggtgacgtggccggcagaggtaatgagaagaaacccagcagcgtccgcgccttgagcatcgtcctgcctattgtgctcctcgtctttctatgcctaggagtctttctactgtggaagaattggagactgaaaaacatcaattctatcaatttcgataaccccgtataccagaagaccaccgaagatgaagtccacatttgccataatcaggacgggtactcttatccctccagacagatggtatcactagaggacgatgtggcg

SEQ ID NO: 16059 - DNA, 2580 bp, synthetic construct
  misc_feature 1..2580: note = source = /note="Description of Artificial Sequence: Synthetic coding sequence"
  source 1..2580: mol_type = other DNA
atgggaccatggggttggaaacttcgttggacagtagctctccttcttgcagctgcaggaactgcagttggagatagatgtgaaagaaatgaattccaatgtcaagatggaaaatgtattagttataaatgggtatgtgatggatctgcagagtgtcaagatggatctgatgaaagtcaagaaacatgtttgagtgtaacatgtaaatcaggtgacttttcttgtggtggaagagttaatagatgtattcctcaattttggagatgtgatggacaagttgactgtgataatggttcagacgaacaaggatgtccaccaaaaacttgttcacaagatgaatttagatgtcatgatggaaaatgtatatcccgtcaattcgtttgtgattcagatagagattgtttagatggtagcgatgaagctagttgtccagttttaacttgtggaccagcatcttttcaatgtaatagctcaacatgcattccacaactttgggcatgtgataacgatccagactgtgaagatggatctgatgaatggccacaaagatgtagaggactttatgtttttcaaggagatagttctccatgtagtgcattcgaattccattgtttgagtggtgaatgtatacattcatcttggaggtgtgatggaggaccagattgtaaagataaaagtgacgaagaaaattgtgctgtagctacatgtagaccagatgaatttcaatgctcagatgggaattgtattcatggatctagacaatgtgatagagaatatgattgtaaagacatgtctgacgaagttggttgtgttaacgtaacattatgcgaaggtccaaataaatttaaatgtcattctggagaatgtatcacactcgataaagtttgtaatatggctagagattgtagagattggtcagatgaaccaattaaggaatgtggaactaacgaatgtcttgataataatggaggttgttcacacgtttgtaatgatcttaagattggatatgaatgtgactgtccagatggttttcaacttgttgcacaacgtagatgtgaagatattgatgaatgtcaagatccagatacatgtagtcaattatgtgttaatttagaaggaggttataaatgtcaatgtgaagagggttttcaattagacccacatacaaaggcatgtaaagcagtgggatctattgcttatctttttttcactaatagacatgaagtcagaaaaatgactttagatagatccgagtatacctctttaataccaaatttaagaaatgttgttgcccttgataccgaagttgcatcaaatcgtatttattggtcagacctttcacaaagaatgatttgttcaacacaacttgatcgtgctcatggagtatcttcttatgatacagtaatttctcgtgacatacaagcaccagatggattagctgtagattggattcatagtaatatttattggacagattcagttttaggaactgtttcagttgcagacactaaaggagttaagagaaagacattattcagagaaaacggttccaaaccacgtgcaattgttgtagatcctgtacatggatttatgtattggacagattggggtactcctgctaaaattaagaaaggaggtttaaacggagtagatatctattcacttgttacagagaatattcaatggccaaatggaataacacttgacttattgagtggacgactttattgggttgacagtaaattgcattcaatttctagcattgatgttaatggaggaaatagaaagacaattttggaagatgaaaaaagacttgctcatccattctcattagcagtttttgaagataaagttttttggacagatataattaacgaagcaattttttcagctaatagacttacaggatcagatgtaaatttattagctgaaaatttacttagtccagaagatatggttttatttcataatcttacgcaaccaagaggggttaattggtgtgaaaggactactctttcaaacggtggttgtcaatatttatgtcttccagctccacaaattaatccacattcaccaaaatttacatgtgcatgtccagatggaatgttacttgcacgagatatgcgtagttgtttaacagaagctgaagctgcagttgcaacacaagaaacttcaacagtaaggttaaaggtaagttcaactgctgttagaacacaacatacgacaacaagacctgttccagatacatcaagattacctggagctacgccaggattaacaactgttgaaattgtcactatgtcacatcaagcccttggagatgttgctggacgtggaaatgaaaaaaaaccttcttctgttagagcacttagtattgttttaccaattgttcttttagtcttcttatgtttaggtgtttttcttttgtggaagaattggagacttaaaaatattaacagtataaattttgacaatccagtatatcaaaaaacaactgaagatgaggttcatatttgtcataatcaagatggatattcatatccttcaagacaaatggtttcattagaagatgatgttgct

SEQ ID NO: 16060 - DNA, 2580 bp, synthetic construct
  misc_feature 1..2580: note = source = /note="Description of Artificial Sequence: Synthetic coding sequence"
  source 1..2580: mol_type = other DNA
atgggaccgtggggatggaagttgagatggaccgtggcccttttgctggcagccgccggcactgctgtgggagacaggtgcgagcggaacgaatttcagtgtcaagatggcaagtgcatatcatacaaatgggtctgcgacggatcggctgaatgccaagatggctccgacgaatcccaggaaacttgcctgtccgtgacctgcaagtcgggcgacttcagttgcggaggtcgagtgaaccggtgcatcccgcaattctggcgttgcgacggacaggtagattgcgacaacggtagcgatgaacagggttgtccgccaaagacgtgctctcaagatgaattccgctgccacgacggaaaatgcatcagcaggcagttcgtgtgcgactcggaccgcgactgtcttgatggaagcgatgaagccagctgcccggtcctgacttgtggaccagcctcattccagtgcaacagctccacgtgcatcccacaactttgggcttgtgataacgaccctgactgtgaagatggcagcgatgagtggcctcagcgctgtagaggactttacgtctttcagggtgacagcagcccatgctcggccttcgaattccactgcctctcgggggaatgcatccactcctcatggcggtgcgacggagggcccgactgcaaggataaaagcgacgaagaaaactgcgccgttgccacttgcaggccggacgagtttcagtgctcggacggcaactgcatccacggaagccgccagtgcgacagggagtatgattgcaaagacatgtccgacgaggtcggatgcgtcaacgtcactctgtgcgagggaccgaataagttcaaatgtcattccggagaatgcatcactctggacaaagtgtgtaatatggcccgagattgccgcgactggtctgatgaaccgatcaaggaatgcggaactaacgagtgtctggacaataatggtggatgtagccatgtgtgcaatgacctgaagattggatacgaatgtgactgtccggatgggttccagctcgtggcgcagagacggtgcgaagatatcgacgagtgtcaggatccggacacctgctcgcaactctgcgtgaatcttgagggaggctacaagtgccaatgcgaagagggattccaactggacccccataccaaggcgtgtaaagcagtcgggtcgattgcctacctgtttttcacgaatcgccacgaggtgcgcaagatgaccctggatcggtcggagtacacctcgctgatcccgaacctccggaacgtggtggcactcgacaccgaagtcgcatccaatcgcatctactggtcagatctgtcacagcgcatgatctgctccacccaacttgatagagctcacggtgtgtcgtcatacgacaccgtgatcagcagagacattcaagccccggacggcctggcggtggactggatccattcaaatatctactggaccgacagcgtcctgggaaccgtgtcggtcgccgatactaagggcgtcaagcgcaagactctcttccgcgagaatggaagcaaaccccgggccatcgtcgtggatcctgtgcacggattcatgtactggactgattggggaaccccggcgaagatcaagaagggcggcctgaacggcgtggacatctactcactggtgaccgagaacattcaatggcctaacggcattactctggacctgctctcgggacggctgtattgggtggactccaagctccactcgatctcctccatcgacgtgaacggggggaacagaaagactattctggaagatgagaagcggctggctcatcctttctcactcgcggtgttcgaggataaggtgttctggactgacatcatcaatgaggcaattttctccgccaatcgcctgactggttccgacgttaacctgctggcagagaacctgctcagtccggaggacatggtgttgtttcacaacctgacgcaaccacggggtgtgaactggtgcgaacggactaccctgagcaacggaggctgtcagtacctctgcctcccggcaccccaaatcaacccacattcaccaaagtttacttgtgcgtgcccggacggtatgctgctggcgagagacatgagatcctgcctcaccgaagcagaggcagccgtcgctacgcaggaaacctccactgtccggttgaaggtgtcgtcaaccgccgtgcggacccagcatacgaccactcgccctgtcccggatacttcgaggctcccgggggccaccccagggttgaccaccgtcgaaatcgtgactatgtctcaccaggctctgggagatgttgcgggacgcgggaacgagaagaagccatcgtcagtgcgcgcgttgtcgatcgtgctcccaatcgtgctgctggtgttcctctgtttgggagtgttcctcctttggaaaaactggaggctcaaaaatatcaactcgatcaattttgacaaccccgtgtaccagaaaaccaccgaagatgaagttcacatctgccataatcaggacggctactcatacccttccagacagatggtgtccctggaggatgatgtcgcg

SEQ ID NO: 16061 - DNA, 2580 bp, synthetic construct
  misc_feature 1..2580: note = source = /note="Description of Artificial Sequence: Synthetic coding sequence"
  source 1..2580: mol_type = other DNA
atgggtccctggggatggaagctcagatggacagtggcccttcttttagccgccgcaggaaccgctgtgggtgatcgctgtgagcggaacgaattccaatgccaggacggaaagtgcatctcttataagtgggtttgcgacgggagcgcagagtgtcaggacggatcggatgagtcacaggaaacttgcttgtccgttacttgcaaatccggggattttagttgtggagggagggtgaacagatgtattcctcagttttggcgctgtgacggtcaggtggactgtgacaatgggtcggatgaacaaggctgccccccaaaaacctgcagccaggatgagtttcggtgtcatgatgggaaatgtatctcccggcagttcgtctgtgactcagaccgcgactgccttgacggttcagatgaagccagctgtccagttctgacttgcgggccagcgagcttccagtgtaactcatccacttgcattccacagctatgggcctgtgataacgatcctgactgtgaggatgggagtgatgagtggccccagaggtgccggggactctatgtgtttcagggggattcaagtccctgctcagccttcgagtttcattgcctctcaggagagtgcatccatagttcctggaggtgcgatggaggcccagactgcaaggataagagtgatgaggagaactgtgccgtggcgacatgccgaccagatgagtttcagtgtagtgacggaaattgtatccacggctccaggcaatgtgaccgagagtatgactgcaaagacatgagtgatgaggtcggctgcgtaaatgtcactttgtgcgaggggccgaacaagttcaaatgtcatagcggtgagtgtattactctcgacaaggtgtgcaacatggcaagggattgtcgggactggagcgacgaaccgatcaaagaatgcggcaccaacgagtgtctggacaataatggaggatgtagccatgtctgcaacgatctgaagatcggatatgagtgcgactgcccagacggctttcagcttgtcgcacaaaggcgctgcgaagacattgacgaatgccaagatcccgacacctgtagccagctgtgcgtgaacctggaaggtggatataagtgccagtgcgaggaagggtttcagctggaccctcacaccaaagcatgcaaggccgtcgggtccattgcatatctgtttttcacaaaccgccatgaagttcggaaaatgaccctggacagatccgagtatacctctctgatccctaacctgagaaatgttgtggcattagacaccgaggtggcttccaaccgaatctattggagcgacttgtctcagcgaatgatatgctcaacgcagctggacagagcccacggagtcagtagctatgataccgtcatttccagggatattcaggctccagacggtttggccgttgattggatccacagcaacatatactggactgattctgtcctcggcacagtgtccgtggctgatacaaagggagtcaagcgaaaaacgctatttcgtgagaacggttctaaacccagagccattgtggttgatcccgtccatgggttcatgtactggacagactggggaacccccgccaagattaagaagggtggcttaaacggcgtcgatatctactccttagtcacggagaacatccagtggccgaatgggataactctggatctgctgtctgggagactgtattgggtggactcaaagcttcactctatctcaagcattgatgttaacggtgggaatcgaaagacgatcctggaggatgagaagcgtctggcacaccccttttctctcgccgtttttgaagacaaagtgttctggaccgatattatcaacgaggctatcttcagtgcaaatcggctgaccgggagcgatgtgaacctgctcgccgaaaatcttctttccccagaagacatggttctctttcataatttgacacagccacgcggagtcaactggtgtgagcggactactctgtccaatggcggctgccagtacttgtgcctgccggcaccgcagattaacccgcattcacctaagtttacctgtgcctgtccggatgggatgcttttggctagagatatgagatcctgcctgacggaggcagaggctgcagtggcgacacaagagaccagcactgtgcggctgaaagtgagtagcaccgccgtgcggacccagcatacaaccactcgacccgttcccgacaccagtaggctccccggcgctacacccgggcttaccactgtagaaatcgtgactatgtcgcatcaggccttgggtgatgttgcagggcggggaaacgagaagaagccctcatccgttagagctctatcaatcgtgctgccaatagtcctcctcgtgttcctctgcctgggggtctttctgctgtggaagaactggaggctgaagaacattaacagcatcaattttgacaatccggtttaccagaaaactacagaggacgaagtgcacatttgccataatcaggacggatacagttacccaagcaggcaaatggtcagcttggaggacgatgtggcc

SEQ ID NO: 16062 - DNA, 2580 bp, synthetic construct
  misc_feature 1..2580: note = source = /note="Description of Artificial Sequence: Synthetic coding sequence"
  source 1..2580: mol_type = other DNA
atggggccctggggctggaaactgagatggaccgtggccctcctgctcgcggcagccggaaccgccgtcggggaccgctgcgagcggaacgaattccagtgtcaagacggaaaatgtatcagctacaaatgggtgtgtgacggctctgctgagtgccaggacggcagcgacgagagccaagagacctgcctctccgtgacctgcaagtcaggggatttttcctgcggaggacgtgtgaaccgctgtatcccccagttctggcgctgcgatggtcaggtggactgcgacaatggatccgacgaacagggctgtccgccaaaaacgtgtagccaggatgagtttcggtgccacgacggtaagtgtatcagccgacagttcgtgtgtgactcagaccgggactgcctcgacgggagcgacgaagcctcctgccccgtattgacttgcggacccgcaagttttcaatgcaatagcagcacctgtatcccccagctctgggcctgcgacaatgatcccgattgcgaagacggaagtgatgagtggccccagcggtgcaggggcctgtacgtttttcagggagactcgtcgccttgtagtgccttcgagttccactgcctgagtggcgagtgcatccattccagttggagatgcgatggaggaccagattgtaaggataagtccgacgaggagaactgtgcggtcgcgacatgtcgcccagacgaattccaatgctccgacggtaattgtatccacggctctcgccaatgtgaccgggaatacgactgtaaagacatgtcagacgaagtgggatgtgtcaatgtgactttatgtgagggccccaataaattcaaatgccactctggagagtgtattaccttggacaaggtgtgcaacatggcaagagattgccgggactggagtgacgaaccaataaaggagtgtggcacaaatgagtgtctggataacaacggtggctgctcacacgtgtgcaacgatctcaaaattgggtatgaatgcgattgcccagatggctttcagctcgtggcacagaggcggtgtgaagacatcgatgagtgtcaggatcctgacacctgttcccaattatgcgtgaacttggagggaggctataagtgccaatgtgaagagggctttcagttggatccccacaccaaggcttgtaaagcggtcggctcgatagcttatttgttttttaccaaccgtcatgaggtaagaaagatgaccctggaccggtcggaatacactagcttgatccctaacctccgcaacgtggtcgcactggatacagaggtggcctctaataggatctattggagcgacttgagccagcgcatgatttgctctacacagttggatcgggcccatggggtgtcctcctacgatacggtgatttctagggacatacaggcgccagacggacttgcagtggattggatccactctaatatctactggaccgatagcgtactgggtaccgtgagcgtggccgataccaagggagtgaaacgtaaaaccctgttccgggaaaatgggtcaaagcctcgagctattgtggttgaccctgtgcatggatttatgtattggactgactggggcactcccgctaaaattaaaaagggtggcctcaatggtgtcgacatttacagcctggtcacagagaatatccagtggcctaatggaataacccttgatctgctaagtgggcggttgtattgggtcgattcgaagttacactcaatttcaagcatcgatgtgaatgggggaaaccggaagacaattctcgaagatgagaaacgactcgcccaccccttctcactggccgtattcgaagacaaagtgttttggaccgatattattaacgaggctattttctctgccaacagactaaccggctctgacgtaaatctgctagcagagaacttgctatctcccgaggatatggtccttttccataatctgacgcagccacgcggcgtgaactggtgcgagagaacaaccctgtccaacgggggctgtcaatacctctgcctcccggcgcctcagatcaatcctcactcaccgaagtttacctgtgcctgccccgatggcatgcttctggcccgggacatgcgtagctgtctcaccgaggccgaagctgccgtggccacccaggaaacctcaacagtacgactgaaggtgtctagtacggctgtcagaacacagcacacaacaacccgcccagtgccggatacttcacggctacccggggccacacctggtttgactacagtcgagattgtaacaatgtcccatcaagccttgggagatgtggcaggtagggggaatgagaagaagccatcctccgtccgggccctgtctatcgtgctgccaatcgtactgttggtgttcctatgccttggagtgtttctcctgtggaagaactggagactcaaaaacatcaattctataaattttgataacccggtgtaccaaaagacaaccgaggacgaggtgcatatctgtcataatcaggacggttactcttatccgagtcgccaaatggtgtctcttgaagacgacgtcgcc

SEQ ID NO: 16063 - DNA, 2580 bp, synthetic construct
  misc_feature 1..2580: note = source = /note="Description of Artificial Sequence: Synthetic coding sequence"
  source 1..2580: mol_type = other DNA
atgggaccgtggggatggaaattgaggtggaccgtcgcccttctgctcgcggctgctggcacggctgtcggcgaccgctgcgaacgcaatgagtttcaatgccaagacgggaagtgcatctcatacaagtgggtctgcgacggatcagcggaatgccaagatgggtcggacgaatcgcaggaaacctgcctctcagtcacctgtaagtcgggcgatttcagctgcgggggccgggtgaaccgctgcatcccccaattctggcggtgcgacgggcaggttgactgcgacaacggttctgacgaacaaggctgccctcctaagacctgttcccaggatgaattcaggtgccatgatggaaaatgcatctcgcgccaattcgtgtgcgattccgacagagactgtctggatggaagtgacgaggcatcgtgcccagtcctgacttgcgggccggcttccttccagtgcaactcgtcaacttgtatcccgcagttgtgggcctgtgataacgaccccgattgcgaggacggctcggatgaatggcctcagagatgccgtggactgtacgtttttcaaggtgattcttcaccgtgcagcgcttttgagttccattgtctgtcaggcgaatgtatccactcgagttggcgatgcgacggcggacccgactgtaaggataagtcagacgaggagaattgcgccgtggccacttgccgcccggacgagtttcagtgctcagatggaaactgtatccatggatcacgccagtgcgaccgcgaatacgattgtaaggatatgtctgatgaggtcggctgcgtgaatgtgaccctgtgcgaaggtccgaacaagttcaaatgtcacagcggagaatgcattacgctcgataaggtgtgtaacatggcccgggattgtcgcgattggtcggacgagccaattaaggaatgcggtacgaatgagtgcctggacaataacggaggttgttcgcacgtgtgcaatgacctcaagatcggatatgagtgcgattgcccggacggattccagctggtggcacagcgcagatgcgaggacatcgatgaatgtcaggatccagacacttgttcacagctgtgcgtgaacctcgaaggaggctacaaatgtcagtgcgaagagggattccagctcgacccacacaccaaagcctgcaaggcggtggggagcatcgcctacctgttcttcaccaatcgccacgaagtgcgcaaaatgaccctggatcggtccgaatacacgtccctcatccctaatctgcgcaatgtggtggctctggacaccgaggttgcaagcaaccgcatctattggtccgatctgtcgcagcggatgatctgctcgactcagctggaccgcgcgcacggcgtgagttcctacgatactgtaatctcgcgggacatccaagcgcccgacgggctggcggtggattggattcacagcaacatttactggaccgactcggttcttggcactgtgagcgtcgcggacaccaaaggagtcaagcgcaagacgttgtttcgggagaacggaagcaaaccgcgcgccatcgtggtggatccagtgcatgggttcatgtactggactgattggggcaccccggccaagatcaagaaaggtggattgaacggagtggacatatactccctcgttaccgagaatatccaatggccgaatggaattactctggaccttctcagcggacggctgtactgggtcgactcgaaactccattcaattagttccattgatgtgaacggaggaaacagaaaaaccatcctggaagatgagaagagactggcgcatccgttttccctggccgtgttcgaggacaaagtgttctggaccgacatcatcaacgaggcgatcttctcggcgaatcggctgaccggatcggacgtgaaccttctggccgagaaccttctgtccccggaggatatggtgctgtttcacaatctcactcagccacggggggtgaactggtgcgaacggactaccctctccaatggtggatgccagtacctgtgcctgccggctccgcaaatcaatcctcactcacccaagttcacttgcgcctgccctgacggaatgcttttggcgagggacatgagatcgtgcctcactgaagcagaagccgcggtggccacccaggaaacgtccactgtgagactgaaagtgtcgtccactgctgttagaacccagcacactaccactcgccccgtcccagacacttcgagattgccaggtgctaccccgggactcactaccgtcgaaatcgtgaccatgtcgcatcaggctctcggggacgtcgccggacgtggaaatgaaaagaagccttcctcggttagagccctgtcgattgtgctgccgatcgtgctgctcgtattcttgtgcctgggagtgttcctgctctggaagaactggagactgaagaacatcaattcgatcaactttgacaatccagtgtaccagaaaactactgaagatgaagttcacatctgtcataatcaggacggatactcatacccttcgagacaaatggtgagcctcgaggacgacgtcgct

SEQ ID NO: 16064 - DNA, 2580 bp, synthetic construct
  misc_feature 1..2580: note = source = /note="Description of Artificial Sequence: Synthetic coding sequence"
  source 1..2580: mol_type = other DNA
atgggaccctggggctggaagctgagatggactgttgccctgctcctcgctgcagcgggtacagctgttggggaccggtgtgagcgtaacgagtttcagtgtcaggacggaaaatgcatttcctataaatgggtgtgcgatggaagtgccgaatgccaggatgggtcagatgaatctcaggaaacctgtttgagcgtgacatgcaagagcggcgacttctcatgtgggggaagagtgaaccggtgtatcccccaattttggcgttgtgatggacaggtggactgcgataacggaagcgatgaacaaggctgcccgcctaaaacctgtagccaagatgagttccggtgtcacgacggaaaatgcatctctagacagtttgtatgcgacagcgatcgggactgtctcgatggctcagacgaagcctcttgcccagtgctgacttgcggcccagcatccttccagtgcaacagcagcacttgtattcctcagctgtgggcatgtgacaacgatccagattgcgaggacggaagtgatgagtggccccaaaggtgtcggggactttatgtcttccagggggactcctctccctgcagtgcctttgaattccactgtctctcgggagagtgcatccactcaagttggcgttgtgacggcggccctgattgtaaagataagagcgatgaggagaattgtgctgtagctacttgtcgtcctgatgaatttcagtgttccgacggcaattgtattcatggcagcagacagtgcgacagggaatacgattgcaaggatatgtcagatgaagtaggatgcgtgaatgtgaccttgtgtgaagggcctaacaaatttaagtgccattccggcgaatgtataaccctggacaaagtttgcaacatggccagggattgcagagattggtcagatgaacccattaaggaatgtggcacaaacgagtgcttggataacaatgggggttgttcccacgtttgtaatgacttgaaaatcggatatgagtgcgattgcccagacggatttcagcttgtggcccaacgccggtgtgaagacatcgacgaatgccaggaccccgacacatgctcccaactgtgtgtcaatcttgagggagggtataagtgtcagtgcgaggagggtttccagctggaccctcataccaaggcgtgcaaggccgtcggtagcatagcctatttgttctttaccaacagacatgaggtacggaagatgacactcgacaggtcagagtacaccagccttattcctaaccttagaaacgtggtggctctggacacggaagtcgccagcaatcgaatctactggtcagacttatcccagcgaatgatatgctcgactcagctggatagagctcatggtgtgagctcctacgatacagttatctcccgcgatatccaggctccagacgggctcgccgtcgattggatacattctaacatatactggaccgactccgttctggggacagtttccgtcgctgacaccaagggggtgaaacgcaaaacgctctttcgggagaatggaagtaaaccacgcgcgatcgtcgtggatcctgtgcacggctttatgtattggacagactggggaacccctgccaagattaaaaaaggtggcctcaacggcgttgacatttatagcctggttactgaaaatatccagtggccaaacggcattactctcgatctcctgagcggccgcctctactgggtggactcaaagttacattcaatcagcagcatagatgtgaatggcggtaatagaaagaccattctcgaagatgaaaagcggcttgctcatcctttttcgttggccgtgtttgaggataaggtattctggacagatattatcaacgaggccatcttttccgccaataggctcaccgggtccgatgtgaaccttctagccgaaaacctactttccccagaggacatggtcttatttcacaacctgacccagccccgaggagtgaattggtgcgaaaggacaacactgtccaacgggggctgccaatacctttgtctgcctgccccacagatcaacccacattcccctaaatttacttgcgcctgccccgatggaatgctgcttgctcgcgacatgcggagttgcctgaccgaagctgaagctgcagtcgccacccaggagacctccaccgtgagactgaaggtgtcatctaccgccgtacggacacaacatacaacaactcgtcccgtcccagatacttcccggttgccaggcgctacacccggactgactaccgtggaaatcgtcacaatgagtcaccaggcactgggagatgttgctgggcggggaaacgagaaaaaaccttccagtgttagggcactgtctatagtgcttccgatcgtgcttctggtgttcttgtgcctgggcgtgtttctgctgtggaaaaattggcgcttgaaaaacattaattctattaattttgacaaccctgtgtaccagaaaacaactgaagacgaggttcatatctgccacaaccaggacggctattcttacccttcaagacagatggtatctctggaggacgatgtcgca

SEQ ID NO: 16065 - DNA, 2580 bp, synthetic construct
  misc_feature 1..2580: note = source = /note="Description of Artificial Sequence: Synthetic coding sequence"
  source 1..2580: mol_type = other DNA
atgggcccatggggatggaaactcaggtggaccgtggctctcttgctggcagccgcggggaccgcagtgggtgacagatgcgaacgaaacgagtttcagtgtcaagacggcaagtgcatcagctacaaatgggtgtgcgacgggtccgctgaatgtcaagatggaagcgacgagtctcaggagacatgtctaagcgtgacctgcaagtctggcgacttttcttgcggtggtcgtgtgaacaggtgcattcctcaattctggcgttgcgacggccaggtcgattgtgacaacggttcagacgagcagggatgcccacccaagacgtgtagccaggatgagttccgttgccatgacggtaaatgcatatcaaggcagtttgtgtgcgatagcgaccgcgattgtcttgacgggtccgatgaagcttcttgcccagtgctgacttgcgggccagccagtttccagtgcaattcgagcacatgcattccacagctttgggcctgtgataatgaccccgactgcgaagacggctctgatgaatggccgcagagatgtagaggactctatgtctttcaaggcgattcgagtccttgtagtgcgttcgaatttcactgcctgtctggagaatgcatccattcatcatggaggtgcgacggcggtccggactgcaaggacaagagcgacgaagaaaattgcgcggtcgcgacatgcaggcccgatgaattccagtgtagcgacggtaactgtattcatgggtcccggcagtgcgaccgtgagtacgattgcaaagatatgtcagacgaagttggatgtgtgaacgtgacactgtgcgaagggcccaacaagtttaaatgccattcgggagagtgcataaccttggacaaagtttgtaacatggcacgagactgccgagattggtcagacgaaccaattaaagagtgtggcacaaacgagtgtctagataacaacggggggtgtagccatgtctgcaacgatctaaagattgggtacgaatgtgactgtcccgacggtttccagttggtagctcagcgacggtgcgaggacatagacgaatgccaagatccagacacttgctcacaactgtgcgtaaatttagaaggaggatataagtgccagtgtgaagaaggtttccagttagacccccacacaaaggcctgcaaggctgtcggctcgattgcctacctcttttttacgaaccgtcatgaggtgcgtaaaatgacattggatcggtcagaatatacttccctcatccctaacctgcgcaatgtcgtcgcgctcgatactgaggttgccagcaacagaatctactggtccgacctgtcacagaggatgatttgctctactcagttggacagagcgcatggagtgtccagttatgacacagtgatctctcgggatattcaggcccctgacggtctggcagtggattggatccattcaaacatctactggaccgattccgttctcggtacagtgtcagttgctgatactaaaggcgttaagaggaaaactttattcagggagaatggatctaaaccccgcgccatcgtcgtggatcctgtacatgggtttatgtactggactgactggggcacacccgcgaaaataaaaaaaggggggctgaacggcgtggacatctattctctggtcacggaaaatatccagtggcccaatggaatcactctggacttactctccggacgactttactgggtggacagcaaactgcatagtatttcaagcattgacgttaatggaggaaacaggaagacgatcctcgaggacgagaaaaggctggcgcatccctttagtcttgctgtatttgaagataaggttttttggaccgacataataaacgaggctatatttagtgcgaacaggctgacagggtccgatgtaaatcttttagctgagaacctgctcagcccagaagacatggtgctctttcacaacttgacccagcctcgaggggtgaactggtgtgagcgaacgactttgagcaacggcggctgccagtacctgtgcttgcctgccccacagatcaaccctcacagccctaaatttacctgcgcatgcccggacggtatgttgctggcccgagacatgaggtcatgcttaacagaagcggaagccgcggttgctactcaggagacctctactgtgagactgaaagtgtcctctaccgcggttcgcacccaacataccaccacccgaccagtgccggatacttcacgactgcctggcgccacacctgggctgactaccgtggagattgtgacgatgtcacaccaggccctgggtgatgtagccggcagaggaaatgagaaaaaaccctcatccgtccgagcactgtccatcgtgcttcctatagttttgctggtgtttctctgcctgggtgtgtttctgctgtggaaaaattggaggctgaaaaacataaattcaattaatttcgacaaccccgtgtaccaaaaaactaccgaagacgaagtgcacatttgccataatcaagacggatacagttatccatctagacagatggttagtttggaggacgatgttgct

SEQ ID NO: 16066 - DNA, 2580 bp, synthetic construct
  misc_feature 1..2580: note = source = /note="Description of Artificial Sequence: Synthetic coding sequence"
  source 1..2580: mol_type = other DNA
atgggaccctgggggtggaaactcaggtggactgttgccctcctgcttgcagccgccgggactgcagttggcgatcggtgcgagcgcaacgagttccaatgccaagatggtaaatgtatttcgtataagtgggtttgcgacggttctgctgagtgccaggatggatcggatgaatcccaggaaacttgcctgagtgtaacctgcaaatctggtgatttttcctgcggagggagagtgaatagatgcattccccagttttggaggtgtgatggccaggttgactgtgacaatggatcagacgaacagggctgcccgcccaagacgtgctcccaggatgaattccgctgccatgacggtaagtgcatttcacgccagttcgtgtgtgacagtgacagagactgcctcgacggctccgatgaagcgtcctgtccagtcttaacatgtggtccagcatcattccagtgtaattcaagtacttgcataccccaactatgggcttgcgataacgaccccgattgcgaagacggaagtgacgaatggccccagcggtgtagagggttgtacgtgtttcagggtgattcaagcccatgctctgcattcgaattccactgtctgagcggggaatgcatccatagttcatggcgctgcgatggaggccccgattgtaaagataaaagcgatgaggaaaactgcgctgtggccacatgcaggcctgatgagtttcagtgtagtgacggaaattgtatccatggatcacggcagtgcgatagggagtacgactgcaaagatatgtccgatgaggttggctgcgttaacgtgacactgtgtgagggacccaacaagtttaagtgtcacagcggggaatgtattactctggacaaggtgtgcaacatggctcgagactgtagagactggagcgatgaacctatcaaggagtgtgggaccaatgagtgtttggacaacaatggagggtgtagccacgtctgtaatgatctgaaaataggctacgaatgcgactgtccggatgggttccagttagtggctcaacggcgatgtgaggacatcgacgagtgtcaggatcctgacacatgcagccaactctgcgttaacctggagggcggctataagtgccaatgtgaggagggctttcaactcgacccccataccaaagcctgcaaggctgtagggtccatagcctatctgttctttactaatcgacacgaggtgcggaagatgaccctggaccgatcggagtacaccagcctgattcccaatttgaggaacgtcgtagccttggacacggaggtcgcctctaataggatctattggagtgacctgagccagcgaatgatctgcagtacccagctggaccgagcccacggtgtgagttcatacgataccgtgatatcccgggacatccaggccccagatggactggccgtggattggattcactctaacatctactggactgactctgtactgggcaccgtgagcgtagctgatacaaagggtgtaaagagaaagactctgtttagggagaatggcagtaagcctagggctattgtagttgaccccgtgcacggattcatgtattggacggattggggtacccccgccaaaataaaaaagggaggactgaacggggtggacatttatagcttagttacggaaaatattcagtggccaaacgggatcacactggatctgctgtcaggccgtctgtattgggtcgactcaaaactgcactcgatctcctcgatcgatgttaacgggggcaacaggaaaactattctcgaagatgagaaaaggctcgcacatccctttagtcttgccgtgtttgaagataaggtgttctggaccgacatcattaatgaggccatctttagtgcaaaccgtttgactgggagcgacgtgaacttactggcagagaacttgctgtcacccgaggatatggttctgtttcataatttaacgcagcctcgcggagtcaactggtgtgaaagaactaccttatcaaacggcggatgtcagtatctgtgccttcccgcccctcagatcaacccccacagtcccaagttcacatgcgcctgtcccgacggaatgctgttggcccgagatatgaggagctgtcttactgaagcagaagctgctgtggctacccaggagacctcgacagtgaggctgaaagtgtcttcaaccgcagttcgaacacagcacacaactacccgcccagtgcctgacacctctcgcctgcccggagcaacgcccggcctgaccaccgttgaaattgttactatgtcacatcaggccttgggggacgtcgccggacggggaaacgaaaagaagccaagctccgttagggccctatctatagtcttaccaattgtgctactggtgttcctgtgtcttggagtgtttctgctgtggaaaaattggcggctgaagaatattaattctatcaatttcgataacccagtgtatcagaagaccaccgaagacgaagtgcacatctgtcacaatcaagatgggtactcctacccctcgcgacagatggttagcctcgaagatgatgtggct

SEQ ID NO: 16067 - DNA, 2580 bp, synthetic construct
  misc_feature 1..2580: note = source = /note="Description of Artificial Sequence: Synthetic coding sequence"
  source 1..2580: mol_type = other DNA
atggggccctggggatggaagctgaggtggaccgtggcactgcttctggcggcagcgggaactgcagtgggagacagatgtgagagaaatgaatttcaatgccaagacggcaagtgcatatcgtacaagtgggtgtgtgacggatccgcagaatgccaggacggttcggatgagtcgcaagaaacttgtctttccgttacctgtaagtcaggcgatttttcatgcggaggccgtgtgaaccgatgtatccctcaattttggcgttgcgatgggcaggtggattgtgacaatggttccgacgagcagggttgtccgcccaagacctgctcgcaagacgaatttcgttgtcatgatggaaagtgcatctcccggcaatttgtatgtgactcagatagagactgtctggatggttccgatgaagcgagttgccctgtgctgacctgtggtcctgcatcctttcagtgtaactcatctacctgcataccccaactttgggcctgcgacaacgatcctgattgtgaagatggatcggacgaatggcctcagaggtgtaggggattgtacgtgtttcagggtgacagctccccatgttccgcctttgaattccattgtctttcgggggagtgtatacattcgtcgtggcgctgcgacgggggccctgattgtaaggacaaatcagatgaggagaactgtgcggtggccacttgtcgacctgatgagtttcagtgttcggatggtaactgcatccatggctcgcgacagtgtgatagagaatacgattgcaaggatatgtcggatgaggtgggttgcgtgaacgttaccctttgcgagggacctaacaaattcaagtgtcattcgggagagtgtattacccttgataaagtgtgcaacatggcacgggattgtagagactggtctgatgaacctattaaggaatgcggtaccaatgagtgtcttgacaacaacggaggatgtagccatgtgtgcaacgaccttaagattggttacgaatgtgattgccccgatggttttcagctggtggcccaaagacggtgcgaggacattgacgaatgtcaggaccctgatacttgttcgcaactttgtgtcaatcttgaaggtggatacaagtgtcaatgtgaagaagggttccaactcgacccacatactaaggcatgtaaggcggtcggatccattgcttatcttttctttaccaacagacacgaggtgagaaaaatgacgctcgatcggtcggaatacacctcgctcatccctaatttgcgcaacgttgtggcactggataccgaggttgcaagcaatcgcatttactggtcggatcttagccaaagaatgatttgctcaacccagttggacagggcgcatggagtgagttcatacgatacggttatttcaagagatatccaggcgcctgatgggctcgctgtggactggattcactcgaacatttactggaccgactccgtgcttggaactgtctccgtcgccgacactaagggtgtcaagcggaaaaccctgttcagagagaatggttcgaagcccagagcgatcgttgtggaccccgtccacggattcatgtattggaccgattggggcacgcctgccaagatcaagaagggcgggctcaatggtgtggacatttacagcctcgtcactgaaaacattcaatggcccaacggtataaccctggacctgctttcgggacgcctttactgggtcgactcgaagctgcactccatctcctcgatcgatgtgaacggaggaaataggaaaaccatcttggaggatgaaaagcggctggcacatccattttccctggcggtctttgaagataaggtcttttggactgatatcattaatgaagcaattttctcagccaaccgattgactggttcagatgtgaaccttctcgcagaaaacctcttgtccccagaggatatggtgctctttcataaccttacccaacccaggggagtcaactggtgtgagagaactacccttagcaacggtggttgtcaatacctgtgccttccggccccccaaatcaacccacattccccaaagtttacttgtgcatgtccagacggaatgctgcttgcccgggatatgaggtcatgccttacggaggccgaagccgcagtggccacccaggagacttcaaccgtcaggcttaaagtgtcctcgaccgcagtgcgaacccaacataccaccactcgtcccgtgccagacacttcaaggctcccaggagccaccccggggcttactactgtggagatcgtgactatgagccatcaggcacttggagatgtcgccggaagaggtaatgagaaaaaaccctccagcgtgagagcactgagcattgtgcttccaatcgttctgctggtgtttctgtgtcttggtgtctttcttctgtggaagaattggagactgaaaaacataaacagcattaactttgataacccagtgtaccaaaaaacgactgaggacgaagttcatatctgtcataatcaagatggatactcatacccgtctcgccaaatggtcagccttgaagatgatgtggcc

SEQ ID NO: 16068 - DNA, 2580 bp, synthetic construct
  misc_feature 1..2580: note = source = /note="Description of Artificial Sequence: Synthetic coding sequence"
  source 1..2580: mol_type = other DNA
atgggaccatggggctggaaacttcgatggaccgtggccttactgcttgcagccgccgggacagctgtgggggataggtgtgaaagaaatgagttccaatgtcaggacgggaaatgcatttcatataaatgggtgtgtgatggctcggctgaatgtcaggacggatcagatgaaagtcaagagacatgcctgtcagtgacatgtaaaagcggagatttctcctgtggcggacgcgtaaatcggtgcattccgcagttctggcgctgcgatgggcaggttgattgtgacaacggttctgatgaacaaggttgtcccccgaaaacgtgctcacaggacgaatttagatgccatgacggcaagtgcatcagcaggcagttcgtttgtgacagcgacagagattgccttgatggaagtgatgaagcgtcatgccctgtattgacgtgcggacctgcatcatttcagtgtaattcatcgacgtgcattccgcagctatgggcctgcgacaatgacccggattgtgaggacggctctgacgagtggccccaaagatgtcgaggtttatacgtctttcaaggcgattcgtcaccatgtagcgcgttcgagtttcattgcttatccggggagtgcatccactcttcatggcggtgtgacggaggccccgactgcaaagacaaaagtgacgaagaaaattgtgctgtcgctacctgtagaccggatgaattccagtgctctgacggtaactgcattcatggctcacgtcagtgcgatcgggaatatgattgcaaagatatgtctgatgaagtaggttgcgttaatgtaacgctttgtgagggcccgaacaaatttaagtgtcattcaggcgaatgtatcacattagataaagtgtgcaatatggcgcgtgattgtagagattggagtgacgaacctattaaagagtgcggaacaaatgaatgcttagataacaatgggggatgcagtcatgtctgtaatgatttgaaaataggatatgagtgtgactgtcccgatggttttcaactggtagcgcaaagaagatgcgaagatatcgatgaatgccaagatccggatacctgtagccagctttgcgtgaatcttgaagggggttataaatgccaatgcgaggaaggatttcagctggatccgcacaccaaagcatgcaaagccgtcggttctatcgcgtatctgttttttacaaatagacatgaggtcagaaaaatgacgctcgatcgttcggagtatacctctctgattccaaatctcagaaatgtggtggcactcgacacagaagtcgcgagcaatcgaatctattggtcagatctctcacaacgcatgatctgttcgacacagttagacagggcgcatggggtttcttcatatgatacggtaatctcgcgcgatatccaagcgccggacgggcttgcggtcgattggattcatagcaatatttactggactgatagtgtcctgggaacagtaagtgttgctgatacaaaaggcgtcaaaagaaagacactctttcgggaaaacggatcgaaacctagagcaattgttgttgatccagttcacggttttatgtattggacagattggggaaccccggccaaaattaagaaaggcggcctgaatggagttgacatctacagtttagtgactgaaaacattcagtggccgaatggaatcactttagatctgctgagcggccgtttatactgggttgattctaagctgcatagtattagctccatagatgtaaacggtggcaaccgcaaaacaattcttgaagatgaaaaacgtttggctcatccgttttcactggcagtttttgaagacaaagtgttctggaccgacattatcaatgaggcaatattttcagctaacagattaacagggagtgatgtaaacctgctggccgagaacctcctatccccggaagatatggtcctttttcataatcttactcaacctcgaggtgttaattggtgcgaacggacgacactctctaatggggggtgccagtacctgtgtctgccggcaccccagattaacccgcattccccgaagtttacatgcgcgtgccctgatggcatgttactggctcgggatatgagatcatgccttacggaagccgaggcagcggtagcaacacaagaaacatcaaccgtgcgtttaaaggtctcgagtacagcggtcagaactcaacatacgacgacacgaccggtgccagatacttcaagactacctggggccacaccgggacttacaacagtggaaattgtcacaatgtctcatcaagctcttggggatgttgcgggaagaggaaatgaaaaaaaaccgagtagtgtccgtgccctttcaatcgttctgccaattgtgctcctggtttttttgtgcctgggagtctttctgctttggaaaaattggcggcttaagaacatcaattcgattaatttcgacaacccggtctaccagaaaacgacagaggatgaggtccatatttgccataatcaggatggctattcttacccgtctcggcagatggtcagtctggaggatgatgtggca

SEQ ID NO: 16069 - DNA, 2580 bp, synthetic construct
  misc_feature 1..2580: note = source = /note="Description of Artificial Sequence: Synthetic coding sequence"
  source 1..2580: mol_type = other DNA
atgggtccttggggatggaagttgcgctggaccgtggcgcttctccttgccgcggcaggcaccgcggtcggcgacagatgcgagagaaacgaattccagtgtcaggatgggaagtgtatttcatacaaatgggtgtgtgatggttcggccgaatgtcaggacggctcggacgagtcgcaagagacttgcctctcagtcacttgcaaatcgggagactttagctgtggaggacgcgtcaacaggtgtatcccgcagttctggcggtgtgatggccaggtcgattgtgataacggttcggatgaacagggatgtccgccaaagacgtgctcccaagatgagtttagatgtcacgatggaaaatgtataagccgtcagttcgtgtgtgattcggaccgcgattgtctggatggatcggatgaggcatcgtgtcctgtgctcacctgcggtccagcctcgttccagtgtaattcctcaacttgtatcccccaactctgggcttgcgacaacgaccctgattgcgaggatggaagcgatgagtggccgcaacgctgtcgggggctgtacgtgttccaaggcgactcctcgccttgctcggcttttgaatttcattgcctgtcgggagaatgcatccattccagctggcgatgtgatggcgggccagattgtaaggataagtcagatgaggaaaactgtgcagtggctacgtgtagaccagacgagtttcagtgtagcgacggcaattgtatccatggatccaggcaatgcgatagagaatacgattgtaaagacatgtcggacgaggtcggatgtgtgaacgtgactctctgtgaaggccccaataagttcaaatgccattcaggagaatgtatcaccctggacaaggtgtgcaacatggctcgggactgtcgtgactggtcggacgaacctatcaaggaatgcggcactaacgaatgtctcgacaataatggtggatgttcccacgtgtgcaacgacttgaaaatcggatacgaatgtgactgtcctgatggatttcagcttgtggcccaaagacggtgtgaggacatcgacgagtgccaagatccagacacctgtagccaactgtgtgtgaaccttgaaggaggttacaagtgtcaatgcgaggaaggatttcaactggacccgcatactaaggcctgcaaggcagtcggctcgatcgcatatctgtttttcactaatcgtcacgaggttaggaagatgaccctcgaccgctcggagtacacctcacttattccaaacctgagaaatgtggtggcgcttgataccgaagtggcatcgaatagaatttactggtcggatctgagccaacggatgatttgttcgacccaattggaccgtgctcacggagtgtcctcatatgataccgtgattagcagagatatccaagcgcccgatggactggctgtcgattggattcattcaaatatctattggaccgactccgttctgggaaccgtctcggtggcagacacgaagggagtgaagaggaaaactctgtttagggagaatggaagcaaacctcgcgcaattgtggtggaccccgtgcacggctttatgtactggaccgattggggaactccggcaaagattaagaaagggggacttaacggagtggacatatacagcctggtgactgaaaacatccagtggcctaacgggataacccttgatttgctctccggacggctttactgggtggatagcaagctccattctatttccagcattgatgtaaatggcggcaatcgaaagacgatcttggaggatgaaaagcgattggcacaccccttttccctggccgtgtttgaggataaagtgttctggaccgacattatcaacgaagcaattttctcggcaaaccgtcttaccggctcggatgtgaacttgctggccgaaaacctcctgtcacccgaagatatggttctttttcacaaccttactcagccccggggagtgaattggtgcgaacgaacgactctgtcgaacggaggatgtcagtacctgtgtctcccggcaccacagattaacccccatagcccaaagttcacctgcgcttgtcccgatggaatgcttctcgcaagggatatgcgatcatgtctgacggaggccgaagcggcagtcgcgacgcaagaaacttctacggttagactcaaagtgtccagcactgccgtgcggacccagcataccaccactcggcctgtgcctgacacctccagactgccaggtgcaaccccagggttgaccactgtggagattgtgaccatgagccatcaagccctgggagatgtggccggtcgcggaaatgaaaagaagccttcgtcggtgcgcgccctctcaatcgtgcttccaattgtcctgctcgtgttcctgtgccttggcgtgtttctcctttggaagaactggcggcttaagaacatcaattccatcaattttgataatccagtgtatcaaaagactaccgaagatgaagtgcatatttgtcataaccaagatggatactcatacccctccagacaaatggtgtccttggaagatgacgtggca

SEQ ID NO: 16070 - DNA, 2580 bp, synthetic construct
  misc_feature 1..2580: note = source = /note="Description of Artificial Sequence: Synthetic coding sequence"
  source 1..2580: mol_type = other DNA
atggggccgtggggttggaagctccggtggaccgtcgctctgctgcttgccgcggccggtaccgccgtgggtgacaggtgcgagcgtaatgaattccagtgccaggacggtaaatgcatttcatacaaatgggtatgcgatgggtcggccgaatgtcaagacggcagcgacgaaagccaggagacttgcctctccgttacctgcaagtctggagacttttcatgcggaggacgcgtaaacagatgtattccgcagttttggcgctgcgacggacaggtggactgcgacaacggatcggacgaacagggctgcccgcccaagacttgctcacaggatgaattcagatgccatgacggaaagtgcatctccaggcaattcgtgtgcgactccgaccgggattgcctggatggcagcgatgaggcctcctgccccgtcctcacgtgtggccccgcctccttccaatgcaattcgtcaacttgcattccgcaactttgggcatgcgataatgacccagattgcgaggacggatccgacgagtggccacagcggtgccgcggactgtatgtgtttcaaggtgattccagtccgtgcagcgctttcgaattccattgcttgtcaggagaatgcatacactcgagctggcgatgcgatggcggaccagattgcaaggacaagtcggatgaggagaactgtgcagtcgccacctgcagaccagatgagttccagtgttcagatggaaattgtatccacggctcgcggcagtgcgaccgagaatacgattgtaaggacatgtccgacgaagtgggatgcgtcaatgtgaccctctgtgagggcccgaacaagttcaagtgtcacagtggtgaatgcatcactcttgacaaagtctgtaacatggcccgcgactgccgtgattggtcagatgaacctatcaaagagtgcggcactaacgaatgcctggataacaacggagggtgttcacatgtctgtaacgacctgaaaatcggatacgaatgcgactgcccggacggctttcaactcgttgcgcaaagacgctgcgaggatatcgacgaatgccaggaccccgacacctgctcgcagctctgcgtgaatctggaaggggggtacaaatgccagtgtgaggaaggtttccaattggatcctcacaccaaggcatgtaaagcagtgggaagcatcgcgtaccttttcttcaccaacagacacgaggtgcgcaagatgaccctggataggtcggagtacacttctctcatccctaacctgcggaatgtggtggcgttggacacggaagtcgctagcaaccgcatctattggtcggacctgtcccaacggatgatctgttccactcagctcgaccgggcacacggcgtttcaagctacgacactgtgatcagtcgcgacatccaagcccccgatggactcgctgttgattggattcattccaacatctactggaccgactcggtgcttgggactgtgtcggtggcagataccaagggcgtgaagcgaaagaccctgtttcgcgaaaatggatccaaaccacgcgccatcgtggtcgacccagtccacgggttcatgtactggaccgattggggcaccccggccaagatcaaaaagggaggattgaatggagtggacatctactcccttgtgaccgaaaacatccagtggccgaacggaatcacgcttgacttgctgtcagggaggctgtactgggtcgactcgaaactccactcgatttcctcaattgatgtcaacggcggtaatagaaagacgatactcgaggacgagaagcggctggcgcatccattcagcttggcggtgttcgaagataaggtgttctggaccgacattatcaacgaagccatattcagcgctaaccgactgacgggatcggacgtaaatctgcttgctgaaaacctgctgagcccggaagatatggtcctttttcataacctgacccagccgagaggcgtgaattggtgcgagcgcaccaccctcagcaacggtgggtgtcagtacctgtgtctcccagcaccgcagatcaacccgcactcgcctaagttcacttgcgcctgtccagacggaatgctgctcgccagggatatgcggtcgtgcctgactgaagctgaggcagcggtggcaactcaagaaacgtccactgtgcgcctgaaggtgtcatctaccgcggtgaggactcagcacactaccactcgccctgtccctgataccagccgcctgccaggagctactccgggactcaccactgttgagattgtgactatgagccaccaagccctgggagatgtggcgggacgcggcaacgagaagaagcctagttccgtgcgggcgctgtccatcgtgctgcccatcgtgctcttggtgttcctgtgcctgggagtctttctgctttggaaaaactggagactgaagaacatcaattcgatcaatttcgataatccggtctaccaaaagaccactgaggacgaggtgcatatctgccataatcaggacggatactcatacccgagccggcagatggtttcgctggaagatgatgtcgcc

SEQ ID NO: 16071 - DNA, 2580 bp, synthetic construct
  misc_feature 1..2580: note = source = /note="Description of Artificial Sequence: Synthetic coding sequence"
  source 1..2580: mol_type = other DNA
atggggccatggggctggaagctgagatggacggtcgcgttgcttctggccgcagcaggtaccgcagtgggcgatcggtgcgagagaaatgaattccaatgccaagacggtaagtgcatttcatacaagtgggtatgcgacggcagcgctgaatgccaagacggctcggatgaaagccaggaaacatgcctttcagtaacatgcaagagtggggatttctcatgtggaggacgggtgaacagatgcatcccgcagttctggcgatgtgacggccaggtcgactgtgataatgggtctgatgaacaaggatgccccccaaagacatgttcccaagacgaatttcgctgccacgacggtaaatgcatcagcaggcagttcgtgtgcgactcagatagagattgtctcgatggcagtgatgaagcatcttgtcctgtactgacctgcggcccggcctcgtttcagtgtaattctagcacatgtatcccgcaactgtgggcctgcgataatgacccagactgcgaggacggttctgacgagtggccacagcgttgtaggggactgtacgtcttccagggggatagctcaccgtgtagtgctttcgagtttcattgcttgtctggggagtgtatccatagttcatggcgttgtgatggcggacccgactgcaaggataaatcagatgaagagaattgtgcagtcgcgacttgcaggccggacgagttccagtgctccgatgggaattgcatccatggctcgcgacagtgtgatcgtgaatatgactgtaaagacatgtcggatgaggttggatgtgtcaacgtgacgctctgcgaggggccgaacaaatttaagtgccactcaggagaatgcataaccctggacaaagtttgcaatatggctcgagattgtcgcgattggtcggacgagcctattaaggagtgtggcacgaacgagtgtctggacaacaacgggggctgtagtcacgtttgcaatgatttgaagatagggtatgagtgcgactgtcctgatggtttccaattggtcgctcagcgccgttgtgaagatattgatgagtgtcaggaccccgacacctgctcgcaactgtgtgtgaacctagagggcgggtataagtgccagtgtgaggaggggtttcaactggatccacatacgaaagcatgcaaggccgttggctcaatcgcttacctgtttttcaccaatagacatgaggttcgcaagatgaccctcgacaggtcagaatacacgtctctgatcccgaacctgaggaacgtggttgccttggatacagaggttgcgtctaacagaatctactggtcagacctgtctcagcggatgatttgctccacacagctcgatcgagctcatggcgtttcttcatatgataccgtgatcagcagggatatccaagcacctgatgggcttgccgtggactggatacactctaatatctattggacagattccgttctaggcactgtttctgtggcagacaccaagggcgtgaaacggaaaaccctgttcagagaaaatggctctaaaccgcgggccattgtggtcgaccccgtgcatggattcatgtactggaccgattggggcactccagccaagattaaaaagggaggcctaaacggtgtcgatatttactccctcgttacagagaatatacagtggccaaatggcatcacccttgacctgctctcaggtaggctatattgggttgacagcaagctgcattctatttcttccatcgatgttaacggaggcaacagaaaaacgatccttgaggatgaaaagcgactggctcacccgttcagcttggctgtgtttgaggacaaggtcttctggactgacattattaacgaagccattttttccgccaaccgccttacgggctctgacgtcaacctgctcgccgaaaaccttctcagccccgaggacatggtgctttttcataatctcactcagccccgcggcgttaactggtgcgaacgcaccaccttgtcaaacggcggctgtcaatatctgtgcctccccgcaccgcagataaaccctcacagcccaaaattcacgtgcgcgtgtccagatggtatgttgctggcgcgagacatgcgttcctgcctgaccgaagctgaggcggccgttgctacacaggagaccagcactgtccggctcaaggtcagttcaacagcggttagaactcaacacacaacaactagacccgtgcctgacacatcccggttaccgggtgcgacaccaggtctaactacggtggagattgtaaccatgagccaccaggccctgggggatgtggccggtagaggcaacgagaaaaagccttccagtgttagagccctgagcattgtgttgccaatcgtgctgctggttttcttgtgcctgggggtcttcctactctggaaaaactggcgcctcaaaaatataaattccattaattttgacaaccctgtgtaccagaagacaacagaagacgaggttcacatctgtcacaatcaggacggatattcatatccctcacgacagatggtatccctggaagatgacgtggcc

SEQ ID NO: 16072 - DNA, 2580 bp, synthetic construct
  misc_feature 1..2580: note = source = /note="Description of Artificial Sequence: Synthetic coding sequence"
  source 1..2580: mol_type = other DNA
atgggaccgtgggggtggaagctgcggtggaccgtcgccctgcttctcgccgccgcgggaacggccgtgggcgatcgctgcgagcggaatgaattccagtgccaggatggcaaatgcatctcctacaaatgggtgtgcgacggctcggccgaatgtcaagatggatcggacgagtcacaggaaacctgcctgtcagtgacttgtaaatctggcgacttctcatgcggaggacgcgtcaatcgctgtatcccgcagttttggagatgtgacggacaggtggactgcgacaatgggtcggacgagcagggatgcccaccgaaaacttgttcccaagatgagttccggtgccacgacggaaaatgcatttcgcggcagttcgtgtgcgattcggacagagactgcctcgacggatcagacgaagcaagctgcccggtgctgacttgcggaccggcctcattccaatgcaatagcagcacttgcataccacagctctgggcctgcgataacgatccggattgtgaagatggatctgacgagtggcctcagcgctgccgaggactctacgtctttcaaggagactcgtcgccttgctccgcattcgagttccactgcctgtccggagaatgtatccactcgtcttggcgatgcgacggaggcccagattgcaaggataagagcgatgaggaaaactgcgccgtcgctacctgtcgtcctgacgaatttcagtgttccgatggcaattgcatccatggatctcgacagtgtgatagggaatacgattgcaaggacatgtccgatgaagtcggatgtgtgaacgtgactctgtgtgagggcccgaataagtttaagtgccattccggggagtgcatcactctggacaaggtgtgtaacatggcgcgcgactgccgggactggtccgacgaaccgatcaaagaatgtggcaccaatgagtgcctggacaacaacggaggatgcagccatgtgtgcaatgacctgaagattgggtacgaatgcgattgcccggatggattccagctggtggcgcagcgccgctgcgaagatatcgacgagtgtcaagacccggatacttgctcgcagctttgtgtgaatctcgaaggaggatacaagtgccaatgcgaggaggggttccaactcgacccgcacaccaaggcatgcaaggccgtgggttccatcgcctaccttttcttcactaatcggcacgaggtgcgcaaaatgactctggaccgaagcgagtacacctcgttgatcccaaatttgaggaatgtggtggcactcgataccgaggtcgcttcgaaccgaatctactggagcgacctgtcacaacgcatgatctgctcgactcagctggatcgggcgcatggtgtctcctcctacgacactgtgatctcacgagatattcaggcccccgacggactggccgtcgactggatccactcgaacatctactggacggacagcgtcctgggaacggtgtcggtggctgatactaaaggcgtgaagcggaaaactctgttccgggagaacgggtccaagccgagagctattgtggtcgatcccgtccatgggttcatgtattggacggattggggaactccggccaagatcaagaagggaggcctgaacggagtggacatttactccctggtgacggagaatatccagtggccgaacggaatcaccctggacctgctgtcgggacgcctgtactgggtggactcgaagctccatagcatctcgtccatcgatgtgaatggcggaaacagaaagactatcttggaagatgaaaagcgcttggcacatcctttctcgctggccgtgttcgaagataaggttttctggacggatatcattaacgaagccatcttctccgcaaaccgtctgaccggcagcgacgtgaacctgctggcagagaacctgctctcaccggaagatatggtcctcttccataaccttacccagccgagaggggtgaattggtgcgaacggaccactctgtccaatggaggatgccagtacctgtgcctcccggcgcctcaaatcaaccctcactcgccgaagttcacgtgcgcttgcccggacggcatgctcctggccagagatatgcgctcgtgtctgacggaagctgaagctgccgtggccacccaggaaacctcaaccgtcaggttgaaggtcagctcgaccgcagttcgcacgcaacacaccaccacccggccagtccctgacacctcacgattgcctggggccactccaggtttgactaccgtggagatcgtgaccatgtcccaccaggccttgggagacgtcgcagggaggggcaacgagaagaagccttcgtcagtgagagcgctgtccatcgtgctgccgattgtgctgctggtgttcctgtgcctcggtgtgttcctgctgtggaagaattggcgcctcaaaaacatcaactccatcaacttcgacaacccggtgtaccagaaaaccaccgaagatgaggtgcatatctgccacaaccaggacggatactcctacccgtcgagacagatggtgtcgctcgaggacgacgtggct

SEQ ID NO: 16073 - DNA, 2580 bp, synthetic construct
  misc_feature 1..2580: note = source = /note="Description of Artificial Sequence: Synthetic coding sequence"
  source 1..2580: mol_type = other DNA
atggggccgtggggctggaaactgcggtggactgtggcactgctgctggctgctgctggtaccgccgtcggggacaggtgcgagcgaaacgagtttcagtgccaagacggcaagtgtatatcttataagtgggtctgtgacggatcagctgagtgccaggatgggtcagacgaaagccaggagacttgtctgtctgtaacatgcaaatcaggagacttcagctgcggcggtagagttaatagatgcataccccagttttggaggtgcgacggacaggtggattgtgacaacggtagtgatgagcaaggatgcccgcccaaaacttgctcacaggacgagtttaggtgccacgacggtaagtgtatcagcagacagtttgtttgtgattcagacagggattgtttggatgggtccgacgaggcttcttgcccagttttgacctgcggacctgcctctttccaatgcaactcttctacatgtatacctcagctttgggcatgtgataatgaccccgactgcgaggacggctctgacgagtggcctcagcgctgtaggggcctgtacgtcttccagggcgattccagtccttgcagtgccttcgagttccactgcctcagcggggagtgtatccattcctcctggaggtgcgacggcgggcctgattgtaaagataaaagcgatgaggagaattgcgctgttgccacatgtcgacccgatgaattccagtgcagtgatggaaactgcatccacggctctaggcagtgcgatagggaatacgactgtaaagacatgtccgacgaagtcgggtgcgtcaatgtgacattgtgtgagggccctaacaagttcaaatgccatagtggagagtgtatcactctggataaggtgtgtaatatggcccgagattgtagggactggagcgatgagcccattaaagagtgcggcaccaacgagtgtctggacaacaatggaggatgtagtcatgtgtgcaacgatctgaagatagggtatgagtgcgactgccctgatggcttccagctggtggctcaaaggcgatgcgaggatattgatgagtgccaggatccagacacatgtagccaattgtgtgtcaatctcgagggcggctacaaatgtcagtgtgaggagggatttcagctcgacccccacactaaggcttgtaaggccgtaggatcaatagcctatctgttttttactaacagacatgaggtgcggaagatgaccctggacagatcagaatacacatctttgatacctaatctgagaaatgttgtcgcactggacaccgaggtcgcctcaaacagaatctactggagtgacctctcccaacggatgatctgcagtacacagcttgatcgcgctcatggcgtctctagttacgacacagttataagccgcgacattcaggcgccagacgggctcgccgtggactggatccattccaacatttattggacagattctgttctcggcactgtatctgtggccgataccaaaggtgtgaagcgcaagactctctttcgggaaaacgggagcaagcctagggccatcgtagtggaccctgtgcatgggttcatgtattggacagactggggcacccctgccaagatcaaaaagggaggtctcaacggtgtggatatctattccctggtcacggaaaatatccagtggcctaatggcatcacgctggatctgctctctggcaggctgtattgggtcgatagcaaactgcactccatctcaagcattgacgtaaacgggggaaaccggaagaccatcctcgaggacgaaaagcggctggctcatccattttccctcgctgtgttcgaggataaggtgttctggactgatattatcaatgaggcaatcttcagtgctaatcgactgactggatcagatgtgaacttgttggctgagaatctcctttccccggaggacatggtcctttttcataatttgactcaacccaggggtgtgaactggtgcgagcggactactcttagcaatggcgggtgtcaatatctgtgtcttcctgccccccagatcaatccccactctccaaagtttacatgcgcctgccctgatggaatgctgcttgcgagagatatgcggagctgtctgactgaagcagaggctgctgtggccacgcaggagacctccacggtgaggctgaaggtcagctctaccgcagtccgcacacagcatactactacgcggcctgtccccgacacctcacggctgcctggagccacacccggcctgacaaccgttgagatagtgactatgtcccaccaagcactgggggacgtcgccgggcggggcaatgagaagaaaccatcaagcgtgagggcgctgagtattgttttgcctattgtactgctggtctttctctgcctgggagttttcctgctgtggaaaaattggagactcaaaaacattaacagcatcaactttgacaatccagtctaccaaaaaactactgaggacgaggtccatatctgtcataatcaagatggctacagctacccgagtaggcagatggtgtctctcgaggatgacgtggct

SEQ ID NO: 16074 - DNA, 2580 bp, synthetic construct
  misc_feature 1..2580: note = source = /note="Description of Artificial Sequence: Synthetic coding sequence"
  source 1..2580: mol_type = other DNA
atgggcccatggggctggaaattgaggtggacagtagcactgttgctagccgccgcaggtaccgccgttggagatcggtgtgaaaggaacgagttccagtgtcaggatgggaagtgtatttcttataagtgggtgtgcgatgggagcgctgaatgccaggacggatccgatgagagtcaggaaacttgtctgagtgtgacatgtaaatcaggggacttctcctgcgggggacgagtgaataggtgtattccacagttctggaggtgtgacggccaggtagactgcgataatggttcagacgagcaggggtgtcctcccaagacgtgcagccaggatgaatttaggtgccacgatgggaaatgtatctcacggcagttcgtttgcgatagcgatagagactgtctggacggctccgacgaggcttcttgtcctgtcctaacatgtgggcccgcaagctttcagtgcaacagctctacttgcattcctcagctgtgggcatgtgataacgacccagactgcgaagatggaagtgacgaatggccacagcgttgccgcggcctgtatgtgtttcagggcgacagtagtccctgttccgcattcgaattccattgcctgtccggcgaatgcatacactcgtcctggcgatgcgacggtggtccagactgtaaggataagagcgatgaagagaactgcgcagtggccacctgccgcccagacgaattccagtgttctgatggaaactgcatccacggaagcaggcagtgcgaccgggagtacgattgcaaagatatgagtgacgaggttgggtgtgtgaacgtcacattgtgtgaggggcccaataagttcaaatgtcacagcggggagtgtataaccttggataaagtatgtaacatggcccgcgattgccgggactggagcgacgagccaataaaagagtgcggcaccaacgaatgtttggataacaacggcggatgctctcatgtttgtaatgatctgaaaattgggtacgaatgtgactgccccgatggatttcagttagtggctcagcggcgttgtgaagacatcgacgaatgccaggatcccgacacctgtagccaactgtgcgtgaaccttgaaggtggttataaatgccagtgcgaggaggggttccagctggatccgcacacaaaagcttgcaaggcagtcggatcaattgcttacttgttcttcacgaatcgccatgaggtaaggaagatgactctagacaggtcagagtacacctccttgatcccaaatcttaggaacgtagttgcactggacacagaagtcgcctctaatcgaatatattggagcgacctctcccaaagaatgatctgctcaacacagctggatcgggcacacggcgtttcttcatatgatacggtcatttcaagggacatccaggcccccgacggcttagccgtagattggatccattctaacatatactggacagacagcgtgctgggcactgtgagcgtagccgacacaaagggggtaaagcgcaagactttgttccgagaaaacggttcaaaaccaagggccattgtggtagatccagtgcacggattcatgtattggactgattggggaactccagctaaaataaaaaaaggaggcctgaacggcgtagacatctattctttggtcactgagaacatccagtggcccaatggtatcaccctggatctgcttagcgggaggctctactgggtcgattctaagctgcattcaatcagctctattgacgtgaacggggggaaccgaaaaacgattcttgaagacgaaaaaagactagcacacccattcagcctggctgtgtttgaggacaaggtgttctggactgacattataaacgaggcaatcttctcagctaatcggctaacaggctctgacgtaaacttgctggccgaaaatctgctgtctccagaggatatggtgctgttccacaacctgactcagccccgcggcgtgaattggtgcgaacggaccacactgtccaatggtgggtgtcagtatctctgcctgccagcgccacagattaaccctcactcccctaagttcacttgcgcgtgccctgacggaatgcttctggccagagatatgagatcatgtctcacagaagctgaagccgcagtggctacccaggaaacgtccaccgtgagattaaaagtctcttccaccgcagtgagaacgcaacatacgaccacacggcccgtaccagacacatctcggctgcctggagcaacccctggactgacaaccgtggaaatcgtgaccatgtcccatcaggccttaggagacgtggcagggagaggcaacgaaaaaaagccaagtagtgtccgcgccctgagcattgttctgcccatcgtcctgctggtcttcctgtgcctgggggtgttccttctttggaaaaattggagactaaaaaatattaatagcattaactttgataaccccgtttatcagaagacgacggaggatgaggttcatatctgccataaccaagacgggtattcgtacccatcccggcagatggtgtcacttgaggacgatgttgcc

SEQ ID NO: 16075 - DNA, 2580 bp, synthetic construct
  misc_feature 1..2580: note = source = /note="Description of Artificial Sequence: Synthetic coding sequence"
  source 1..2580: mol_type = other DNA
atggggccatggggctggaagctccgttggaccgtagcattacttctcgctgccgctgggacagcagttggggatcggtgcgaacgcaacgaatttcagtgtcaggatggcaagtgcatcagttataaatgggtgtgtgatgggagtgcagagtgccaggatggcagcgatgaatcccaggagacatgcctgagcgttacatgcaagtctggagattttagttgtggcgggagagtcaacaggtgtattccccagttctggcggtgtgacgggcaggttgactgcgacaacggcagcgacgagcaggggtgtccgcctaagacctgttcacaggatgagtttcggtgtcatgacggaaagtgcataagtcgccagtttgtctgtgactctgaccgtgactgcctggacggctctgacgaagccagttgcccagtgctgacctgcggtccagcttccttccagtgtaattcctccacatgtatccctcagctttgggcatgtgacaatgatccagactgtgaagacggaagtgatgaatggccacaacgatgccgcggcttatacgtgtttcaaggagactcatcaccgtgcagcgcttttgagttccattgcctgtctggtgaatgtattcacagctcttggaggtgtgacggcgggcctgattgcaaagataaatcagacgaggaaaactgtgctgtcgctacctgtagacccgatgagtttcaatgttcagatgggaactgcattcacggcagccgccagtgcgatagagagtatgattgcaaggacatgtcagacgaagtggggtgtgtgaacgtgaccctatgcgaagggcctaataagtttaagtgccacagcggagagtgcatcaccctggacaaagtctgtaatatggctagggattgccgcgattggtcagacgagcccataaaggaatgtggtacaaatgagtgtctggacaacaatggtggatgtagccatgtttgtaatgatctgaagattggctacgagtgtgactgccccgatgggttccagctcgtcgcacagagaagatgcgaagatatcgacgaatgccaggatccagatacctgcagccagctctgcgttaaccttgagggaggctacaagtgtcagtgcgaggagggttttcagttagatcctcataccaaagcctgcaaagccgttggctcaattgcatatctgttcttcaccaatcgccatgaagtgagaaagatgaccctagacagaagcgaatatacaagtctaatacccaatctgcgcaatgtggtggctcttgatacagaggtagcatctaacagaatttattggtccgatctgtcacagcgtatgatttgtagtacccagctggatcgagcccatggcgtttccagctacgataccgttattagccgggatatacaggcccccgacggcctggccgttgactggatacactccaatatttattggacagatagtgtgctgggcaccgtcagcgtggctgacactaagggggtgaagaggaaaaccctattcagggagaacggttcaaaacctcgagccattgtggtcgatcctgttcatggctttatgtactggactgattggggcacccccgccaagattaaaaaagggggcttgaacggagtggacatttatagcctagtgaccgagaacatccagtggcccaatggtattactctggatttattatctggtcgattatactgggtcgacagcaagttgcacagtatatcatccattgacgttaatggcggtaatagaaagacaatcctggaagacgagaagaggctggctcatccattctccctcgccgtttttgaggataaagtcttctggactgacataataaacgaggccatatttagtgccaataggctgaccggcagtgacgtgaacctgctcgccgagaatctgctcagccccgaggacatggtgctgttccacaatttaacccagcccaggggggtcaattggtgcgagagaaccacattatccaatggcgggtgtcaatacctgtgcctgccagctccccaaataaacccacatagccctaaattcacctgtgcctgcccagatgggatgctcctcgcccgggacatgcggagctgtctgaccgaggccgaagccgcagtggcaacccaggagacatccacagtcagactgaaagtcagttccactgcagtccgcacccagcacaccaccaccaggccagtgcctgacactagtcggctgcccggagcaactcctgggctgacaactgtggagatcgttacaatgagtcatcaagccctgggggatgtggccgggagaggcaatgaaaaaaagccttcttcagtgcgtgcactgtccatagtgctaccaatagtgttgctggtgttcctatgcctgggcgtgttcctactgtggaagaactggcggctaaaaaatattaattcaatcaactttgacaatccagtgtaccagaaaacaactgaggatgaagttcacatatgtcacaatcaggatggatattcttaccccagcaggcaaatggtttctctggaagatgacgtcgct

SEQ ID NO: 16076 - DNA, 2580 bp, synthetic construct
  misc_feature 1..2580: note = source = /note="Description of Artificial Sequence: Synthetic coding sequence"
  source 1..2580: mol_type = other DNA
atgggcccttggggatggaagctgcggtggacagtagctctcttattggcagccgctggaaccgcagttggagatcggtgtgagaggaacgaattccagtgccaggacgggaagtgtatctcatacaaatgggtgtgcgacgggagcgctgaatgccaggacggcagcgatgaatcccaggaaacgtgcctgagcgtgacatgcaaatctggggatttctcttgtggtgggcgcgtgaataggtgcatcccgcagttctggaggtgcgatggccaggtcgattgcgataatggttccgatgagcaggggtgccctcccaagacatgttcgcaggatgagttccgctgccacgatggaaagtgtatctctaggcagttcgtctgcgattcagacagggattgcctcgatggctctgacgaagccagctgtccagtgctgacgtgcggaccggccagcttccagtgcaattctagtacctgcattcctcagctttgggcttgcgacaacgatccagactgtgaagatggtagtgatgaatggccccagcgatgccggggcctgtatgtattccaaggggactcgagcccttgcagcgcgttcgagttccactgcctgtctggagaatgtatacactcttcctggcgatgcgatggcggcccagactgtaaagataaatcggatgaagagaactgtgcagtggccacgtgccggccagacgagttccagtgttccgatgggaattgtatacacggctctaggcagtgtgatcgggagtacgactgcaaggatatgagcgatgaggtggggtgcgtgaatgtgactctttgtgagggacccaacaaattcaaatgtcactcgggtgagtgtatcacactggataaagtatgcaatatggctcgcgattgccgcgactggagcgatgaacccattaaagagtgtggcacaaatgagtgtctggataataacggaggatgctcacacgtgtgcaatgacctgaagattggctacgaatgtgattgccctgatggcttccaattggttgctcagaggcggtgcgaggacatagacgaatgccaggaccctgacacttgtagtcagctgtgcgttaacctggagggaggatacaagtgtcagtgcgaagagggctttcagttggaccctcatacaaaggcttgcaaagcggtgggaagcatcgcatatctcttctttacaaaccgccatgaggttcggaagatgaccctagatagatcagagtacactagcctcatccctaacctgaggaatgtggtggctctggacacagaggtagcgagcaatcggatatactggtccgatctgagccagagaatgatatgcagcacccagctggatagggcacacggcgtctcttcctatgacacagtgatcagcagagacattcaagcccctgatggtctggccgttgattggatacattccaatatttattggacggattcggtacttggaaccgtttcagttgctgatacgaaaggcgtgaagaggaaaaccctgttcagggaaaacggctcaaaaccaagagcaatcgtggtggaccccgttcacggatttatgtattggactgattggggtacgcctgctaaaatcaagaaaggcggattgaacggagtggacatctacagcttagttaccgaaaacattcagtggcccaacggcattaccctggatttgctgtccgggagactgtactgggtggattccaaacttcattcgatctcgagtatagacgtgaacggtggcaaccggaaaaccattctggaagacgaaaagaggctcgcccacccatttagtctggcagtgtttgaggacaaagtgttctggaccgacattattaacgaggctatcttttctgctaacagacttacgggatcagacgtgaatttactcgcggagaacctgttaagtccggaagatatggtgctctttcacaatttaacacagccgaggggcgtgaactggtgtgagaggacgaccctgtctaacggcggctgtcaatatctgtgtttacccgccccacaaataaacccacatagccccaagtttacctgcgcttgccccgacgggatgcttttagctcgggacatgagatcctgtctgaccgaagccgaggcagcggtcgcaacccaagagaccagcaccgtccggctgaaggtgtcatctaccgccgtgcgcacccaacataccacaacccgcccagttcccgacacatctcgtctgcccggcgcaactccgggcctgacaacagtggaaatcgtgactatgtcccaccaagcattaggagatgtcgccgggcggggaaatgagaaaaagccttcttccgtccgggctctgagcatcgtgcttcctatagtcctcctagtgttcctgtgtctcggcgtcttcctgctctggaaaaactggaggctgaaaaacatcaacagtattaactttgataatcccgtctatcagaagaccaccgaagatgaagttcacatctgtcacaaccaggacggctactcctaccccagccggcaaatggtatcacttgaggacgacgtggcc

SEQ ID NO: 16077 - DNA, 2580 bp, synthetic construct
  misc_feature 1..2580: note = source = /note="Description of Artificial Sequence: Synthetic coding sequence"
  source 1..2580: mol_type = other DNA
atggggccctggggctggaaactgcggtggacagtggctttactgctggcggctgccggcacagccgtgggagacaggtgcgaacggaacgaattccaatgccaggacggcaagtgcattagttataaatgggtctgcgacggaagcgccgagtgccaggatggcagcgacgaaagtcaagagacgtgcttgagtgttacctgtaaaagcggggatttctcttgcgggggccgtgtaaacaggtgcataccacaattctggcgttgtgatgggcaagttgactgcgacaatggctctgacgaacaaggctgtcctcctaagacttgtagccaggacgagtttaggtgccacgatggaaaatgcatatctaggcaatttgtctgtgatagtgaccgggattgcctagacggtagtgacgaggcgtcatgccccgtgctcacttgtggccctgcaagtttccagtgtaactcctcaacttgtatacctcagctgtgggcctgcgacaatgacccagactgtgaggatggatcagatgagtggcctcagcggtgtagaggattatacgtgtttcagggggattccagcccatgttcagcctttgagtttcattgcctcagcggtgagtgcattcactcatcatggagatgcgacggcgggcccgactgtaaagacaaaagcgatgaagagaactgtgccgtagccacctgccggccagacgaatttcagtgttccgacgggaactgtatccatggctcccgacagtgcgaccgtgagtatgactgcaaggacatgtctgatgaggtggggtgcgtgaacgttactctctgcgaagggccaaacaagttcaagtgccactctggggagtgcatcaccctggataaagtgtgcaacatggctcgggactgcagggactggtcagatgagccaataaaggaatgcggtaccaatgagtgccttgataataatggcggttgtagccatgtgtgtaacgacctcaaaatcgggtacgaatgcgactgccccgacggctttcagcttgtagctcaacgtcgctgtgaagatatcgacgagtgccaggatccagatacatgttctcagttatgcgtaaatctcgaaggcggttataagtgccagtgtgaggagggcttccagctggatccccacacaaaggcttgtaaggcagtcggctctatcgcatatctgttttttactaacaggcacgaggtcagaaaaatgactctggataggtctgagtacacctccctgatccctaacctccggaacgtcgtagcattggataccgaggttgctagcaacaggatttactggagcgacttgtcccaaaggatgatatgttctacgcaactcgaccgggctcacggagtaagttcttacgatacagtcatttcccgagacatccaggcacctgacggcctcgcagtcgactggattcattcaaatatctactggactgatagtgtgttaggcactgtcagcgtcgcggataccaaaggagtgaagcggaaaactttattccgggaaaacgggtccaaaccccgcgccatcgtggttgaccctgtccatgggtttatgtattggacagactggggtacaccggcgaagatcaagaaaggcggactaaacggcgtagacatctattcattggtcactgagaacatacaatggccaaacggcatcacgctcgacctgctttctggccggttgtactgggtggattcgaagttgcacagtatcagctcaattgatgtgaacggcgggaatcgaaaaaccattctcgaggatgagaaacggctggcacaccccttctctctggctgtgtttgaagataaggtgttctggactgacattatcaacgaggctattttttccgctaatcggctgacagggtctgatgtgaacctgttagccgagaatctgctttctcctgaggatatggtcctgtttcataacctgacccagcctcggggggtgaactggtgtgagaggacgactttgtccaatggcggctgtcagtacctctgcttgccggcgcctcaaatcaaccctcactctcctaaatttacctgcgcctgccccgatgggatgctgctcgctagggacatgagaagctgcttgactgaggccgaggctgcagtggctactcaggaaacaagcacagttcggctaaaagtcagcagcacagccgtgagaactcagcacaccaccacacgacctgttcccgacacaagcaggctgcctggagccactcccgggttaaccacggtggagatcgtgactatgtcacatcaggcactaggggatgtggcgggaaggggcaatgaaaaaaagccctcttcggtccgcgcgctgtcaatagttttaccaatcgtgctgctggtctttctgtgtttaggagtgttccttctctggaaaaattggcggctcaagaacattaattcgatcaatttcgacaatcctgtctatcagaaaacgacagaggacgaagtgcacatctgccataaccaggatgggtatagctacccttcgcgacagatggtcagtctggaggacgacgtagca

SEQ ID NO: 16078 - DNA, 2580 bp, synthetic construct
  misc_feature 1..2580: note = source = /note="Description of Artificial Sequence: Synthetic coding sequence"
  source 1..2580: mol_type = other DNA
atgggtccgtgggggtggaaacttcgctggacggtggcactgctgttggcagccgccgggacggccgtcggggaccgctgtgagcggaacgagtttcaatgtcaggatgggaaatgtatttcgtacaaatgggtgtgcgacggatcagctgaatgccaagatggttcggatgagagccaagagacttgcctgtcagtgacttgtaagagcggcgacttttcatgcggaggaagagtgaaccgctgtattcctcaattttggcggtgtgatggccaagtggactgtgataacggaagcgatgagcaagggtgtccccccaagacttgttcgcaggacgaatttagatgccatgatggcaaatgcatttcacgtcaatttgtgtgtgattcggacagggattgtctggacggcagcgatgaagcatcgtgccctgtcctgacttgcgggccggcatcgttccaatgtaacagctcaacctgcattcctcagctctgggcctgcgacaacgatcccgattgtgaggatggatcagatgaatggccacaaagatgcaggggtctgtatgtgtttcagggtgatagcagtccatgttccgcatttgaatttcattgtctgtcaggcgagtgcattcactcgagctggcgttgtgatggaggtcctgactgtaaagataaaagcgatgaggaaaactgtgcggtggcaacttgtcgccccgatgaatttcaatgcagtgatggtaattgtattcatggtagccgtcagtgtgatagggagtacgactgcaaggatatgtccgatgaagtgggttgcgtgaatgtgaccctgtgcgagggccctaacaagtttaagtgtcactccggcgagtgtatcactctggacaaggtgtgcaatatggcgcgcgactgtcgggactggagcgacgagcctattaaggaatgcgggactaacgaatgtctggacaataatggaggctgtagccatgtttgtaacgacctcaaaattggatacgagtgtgattgcccggatgggtttcaacttgtcgcacagcggagatgtgaagatatcgacgagtgccaggatccagacacctgctcacaactttgtgtgaatctggaaggtggttacaagtgtcaatgtgaggaaggattccaactggacccacataccaaggcgtgtaaagcagtgggatccattgcatacctctttttcaccaataggcatgaagtgagaaaaatgactttggatcgttctgagtacacttccttgattcctaaccttagaaatgtggtggcactggacacggaagtcgcatctaacagaatttactggtccgatttgtcccaaagaatgatatgctcgacccagcttgatcgtgcccatggagtgagttcgtacgataccgtgatttcccgagatatacaggcccccgatgggctggccgtggattggatccattcgaacatctactggactgactccgtccttgggaccgtttccgtggcagatactaagggagtcaaacgtaagactcttttcagggaaaatggctccaaaccacgcgccatcgtggtggaccccgtccatgggttcatgtactggactgattggggaaccccagcgaagattaagaagggaggtcttaacggagtggatatctattcgctggtgaccgagaatattcagtggcccaatggaatcactctcgacctgctttccggaaggctgtactgggtggattccaagctgcattccatatcctcaatcgacgtcaacggaggtaaccgtaagactatacttgaggacgagaagagacttgcacatccattttcgctggcggtgttcgaggataaagttttttggaccgatatcattaacgaagccatattctcggcgaatagactgaccggttccgacgtgaaccttctggcagagaacctgctctccccagaggacatggtgcttttccataaccttactcagccgcgcggggtcaactggtgtgaacggaccactctttcaaacggaggctgtcagtacctgtgtttgccggcacctcaaatcaatccacattccccaaagtttacgtgtgcctgccccgacggaatgctccttgctagggatatgcgctcttgcttgactgaagcagaggcagcggtggctacccaggaaacttccactgtgaggctgaaggtttcgtccacggccgtccgaacgcaacacaccaccactcgtccggtgcctgatactagcaggctccctggagccacccctgggcttaccaccgtcgaaattgtgactatgtcgcaccaagcactcggcgatgtcgcaggtcgtggcaatgaaaagaagccatcgtcggtcagagccctgtcgatcgtcctgccaatcgtcctgctggtgttcctgtgcctgggtgtctttcttctttggaagaactggcgactcaagaacataaactccatcaatttcgacaaccctgtctaccagaaaaccactgaggatgaagtccacatctgtcacaatcaggacggttacagctacccttcacgtcagatggtatcccttgaggatgatgtggcc

SEQ ID NO: 16079 - DNA, 2580 bp, synthetic construct
  misc_feature 1..2580: note = source = /note="Description of Artificial Sequence: Synthetic coding sequence"
  source 1..2580: mol_type = other DNA
atgggcccctggggttggaaattgaggtggaccgtggccttgctgctggcggccgcgggcactgctgtgggagatcggtgcgagcgcaatgagttccagtgtcaagacggaaagtgtatcagctacaagtgggtgtgcgacggttccgcagaatgtcaggacggatctgatgaatcacaggaaacgtgcctgtcggttacgtgcaagtcaggagatttctcctgtggcggcagggtgaacagatgcatcccacagttttggcgatgcgatggacaggtcgactgcgacaacggatccgacgagcaaggatgcccacctaagacttgttcgcaggatgaatttagatgccacgacggaaaatgcatttcgcggcagttcgtgtgcgactcagaccgcgattgtttggacggctccgatgaggccagctgcccagtgttgacttgcgggccggcttccttccagtgtaactcgtctacctgtattccgcagctgtgggcgtgcgacaatgatccggattgcgaggacggatcagacgaatggcctcaacggtgtcgcggactctacgttttccagggagattcatccccttgctccgcttttgagtttcactgcctgtcaggagagtgcatccactcttcgtggcgctgtgacggcggtcccgactgtaaggacaagtccgatgaggagaactgcgccgtggcaacttgccggcctgacgagttccagtgctccgacggaaactgcattcacggatcgcggcagtgtgaccgggaatacgattgcaaggacatgagcgatgaagtagggtgcgtgaacgtcactctctgcgaaggccctaataagttcaaatgtcactctggagaatgcatcactctggataaggtgtgcaatatggctcgggattgcagagactggtcggatgaaccgatcaaggagtgcggtaccaatgagtgcctggataacaatggtggatgcagccacgtgtgcaacgatctgaagatcggatacgagtgcgattgccccgatggattccagctggtggcacaacggcggtgcgaggacatcgatgaatgtcaagaccctgacacttgctcccagctgtgcgtgaatctggagggcggatacaagtgtcagtgtgaggaaggattccagctcgacccacataccaaggcgtgtaaggctgtgggctcaattgcgtacctgtttttcacgaaccgccatgaggtccggaagatgactttggatcgcagcgaatatactagcctgatcccgaatctcagaaatgtggtggcccttgatactgaagtggcctcgaaccgcatctattggtccgatctctcgcagcgcatgatatgttccacccagcttgacagggcccatggagtcagcagctacgacaccgtgattagccgggacattcaggcgccagacggactcgctgtcgactggatacactcgaacatctactggaccgattcggtcttgggtacggtcagcgtggcggacactaagggagtgaagcgcaagaccctgtttcgtgaaaacggctccaaaccccgggccatcgtggtggatccagtgcatggcttcatgtactggacggactggggaaccccggccaagattaagaagggcgggctgaacggagtcgacatctactcccttgtcactgagaacatccaatggccgaacggaatcaccctggatttgctgtcgggccggctgtactgggtcgactcaaaactgcactcgatctcctcgatcgacgttaatggggggaatagaaagactatactggaagatgaaaaaaggctggctcaccctttcagcctggcggtctttgaggacaaggttttctggactgacatcatcaacgaagcgatcttctccgcgaaccgcctcaccggatcggatgtgaatttgctcgccgaaaacctgctcagcccggaagatatggtcctgttccacaacctgactcagccgcgcggggtgaattggtgcgagaggaccactctttccaatggcggctgtcagtacctgtgcctgccagcgccgcaaatcaatccgcattctccaaagttcacctgtgcctgtcctgacggaatgctgctggcgagggacatgagatcttgcctgaccgaggcggaagcagcggtggccactcaggaaacttcaactgttcgcctgaaagtctcgtcaaccgccgtgcgtactcagcataccacgactcgcccagtcccggacacttcccgcctgccaggcgcaacgccgggcttgactactgtcgaaattgtcactatgtcccaccaggcactcggagacgtcgcaggccgcgggaacgaaaagaaaccaagcagtgtgcgagcgctgtccatcgtcctgccaatcgtgctcctcgtgtttctctgcctcggtgtgttcctgttgtggaagaactggagactcaagaacatcaactcaatcaattttgataatcccgtgtaccagaaaactaccgaggacgaagtgcacatttgccataatcaggacgggtactcgtacccttccagacagatggtgtcacttgaggacgacgtggcc

SEQ ID NO: 16080 - DNA, 2580 bp, synthetic construct
  misc_feature 1..2580: note = source = /note="Description of Artificial Sequence: Synthetic coding sequence"
  source 1..2580: mol_type = other DNA
atgggaccttggggctggaaactccggtggactgtggcgcttttgcttgccgctgcagggacggccgtgggagatcgctgtgaacgcaacgagtttcagtgtcaggacggaaaatgcataagttacaaatgggtttgcgacggcagtgccgagtgccaagacgggtctgacgagtcccaggagacatgtctcagtgttacctgtaagtcaggcgatttttcctgcggaggacgcgttaaccgctgtatcccccaattctggcgctgtgacggccaagtggattgcgacaacggctccgatgagcaaggttgtcctcctaaaacctgttctcaggatgagtttcgatgccacgacggtaaatgtatctcacgacagtttgtgtgcgactccgatcgggactgtctggacgggtccgatgaggcttcctgccctgtgttgacgtgtggacctgcctccttccaatgtaatagcagtacctgcataccacagctatgggcctgtgacaatgatcctgattgcgaggacgggagcgacgagtggcctcagcgatgccgtggactctacgtgttccagggcgatagttccccatgtagcgccttcgagtttcactgtctgagcggcgaatgtatccattcaagctggagatgtgatggcggtccagattgtaaggacaaatctgatgaggagaactgtgctgtggctacatgtaggcctgatgagtttcagtgtagtgatgggaactgtattcatgggagccgccagtgtgaccgcgaatatgactgtaaagacatgtctgatgaggtggggtgcgtgaatgtgacattatgcgagggtcccaataagtttaagtgtcatagcggcgaatgtatcaccctggacaaagtttgcaatatggcacgcgattgtcgggattggtccgacgagcctataaaagagtgcggcacgaatgagtgcctggacaataacggtggatgttcgcatgtctgcaatgacctgaagattggatatgagtgtgattgccctgacggattccagctggttgcgcagaggcggtgcgaagacattgacgaatgtcaggaccctgacacttgttctcagttgtgcgtcaatctcgaaggcgggtacaaatgccaatgtgaggaaggctttcagctcgatccacacaccaaagcctgcaaagcggtgggatccatcgcctacttatttttcacgaaccgacacgaggtccgtaaaatgactctggatagaagtgagtacactagtcttatccccaatctcagaaacgttgtggctttggatacagaggtcgcttccaataggatttattggtcagatctttcgcagcgcatgatttgttctactcaacttgacagggctcacggcgttagcagttacgatactgtcattagcagagacatccaggccccagacggcctggccgtggactggatacacagcaacatctactggactgatagcgtgttagggactgtatccgtggcagatactaaaggcgtgaagcgcaaaacgctgttcagagagaatggtagtaaaccacgcgcaatcgtcgtcgatccagttcacggttttatgtactggactgactggggcaccccagccaaaattaagaaaggcgggctcaatggcgtggatatttactctttggtgactgagaacatacagtggcctaatggtatcactctcgacctgcttagtgggaggctgtattgggtcgactccaagctgcactctatctctagcatcgacgtgaatggcggtaacaggaaaaccatcctggaggatgaaaagagactcgcccacccttttagcttggccgtcttcgaagacaaggtcttttggactgatataatcaacgaggctattttcagtgccaatcgtctgaccggctccgacgttaacctgctcgccgaaaaccttctctcccctgaggacatggtgttatttcacaacctaacacagcctagaggagtcaactggtgcgagcgcactaccctgtctaacggcgggtgccagtatttgtgcctgcccgcacctcagatcaaccctcacagtcctaagttcacgtgtgcgtgtccggatgggatgttgctcgcaagggacatgcgctcctgtctgacggaggccgaggccgcggttgcaactcaggagacatccactgtgcgcttaaaagtgtctagtactgcagtcaggacgcaacacacaactacccgccctgtgcctgacacatctaggctgcccggcgctacgccaggcctgaccaccgttgaaatagtgaccatgtcccaccaggccctgggagatgtagcgggtaggggcaatgaaaaaaagccatcttccgtcagagcactgagcatcgtactccccatcgttctgctggtgttcctctgcctgggagtgttccttttgtggaaaaactggagattgaagaatatcaacagcatcaacttcgacaatcctgtgtaccagaagacaaccgaagatgaggtccacatatgccacaatcaggacggttactcatatccatcccgccagatggtgagcttggaagacgacgtcgct

SEQ ID NO: 16081 - DNA, 2580 bp, synthetic construct
  misc_feature 1..2580: note = source = /note="Description of Artificial Sequence: Synthetic coding sequence"
  source 1..2580: mol_type = other DNA
atggggccctgggggtggaaacttcggtggacagtggctctgctcctagctgccgctggaacagctgtgggagatcgatgcgagcggaatgaattccagtgccaggatggaaaatgtatcagttataaatgggtctgtgacgggagtgccgaatgtcaggatgggtcagacgaaagtcaggaaacatgcctttctgttacttgtaaatctggagattttagttgcggagggagagtaaaccggtgtatacctcagttctggcgctgtgatggacaggtggattgcgataatggatctgatgagcagggatgcccccctaagacatgttctcaggatgaatttcgatgtcacgatggaaaatgtataagtagacaattcgtttgcgattctgatagagattgcctcgatggatccgatgaagccagttgtccagtgctaacttgtggacctgcatccttccagtgtaactctagtacatgcatcccccagttgtgggcttgtgataacgatcccgattgtgaagatggatcggatgaatggccacagcggtgtaggggactctacgtgttccagggggattcttctccttgctctgcatttgaattccactgcctctcaggggaatgtattcattctagttggcggtgtgatggaggaccagactgtaaagataaatccgatgaagagaactgtgccgtggcaacttgtcggccagatgaattccagtgctccgatgggaactgcatccacgggtcccgacagtgtgatagggagtacgattgcaaagatatgtccgatgaagtagggtgcgtaaacgttacgctctgcgaagggcctaacaaattcaaatgtcattccggagaatgcatcacattagataaagtttgtaacatggctagagattgtagggattggtctgatgaacctataaaagaatgcgggacaaacgaatgccttgataataatggaggatgctcccatgtgtgtaatgatttaaaaatagggtacgaatgcgattgtccagatgggttccagctcgtggcacagcggcggtgtgaagatatcgatgaatgtcaggatcctgatacatgttctcaactatgcgtgaacctcgaaggagggtataaatgccaatgcgaggaagggtttcagctagatcctcacacaaaagcctgtaaagctgttgggtccattgcctatctcttcttcacaaatcgacacgaagttaggaaaatgactctcgatcgcagtgaatacacatcactcattcccaaccttagaaacgtagttgcactggatactgaagtagcctctaatcgaatttattggtcagatctttctcagagaatgatctgttcaactcagctcgatcgggctcatggagtttcctcatatgatacagtcatttctcgagacatccaagcccccgatgggctagctgtagactggatccactctaatatatattggactgattccgttctcggaactgtaagtgtggccgacacaaaaggggtaaaacgcaaaacactctttagggagaatgggtctaaaccccgcgcgattgtggtggatccagtgcacggatttatgtattggactgattgggggactcccgctaagattaaaaaaggggggttaaacggggtagatatctatagtcttgtaacagagaatattcagtggcccaacgggatcacacttgatctgctatctgggaggctttattgggtggattctaaactccactccatatcttccatcgatgtcaatgggggaaatcggaagacaatcctagaggatgaaaaacgccttgcccatccattttcactggctgtcttcgaagataaagtgttctggactgatataattaatgaagccatcttttcggctaaccgattgacaggatcagacgtgaacctactcgcagagaacttactatctcctgaggatatggtgcttttccacaacctcactcagccccgtggggtgaattggtgtgaacgaactactctgtcaaacggggggtgccagtacctatgtctgccagctccccaaatcaaccctcattcccctaaattcacttgcgcctgccccgatggaatgcttctggccagagatatgcggtcctgcctgacagaagctgaagcggctgttgctactcaagaaacatctacggtacgattaaaagtgtcttccacagcagtgaggactcagcatactactacacgccccgtgccagatacttctagattacccggagctactcctgggctgactactgtagaaatagtaacaatgtcccatcaggctcttggagacgttgcaggaagggggaacgaaaaaaaaccctctagtgtgagggccctgtcgatcgtgttacctatcgtactgctagtctttctatgtctaggagtgttcttactttggaaaaattggagactcaaaaacattaactcaattaattttgacaacccagtctatcagaaaacaacagaggacgaagtacacatttgtcacaaccaggacgggtattcctatcccagtaggcagatggtgagtctggaggatgatgtggca

SEQ ID NO: 16082 - DNA, 2580 bp, synthetic construct
  misc_feature 1..2580: note = source = /note="Description of Artificial Sequence: Synthetic coding sequence"
  source 1..2580: mol_type = other DNA
atgggaccatggggatggaaattacggtggacggtcgctctcctcttggctgctgccggtactgcggtgggagaccgttgcgaacggaatgagtttcagtgccaggatggtaagtgcatttcttacaagtgggtatgcgacggatcggctgagtgccaggacgggagtgatgaatcgcaagaaacatgtttatcggtaacttgcaagtcaggagactttagctgtggcgggagagtcaaccgctgcattccccaattctggaggtgcgacggacaggtggactgcgataatggttccgatgagcaaggttgccccccaaaaacgtgctcccaagatgaatttcgttgtcacgatgggaagtgcatcagtcgtcagttcgtgtgtgatagcgaccgcgactgcctcgatggttcggacgaagcctcgtgccctgttttaacttgcgggccggcatcgttccaatgcaactcaagcacatgtattccacagttgtgggcctgcgataatgatcccgactgtgaggacggcagcgatgagtggccacaaagatgccgcgggctgtatgttttccaaggtgattcgagtccgtgctcggccttcgaattccactgcctttccggggaatgcattcatagttcgtggaggtgtgatggcggacccgattgcaaggataagtcagacgaggagaactgcgcggttgctacttgtcgacctgatgagtttcagtgttccgatgggaactgcatccacgggtctaggcaatgtgaccgggagtatgactgtaaggacatgtcagatgaagtcggctgtgtgaacgttacattgtgtgaaggcccgaacaaatttaagtgccattctggtgaatgcatcacattagacaaagtgtgcaatatggcaagagactgcagggattggtctgatgaacccattaaggagtgcggaacgaatgagtgcttggataataatggcggttgtagccacgtctgcaacgacttgaaaatcggttacgagtgtgattgccccgatggtttccagcttgtcgcccaaaggcggtgcgaggatatcgacgaatgtcaggaccctgatacctgctcacaactatgtgtaaatctcgaaggagggtacaagtgccagtgcgaggagggtttccaattggatccgcatacgaaagcgtgtaaggctgtaggtagtattgcgtatttgttcttcacaaaccgacacgaggtacgtaagatgaccctggaccgttcagagtacacgtctttaattccgaatctgcggaatgtcgttgcactcgatactgaagttgcgtctaatcgaatttattggtccgacctgtcccagcgcatgatctgcagcacccagctcgacagggctcatggcgtgagttcgtatgatactgttatttcacgggacattcaggctccagatgggctggcggtcgactggatacactctaacatctactggacagattctgttctaggaactgtgtccgttgctgatacgaagggagtgaagcgcaagacactctttcgggagaatggcagtaaaccacgtgcaattgtcgttgatccggtccacggatttatgtactggaccgattggggcacacccgcaaagatcaaaaaaggcggcttgaacggcgtcgacatatatagcttggtgactgagaatatccagtggcctaacggaattacgctggatttactttctggcagactctattgggtggattcaaagttacatagtatctcctctattgacgttaatggaggcaatcgaaaaactatcctggaggacgagaagcgcctagcccatcctttcagtctagctgtcttcgaagacaaagtcttttggactgatatcattaacgaggcaatattctccgccaatcgtttaaccggttctgacgttaatctcctcgctgagaacctgctctccccagaagacatggtattattccataacctcacccagccacgtggggttaactggtgcgagcgcaccacactatcgaacggaggatgccagtatctctgcttaccggccccgcaaattaatccccacagccccaagttcacgtgcgcatgtcctgatggaatgcttttggcacgagacatgcgaagctgcctaaccgaagcggaagccgcggtggcaacgcaggagacttcaacggttcgtctcaaggtctcctctactgccgtgcgaactcagcacacaactacccggccagtgcctgacacctctcgcctgccgggagccacaccggggttaacaacagtggaaatcgtgaccatgtcccaccaggccctcggcgatgttgcgggtcgtggaaacgagaagaaaccttcgtccgtccgcgcgttgtctatcgttctgcctatcgtcttactagttttcctgtgtctgggcgtcttcctcttgtggaagaattggaggttaaagaacattaactccataaatttcgacaaccctgtctaccaaaagactactgaggacgaagtgcatatttgccacaaccaggacggttacagctacccatccagacaaatggttagcttagaggacgacgttgcc

SEQ ID NO: 16083 - DNA, 2580 bp, synthetic construct
  misc_feature 1..2580: note = source = /note="Description of Artificial Sequence: Synthetic coding sequence"
  source 1..2580: mol_type = other DNA
atggggccttgggggtggaaattgaggtggacggttgccctgctgctggcagccgcggggacggctgtgggagataggtgcgaaaggaatgagttccaatgtcaagacgggaagtgcatttcatacaagtgggtgtgtgatgggtcagcagaatgtcaagacggcagcgacgagtctcaagagacatgtctgagtgtcacctgtaaatctggagacttttcttgtggagggcgtgttaaccggtgcatcccacagttttggcggtgcgatggccaagtcgattgtgacaacgggtcagatgagcaggggtgtccaccaaaaacgtgctctcaagacgaatttcggtgccacgatggaaagtgcatatcccggcagttcgtgtgcgattctgatagagactgcctggacggctcggatgaagcatcctgccccgtgctgacatgcgggcccgcctcttttcagtgcaatagcagtacatgcatcccccagctttgggcatgcgataatgaccccgactgtgaagacggctccgacgagtggccacagaggtgccgaggcctctatgtgtttcaaggagacagttccccttgtagtgcatttgaatttcattgcctttccggagagtgcatacactcttcctggaggtgtgacggcggtcccgactgcaaagacaaaagcgacgaagagaattgtgccgttgccacatgtcgtcccgacgaattccagtgctcggatggcaattgcatccatgggagcagacaatgcgatagagaatatgattgtaaggacatgtcggatgaggttggctgtgttaatgtgactctttgcgagggacctaataagttcaaatgccatagcggggagtgcatcaccctggacaaagtctgtaacatggccagagattgtcgagattggagcgacgaacccattaaggagtgtggtacaaacgaatgcctggataacaacggcggttgttctcacgtgtgtaacgatctgaagattggatacgagtgtgactgtccagacgggttccagctggtagcccagcgccgctgtgaggacattgatgagtgccaggatccagacacttgcagccagttgtgcgttaatctggagggagggtacaaatgtcagtgcgaagagggcttccagttggatccacacactaaagcttgcaaggccgtgggctcgatagcttatttgttttttactaataggcacgaggttcgaaagatgaccctcgatcggagtgaatacacaagtctaattccaaacctccggaacgtggttgctctggacaccgaagtcgctagcaatagaatctactggagtgatttgagtcaacgaatgatatgctccacccagcttgacagagctcacggtgtctccagctatgataccgttatctcaagggacatacaggcccccgatggactcgcagtggattggattcactctaatatctactggaccgactccgtactaggaacggtgtccgtggcagacaccaagggtgttaagcgcaagacactgttcagggagaacggcagtaaacccagggccatagtcgtggacccagtgcacggatttatgtactggaccgactggggcactccagccaaaattaaaaaggggggcctgaacggtgtggacatctactcccttgttacagaaaacatccagtggccaaacggaattactttagatctgttgagtgggagattatattgggtggatagtaagctgcacagtatcagttctattgatgtgaatggagggaaccggaaaacgatccttgaagatgagaagcggctcgcccaccctttttccttggcagtgttcgaagataaggtgttttggacagatattattaacgaggccatcttttctgccaaccgcctaacggggtcagatgtgaatctacttgctgagaatttgctctcaccagaagatatggtgttgtttcataatctcacccagccacgcggcgtaaattggtgcgagaggacgaccctgtccaatggtggatgccagtacctgtgcctgcccgcgccacagatcaatccccactcacccaagtttacttgtgcatgtccagacgggatgctgctagctcgcgacatgcgatcctgtctgacggaggccgaggctgcggtggccacccaggaaaccagtactgttcggctgaaagtgtcctcgacagcagtgcgtacgcagcacaccaccactcggccagttcccgacacttctaggctccctggcgccacccccggactgaccacggtggaaatagttaccatgtcccaccaggctttgggcgacgtggcgggcaggggcaacgaaaagaaaccttctagcgtacgggccctctccatcgtgttgcccatagtcctcttggtattcctgtgtctcggcgtatttttgctctggaagaattggagactcaaaaacatcaactctatcaattttgataaccccgtgtaccagaagaccactgaagacgaggtacacatttgccataatcaagacgggtattcctacccctccagacagatggtgtccctcgaagatgatgttgcc

SEQ ID NO: 16084 - DNA, 2580 bp, synthetic construct
  misc_feature 1..2580: note = source = /note="Description of Artificial Sequence: Synthetic coding sequence"
  source 1..2580: mol_type = other DNA
atgggaccgtggggatggaagctgcggtggaccgtggcgctcctcctggcggcagcaggaacggcagtgggtgaccgctgcgagaggaatgagttccaatgtcaggacgggaagtgcatctcctacaagtgggtgtgcgacggatcggccgaatgccaagacggctcagatgaatcgcaagaaacttgcctgtcagtgacctgtaaatcgggcgatttcagctgtggaggcagagtcaatcggtgtatccctcagttctggagatgtgacgggcaagtggactgcgataacggtagcgacgaacagggatgccctcccaagacttgttcccaagatgaattccggtgtcatgacggcaaatgcatttccaggcagtttgtgtgcgactcagatcgggactgcctggacgggtccgatgaggcttcctgcccggtcctcacctgcgggccggctagcttccaatgcaattcatcgacctgcatcccccaactttgggcatgcgacaacgaccccgattgtgaagatggatcagacgaatggccccagaggtgccgaggactgtacgttttccagggcgactctagcccgtgctcagcgttcgaattccactgcctctcgggagagtgcatccatagttcctggaggtgcgacggtggtccggactgtaaagacaaatccgacgaggagaactgcgcagtggctacgtgccggcccgacgaattccagtgctccgatggtaactgcatccacggaagcagacagtgtgaccgcgagtacgactgcaaggatatgtcggatgaagtgggctgcgtcaacgtgactctgtgcgaaggtccgaacaagtttaagtgccactcgggtgagtgcatcaccctcgacaaggtgtgtaatatggccagagattgtcgtgactggtccgacgaacctatcaaagagtgcggaactaatgaatgcctcgacaacaatgggggatgttcccacgtttgcaatgacctgaagatcggttacgagtgtgactgcccagacggcttccaactggttgcgcagcgccgctgcgaggacatcgacgagtgccaggatccagatacctgcagccagctgtgcgtgaacctcgaaggaggatacaagtgccagtgcgaggaaggattccagttggaccctcacaccaaggcgtgcaaggcagtcgggagcatcgcttatttgttcttcaccaatagacatgaggtgaggaagatgaccctggatcgctctgagtatacgtccctcatcccaaacctgcggaatgtcgttgcattggacaccgaagtggcctccaaccgaatctactggagcgacctctcgcagaggatgatctgctcaactcagctggaccgagctcatggagtgtcgtcttacgatactgttatctcccgggatatccaggctccggatggcctcgccgttgactggatccattcgaacatttactggaccgattccgtgctcggaaccgtctcagtggcggatacgaagggcgtgaagcgcaaaaccctgttcagagagaatggatcgaagccaagagcgattgtcgtcgacccagtgcatggctttatgtactggaccgactggggaaccccagcaaaaatcaaaaagggcgggcttaatggcgtcgacatctacagtctggtcactgaaaacattcaatggccgaatggaatcacccttgacctgctttcgggacgactctactgggtggattccaagctgcactccatctcctcgatcgacgtgaacgggggaaaccgcaagacgattctcgaggacgagaagcggcttgctcacccattctcattggctgtattcgaagataaagtgttttggaccgatatcatcaatgaggcgatcttcagcgcgaaccgcctcactggaagcgatgtgaacctcctggcggaaaatctcctgtcgcccgaggatatggtgctctttcataacctcactcaaccacgcggagtgaactggtgtgagcggacgactctgagcaacggaggttgccagtacttgtgcctcccggctccccagattaatcctcactcccctaaattcacgtgtgcttgtccggacgggatgctcctggcacgcgatatgagatcatgcctcaccgaagcggaagccgcggtcgcaacccaggagactagcactgtgcgcctgaaggttagttccactgcagtccgcacccagcacaccaccactcgccctgtcccggacacctcccgccttcccggggcgaccccaggacttactactgttgaaatcgtgacgatgagccaccaggccctgggcgacgtagccgggcgtggcaacgaaaagaaaccgtcctcggtgcgcgccctgtccattgtgttgcctatcgtgctgctggtattcctgtgcctgggcgtgtttctgctctggaagaattggcggctgaagaacattaactcgatcaactttgataacccggtgtaccaaaaaactactgaggatgaagtgcatatatgtcacaaccaagatggctacagctacccatcgagacaaatggtgtcattggaagatgatgtggcc

SEQ ID NO: 16085 - DNA, 2580 bp, synthetic construct
  misc_feature 1..2580: note = source = /note="Description of Artificial Sequence: Synthetic coding sequence"
  source 1..2580: mol_type = other DNA
atggggccttgggggtggaagctgcggtggactgtcgctctgctgttggcggcggccggcactgctgtgggagatcgttgcgagcgcaacgagttccaatgccaggacggaaaatgcatcagctacaagtgggtctgcgatgggtcagccgaatgccaagacggatccgacgaatcccaagagacttgtcttagcgtcacgtgtaaatccggcgacttctcgtgtggtggccgtgtgaatcgctgcataccccagttctggcggtgtgatggtcaggtggactgtgataacgggtccgatgaacaaggatgtccaccaaaaacgtgctcccaagatgagttccgatgccacgacggaaagtgcatctcgagacaattcgtgtgtgactccgaccgagactgcttggatggctcggatgaagcctcctgccctgtgctcacttgcggccccgcgtctttccagtgcaacagctctacttgtatcccgcagctgtgggcctgtgacaatgacccggactgtgaggacggatcggatgaatggccacagagatgtcgcgggctgtacgtgttccagggggacagctcgccttgctcggccttcgagttccactgcctgagcggagagtgcatccactcctcatggcggtgtgacggaggcccagattgcaaggataagtccgatgaagaaaactgcgccgtggcgacgtgtagacctgacgaatttcaatgctcagatggcaactgcatccacggaagcaggcagtgtgatcgcgaatacgactgcaaagatatgtcagacgaggtgggatgtgtgaacgtgactctgtgcgaaggtcccaacaaattcaagtgccactcgggggagtgcattacgctggataaggtgtgcaatatggcccgggactgcagagactggtctgacgagccaatcaaggaatgcggaaccaacgaatgcctcgacaataacggtggctgctcgcacgtctgcaacgatctgaaaatcggctacgagtgcgattgcccagatggttttcaactcgtggcccaacgcagatgcgaggacatcgacgagtgccaagacccggacacttgctctcaactgtgtgtgaatttggaaggcggatacaagtgccagtgcgaagagggattccagttggatccacacaccaaggcgtgcaaggcggtgggatccattgcctatcttttctttactaacagacatgaagtcaggaagatgactctcgacagaagcgaatacacgtctctgatccccaatctccgcaacgtggtcgcgctggacacggaagtggccagcaatcgcatctactggtcagatctctcgcaacggatgatctgttcgacccagctggatcgcgcccacggagtctcgagctacgacaccgtcatctcgcgggacatccaggcacctgacggactggcagtggattggatccattccaacatttactggactgactctgtcttgggcaccgtgtcggtcgcggacactaaaggagtgaagagaaagaccctgttccgggaaaacggcagcaagcctcgcgcgatcgtggtggaccctgtccacggtttcatgtattggaccgactggggaactccggccaaaatcaaaaagggaggtcttaacggagtggacatttactcgttggtcaccgaaaacatccagtggccgaacgggattaccctggacctgctgtccggtagactttactgggtggatagcaagctccacagcatcagcagcatcgatgtgaacggagggaaccgcaagactattctcgaagatgagaagcggttggcacacccatttagcctcgcggtgttcgaggataaggttttttggacggatatcatcaacgaggcgatcttctccgcaaaccggctgaccggctccgacgtgaatctcctcgccgaaaatctgctctcgccagaggacatggtcctgtttcacaatctgacccaacctagaggggtcaattggtgcgagcgcaccaccctcagcaacggaggatgccagtacctttgtctgccggccccgcagattaatccgcactcgcctaagttcacttgcgcatgccccgatggaatgctgctggccagagatatgcgctcctgtctgactgaagctgaggcggcagtggcaactcaggagacttccaccgtgcgcctcaaagtctcctctaccgcggtgcggacccagcataccactactcgcccggtgccggacacctcccgcttgcctggcgccaccccaggattgactaccgtggaaatcgtgaccatgtcacaccaggctctgggcgatgtggctggtcggggaaacgagaagaaaccctcctccgtgcgggctctgtcgatcgtcctgccgattgtgttgcttgtgttcctgtgtctgggggttttcctcctctggaagaactggcggttgaagaacatcaactcaatcaattttgacaatccggtgtaccagaaaactaccgaagatgaagtgcatatctgtcacaaccaggacggatactcctacccgagcaggcagatggtgtcactcgaggacgatgtcgcg

SEQ ID NO: 16086 - DNA, 2580 bp, synthetic construct
  misc_feature 1..2580: note = source = /note="Description of Artificial Sequence: Synthetic coding sequence"
  source 1..2580: mol_type = other DNA
atgggtccgtgggggtggaagctccggtggactgtggccctgctgctggcagccgctgggactgctgtcggcgacagatgcgaaagaaacgagttccagtgtcaggacggcaagtgtatctcatacaagtgggtctgcgacggcagcgccgagtgccaggacggatcagacgagtcgcaggagacttgcctgagcgtcacttgtaagtcaggagatttctcgtgcggaggtagagtgaatcggtgcatccctcagttctggcgctgtgatggacaggtggactgtgacaatggatccgacgagcaaggatgcccgccaaaaacgtgctcccaagatgagttcaggtgccatgacggaaaatgcatctcacggcaatttgtctgcgattccgatagggattgcctggatggtagcgacgaggcctcttgccctgtgctgacctgcggaccggcctcttttcagtgcaattcctctacttgcattcctcagctctgggcatgcgacaatgatcccgactgtgaggacggatccgacgaatggccgcagcggtgccggggactgtacgtgttccaaggagactcctcaccctgttccgcgtttgagttccactgcctgtccggagagtgtatccattcctcctggcggtgcgatggaggacccgactgcaaggacaagtcggatgaggaaaattgcgcagttgccacttgtcggccggacgagttccaatgctcagacggcaactgtatccacggatcgaggcaatgtgatcgggagtacgactgcaaagatatgtccgacgaagtgggatgcgtgaacgtgactttgtgcgaaggtccgaataagttcaagtgccactcgggtgaatgcattaccctcgacaaagtgtgcaatatggcacgcgactgtcgcgactggtccgatgaaccgatcaaagaatgcggtacgaatgagtgcctcgacaacaacgggggatgttcacacgtgtgtaacgatctcaagatcggttacgaatgcgactgcccggatggctttcagcttgtggcgcagcggaggtgtgaagatatcgatgagtgccaagacccggatacttgcagccaactgtgcgtgaacctggaaggaggatacaagtgtcagtgcgaagaaggttttcagctcgatccacataccaaagcgtgtaaggctgtcggctcgatcgcctacctgtttttcacgaatagacatgaagtgaggaagatgaccctggaccggtcggaatacacttcgctgattccgaacctgagaaacgtggtggccctggacaccgaagtggcctccaaccggatctactggtcagatctgagccaacggatgatctgttccacccaactggaccgagcccacggcgtctcgtcctacgataccgtcatatcgcgggacattcaggcgccggacggactggcggtggattggatccactccaacatctactggaccgattcagtgctgggaaccgtctcggtcgcggacaccaagggcgtgaagcgcaagaccttgttccgggagaatggatcaaagcctcgagccatcgtggtggaccctgtgcacggcttcatgtactggacggactggggaacccctgcaaagatcaaaaaaggtggtttgaatggagtggacatttactcgcttgtgaccgaaaacatacaatggcccaatggcatcaccctggacttgctgagcggccgcctgtactgggtggactccaagttgcattccatctcatcgattgatgtcaacggaggaaacagaaaaaccatcttggaagatgagaagagactggctcatcccttctccctcgctgtctttgaggataaggttttctggaccgacatcatcaacgaagctatcttctcggccaacaggctgaccgggtcggacgtgaacctgctcgccgaaaatctgctgagcccagaagatatggtcctgttccacaacttgactcagccacgcggcgtgaactggtgcgagaggaccactctgtcaaatggaggctgccaatacctctgtctcccggcgccgcagatcaacccgcactcaccgaaattcacctgcgcctgtcctgatggcatgctgctggcccgggatatgcggtcctgcctgacggaggccgaggctgcggtggccactcaggaaacctccactgttcgcctgaaagtgtccagcaccgcagtgcggacccagcatactacgacccggcctgtgccggatacttcgcgcctgcctggagccaccccgggactgacgactgtcgagatcgtgaccatgtcgcaccaagcgctgggtgatgtggccgggaggggaaacgaaaagaaaccatcctcagtcagagcgctgagcatcgtcctccccatcgtgctgctggtgttcctttgcctcggggtctttctgctgtggaaaaactggcggctgaagaatatcaattccattaacttcgacaacccagtctatcaaaagacgaccgaagatgaagtgcacatctgccacaaccaagacggttattcttacccatcacgacagatggtgtctttggaagatgacgtggcg

SEQ ID NO: 16087 - DNA, 2580 bp, synthetic construct
  misc_feature 1..2580: note = source = /note="Description of Artificial Sequence: Synthetic coding sequence"
  source 1..2580: mol_type = other DNA
atgggtccgtggggttggaaactacgttggacggtagcgctactattagcggcggcgggtacggcggtaggtgatcgttgtgaacgaaatgaatttcaatgtcaagatggtaaatgtatatcgtataaatgggtttgtgatggttcggcggaatgtcaagatggttcggatgaatcgcaagaaacgtgtctatcggtaacgtgtaaatcgggtgatttttcgtgtggtggtcgtgtaaatcgatgtataccgcaattttggcgatgtgatggtcaagtagattgtgataatggttcggatgaacaaggttgtccgccgaaaacgtgttcgcaagatgaatttcgttgtcatgatggtaaatgtatatcgcgtcaatttgtatgtgattcggatcgtgattgtttagatggttcggatgaagcgtcgtgtccggtactaacgtgtggtccggcgtcgtttcaatgtaattcgtcgacgtgtataccgcaactatgggcgtgtgataatgatccggattgtgaagatggttcggatgaatggccgcaacgttgtcgtggtctatatgtatttcaaggtgattcgtcgccgtgttcggcgtttgaatttcattgtctatcgggtgaatgtatacattcgtcgtggcgttgtgatggtggtccggattgtaaagataaatcggatgaagaaaattgtgcggttgcgacgtgtcgaccggatgaatttcaatgttcggatggtaattgtatacatggttcgcgacaatgtgatcgtgaatatgattgtaaagatatgtcggatgaagttggttgtgtaaatgtaacgctatgtgaaggtccgaataaatttaaatgtcattcgggtgaatgtataacgctagataaagtttgtaatatggcgcgagattgtcgtgattggtcggatgaaccgataaaagaatgtggtacgaatgaatgtttagataataatggtggttgttcgcatgtatgtaatgatctaaaaataggttatgaatgtgattgtccggatggttttcaactagttgcgcaacgacgttgtgaagatatagatgaatgtcaagatccggatacgtgttcgcaattatgtgtaaatttagaaggtggttataaatgtcaatgtgaagaaggttttcaattagatccgcatacgaaagcgtgtaaagcggtaggttcgatagcgtatctattttttacgaatcgacatgaagttcgtaaaatgacgttagatcgatcggaatatacgtcgctaataccgaatctacgtaatgtagtagcgctagatacggaagttgcgtcgaatcgaatatattggtcggatttatcgcaacgtatgatatgttcgacgcaactagatcgagcgcatggtgtatcgtcgtatgatacggtaatatcgcgagatatacaagcgccggatggtctagcggttgattggatacattcgaatatatattggacggattcggtattaggtacggtatcggttgcggatacgaaaggtgtaaaacgtaaaacgctatttcgtgaaaatggttcgaaaccgcgtgcgatagtagtagatccggtacatggttttatgtattggacggattggggtacgccggcgaaaataaaaaaaggtggtttaaatggtgtagatatatattcgctagttacggaaaatatacaatggccgaatggtataacgttagatctattatcgggtcgtttatattgggtagattcgaaactacattcgatatcgtcgatagatgtaaatggtggtaatcgaaaaacgatactagaagatgaaaaacgtttagcgcatccgttttcgctagcggtttttgaagataaagttttttggacggatataataaatgaagcgatattttcggcgaatcgattaacgggttcggatgtaaatttattagcggaaaatctattatcgccggaagatatggttttatttcataatctaacgcaaccgcgtggtgtaaattggtgtgaacgtacgacgttatcgaatggtggttgtcaatatttatgtttaccggcgccgcaaataaatccgcattcgccgaaatttacgtgtgcgtgtccggatggtatgttactagcgcgagatatgcgatcgtgtctaacggaagcggaagcggcggttgcgacgcaagaaacgtcgacggtacgtttaaaagtatcgtcgacggcggtacgtacgcaacatacgacgacgcgaccggtaccggatacgtcgcgtttaccgggtgcgacgccgggtctaacgacggtagaaatagtaacgatgtcgcatcaagcgctaggtgatgttgcgggtcgtggtaatgaaaaaaaaccgtcgtcggtacgagcgctatcgatagtattaccgatagtattactagtatttctatgtctaggtgtttttctactatggaaaaattggcgactaaaaaatataaattcgataaattttgataatccggtatatcaaaaaacgacggaagatgaagtacatatatgtcataatcaagatggttattcgtatccgtcgcgacaaatggtttcgctagaagatgatgtagcg

SEQ ID NO: 16088 - DNA, 2580 bp, synthetic construct
  misc_feature 1..2580: note = source = /note="Description of Artificial Sequence: Synthetic coding sequence"
  source 1..2580: mol_type = other DNA
atgggcccatggggctggaagctgaggtggaccgtggccctgctccttgccgctgccggaaccgccgtgggtgaccgttgcgagagaaacgagttccaatgccaagacggcaaatgtatttcctacaagtgggtgtgtgatggctctgccgagtgccaggacggctcagatgagagtcaggaaacctgcctgagtgtaacttgtaaatctggtgacttttcatgtggaggcagggtgaacagatgtattccccagttctggcgctgcgatggacaggtcgactgtgataatggcagcgatgagcagggttgcccaccaaaaacttgttcccaagacgaatttcgttgtcacgatggcaagtgcatatcaagacagtttgtctgtgattcagaccgcgattgtctggacggttctgacgaggcaagctgtccagtcctgacatgcggtcctgcttcttttcagtgcaatagctctacatgtattcctcagctctgggcttgtgataacgaccccgattgtgaagacggaagcgacgaatggccacagcgctgccgtggactgtacgttttccaaggtgactcttccccctgctcagctttcgaattccactgtctgtccggcgagtgtatccattcaagctggcgttgtgacggcggacctgactgtaaggataaaagcgacgaggagaattgtgccgtcgcaacttgccgtccagacgaattccagtgctcagatggtaattgtattcatggtagtcgtcaatgcgacagggagtatgactgcaaagacatgtcagacgaagtgggttgcgtgaatgtaaccctctgtgagggacccaacaaatttaagtgtcattctggtgaatgtattacccttgacaaggtctgcaatatggctcgcgattgcagagattggtccgacgagcccatcaaagaatgtggtactaacgagtgtctcgataataatggtggttgctcccacgtttgcaacgacctcaaaatcggatatgagtgcgactgcccagacggcttccaattggtggcacagagacgttgcgaagatatcgacgagtgccaggaccctgacacttgtagtcagctgtgtgtcaacctcgagggcggatacaagtgccaatgtgaggagggtttccaacttgacccacacacaaaggcatgcaaggctgttggcagtatcgcctacctgtttttcaccaatcgccacgaggtgcgtaagatgactctcgatcgttctgaatacactagtcttatccccaacctcaggaacgttgtggccttggatacagaagtagccagcaatcgcatctactggtctgacctgtcacagaggatgatatgctccacccagttggaccgcgcccatggtgtttcctcctacgacactgtcatctctcgtgatatacaggccccagatggacttgccgtggactggatacactctaacatttactggactgattctgtgcttggaaccgtttctgtggccgatactaagggagttaaaagaaaaaccctgtttagggaaaacggcagtaagccacgtgcaattgtggttgatcctgtccacggctttatgtactggaccgattggggcacccctgcaaagattaagaaaggcggtctgaacggcgtagacatctattctttggtgactgaaaacattcagtggcctaatggtattactctggaccttctctccggtaggctctactgggtagacagcaaactgcattccatttcaagcatcgacgtcaacggaggcaacaggaaaaccattctcgaggacgagaagagactcgctcatccattttctcttgctgtgtttgaggacaaagtgttctggaccgatattatcaatgaggccatttttagtgctaacagactgactggtagcgatgtgaacctgcttgctgaaaacttgctctctcctgaggacatggtattgtttcacaatctgacccagccaagaggtgtgaattggtgtgaacgcaccactctgtcaaacggtggatgccagtatctgtgcctgcctgctccacagatcaaccctcactctccaaagtttacatgcgcatgcccagatggtatgctcctcgctagggacatgagatcctgcctcacagaggcagaggctgcagtggcaactcaggaaacttcaaccgtgaggctgaaggtgagctctaccgctgttcgcacacagcacaccacaacacgtcctgtccccgatacttctcgtctcccaggcgccacacctggtttgacaaccgttgaaattgtgactatgtctcaccaggctttgggagatgtagccggccgtggcaatgaaaagaagccctcttccgttcgcgcactgtccatagtgttgcctattgtgctgttggtgtttctctgtcttggtgtgtttctcctgtggaagaattggagactgaagaacattaactcaatcaatttcgataacccagtgtatcaaaagactactgaggacgaagttcacatttgccacaaccaagacggctactcatacccctctcgccagatggtatccctggaagacgacgtggct

SEQ ID NO: 16089 - DNA, 2580 bp, synthetic construct
  misc_feature 1..2580: note = source = /note="Description of Artificial Sequence: Synthetic coding sequence"
  source 1..2580: mol_type = other DNA
atgggaccctggggctggaaactgcggtggactgttgctttgctgttggcggccgcgggaacggccgtgggcgatagatgcgagcggaatgagttccagtgccaagatggaaaatgcatctcatacaagtgggtgtgcgacggatccgccgaatgtcaagacggctcggacgaatcacaagaaacttgcctgtcagtgacttgtaagtccggggacttctcctgcggtggccgggtgaaccgctgcattccacagttctggcgctgcgatggacaagtggactgcgacaatggctcggatgaacagggatgcccaccaaagacctgttcacaggatgaattccgctgccacgatggaaagtgtatctcaaggcagtttgtctgcgacagcgacagggactgcctggacgggagcgacgaagcatcatgtccggtgcttacttgcggacctgccagcttccaatgcaatagctcgacgtgcatccctcagctgtgggcctgtgacaatgatccggattgcgaagatggctcggacgagtggcctcaaagatgcaggggactgtacgtgttccaaggagactcgtccccttgctcggctttcgagtttcattgccttagcggagaatgcattcattcatcctggaggtgtgacggagggccggactgcaaagacaagtcagacgaggaaaattgtgccgtcgcgacgtgcaggcctgacgaattccagtgctcggacggcaactgtatccacggttcccgacagtgcgatagagaatacgactgtaaggacatgtcagacgaggtgggttgcgtgaacgttactctgtgtgagggtcctaacaagtttaagtgccacagcggcgaatgcatcactcttgacaaagtctgtaacatggcgcgagactgcagagactggtccgacgaaccaatcaaagagtgtggcactaatgaatgtcttgataacaacggtggatgctcccacgtgtgcaacgatctgaaaatcgggtacgagtgtgactgtccggacgggtttcagctcgtggcgcaacggcggtgcgaggatatagacgaatgccaggatcctgacacgtgctcacagctctgtgtgaacctcgagggcggatacaaatgccagtgcgaagagggattccagctggacccgcataccaaggcatgcaaggctgtcggctcgatcgcttatctgttctttactaaccgccacgaggttagaaaaatgactctcgaccgctcagagtacacctcgctgataccgaaccttcgcaacgtggtggctctggacactgaagtggcaagcaatcggatctactggtccgatttgtcgcagagaatgatctgctcaacccagctggacagagctcacggcgtatcatcatacgacaccgtgattagccgcgatatccaggcaccggacggcctcgcagtcgactggatccattcgaacatctactggaccgactctgtcctcggaaccgtgtcggtggccgataccaaaggggtgaaacggaaaacgctgtttcgggaaaacggctcgaaaccgcgggccatcgtcgtcgatccggtgcacggattcatgtactggaccgattgggggaccccggcaaagatcaaaaagggcggacttaatggggtggacatctactccctggtgaccgaaaacattcagtggccgaacggaatcactctggatctgctcagcggtcgcctgtattgggtcgactcgaagctgcactccatatcatcaatcgatgtgaatggaggcaacaggaaaaccatcctcgaagatgaaaagaggttggcccatcctttctcgctggccgtgttcgaggacaaggttttctggaccgatatcattaatgaagctatcttctcggcgaaccgcctgaccggaagcgacgtgaacctgctcgcagaaaacctgctgtccccggaggatatggtgctgttccacaatctcacccaaccgcggggtgtgaactggtgcgaacgcaccactctgtctaatggaggatgtcaatacctgtgtttgccggcgccgcagatcaatccacattcgcccaaattcacctgcgcttgcccggatggaatgctgctggcacgcgatatgagatcctgtctgactgaggctgaagccgcagttgccactcaggaaacttcgacggtccgcctgaaggtatcgtcaactgccgtgagaacccagcatacgaccacgcgcccggtccccgatactagtagactgcctggtgccaccccaggacttactaccgtcgagattgtcacgatgtcccatcaggcgctcggcgacgtggccggacgggggaacgaaaagaaaccgtcgtccgtgcgggctctgtcaattgtgctgccgatcgtcctgttggtgtttctctgcctgggggttttcctcctgtggaagaactggagactgaagaacatcaactcgatcaatttcgataatccagtctaccaaaagaccactgaggatgaggtgcacatctgtcacaatcaggacggatactcatacccgtcgcgccagatggtgtcactggaggacgacgtggca

SEQ ID NO: 16090 - DNA, 2580 bp, synthetic construct
  misc_feature 1..2580: note = source = /note="Description of Artificial Sequence: Synthetic coding sequence"
  source 1..2580: mol_type = other DNA
atggggccatggggatggaagctgcgttggacagttgccctacttctcgcagcggcgggaacagcagttggagacagatgtgagcgtaatgaattccagtgccaggatggaaaatgcattagttacaaatgggtctgtgatggcagtgctgagtgccaagacggatcggatgaatctcaagagacgtgccttagtgtcacgtgcaagtctggggacttctcctgtggtggaagagttaatagatgtattccacaattttggcgctgcgatggtcaagtggattgtgacaacggatcagatgaacaaggatgtccacccaaaacatgttctcaggatgaattccgttgtcatgacggaaagtgtatctcgcgccagttcgtgtgcgacagtgatcgagattgtctggatggatctgatgaagcgtcttgcccagttctcacttgcggtccagcatcattccagtgtaattcaagtacatgtatcccacagttgtgggcctgtgataacgatccggattgtgaagatggtagcgacgagtggccacaacgttgtcgcggactttacgtatttcagggagatagttcaccgtgtagtgcttttgaatttcattgtctctctggagaatgcattcacagttcatggagatgcgatggaggtccggactgtaaagataagtcagatgaggagaactgtgctgtggccacctgccgtccggacgagttccaatgtagcgacggtaattgcattcacggatcgagacaatgcgatcgagaatacgattgcaaggatatgtcggatgaagtggggtgtgttaatgttacactttgtgaaggaccaaacaagtttaaatgccattcgggggagtgtatcacattggataaggtctgtaatatggcgcgtgattgtcgtgattggtcagacgaaccaataaaggaatgcggaacgaatgagtgtttggataacaacggtggatgctcccacgtttgcaatgatctgaaaataggatacgagtgtgactgtcctgatggttttcaattagtggcacaaagacgttgcgaagatatcgatgagtgccaagatccagatacatgctcgcaactttgtgtaaatttggagggaggatacaaatgtcaatgtgaagaaggattccaacttgatccacatacaaaggcctgtaaggcagttgggagcattgcataccttttcttcacaaaccgccatgaagttcgaaaaatgacactcgacaggagcgagtatacttcgctgataccgaatctaaggaatgtggttgcgctggacacggaagttgcatccaaccgaatttactggagcgacttgtcacaaagaatgatttgctctacacagcttgatagggcccatggagtgtcatcatatgatactgtcatttcaagagatattcaagcccctgacggactcgcagtggattggattcattcgaatatctattggaccgatagcgtgttgggaaccgtctccgtggccgatactaagggtgttaaaaggaagaccctctttagggagaacgggtctaagccgcgagcaattgtcgttgatcctgtacatggatttatgtactggacagactggggaactccagctaaaataaagaaaggaggtctgaatggagttgatatttactctctggtcacagaaaatatccagtggccgaatggtatcaccttggatttattgagtggcagactttactgggtggactcaaagctccactctattagctcgattgacgttaacggagggaataggaagacaattttagaggacgagaaaagactcgctcacccattttccttggctgtgttcgaggataaagtcttctggaccgacatcatcaatgaagcaattttctccgcaaatcgactgacaggaagtgatgtgaatctgctcgctgagaacttgctctccccagaggacatggtactgttccacaatctcactcaaccacgaggagtaaattggtgcgaacgtactaccctatcgaacggaggatgtcaatatttatgtttgcctgcaccacaaattaacccgcattctccgaagtttacatgtgcttgtccagatggaatgctgttggctagagatatgcgatcctgccttacagaggctgaagctgcagttgcgacgcaggagacaagtacggttcgtctcaaggtctcttcgacagccgttagaacgcaacatactactactagaccagtaccggatacttcacgactcccaggagcaacaccaggtctgaccaccgtggaaattgttactatgtcgcatcaggcattaggtgatgtggctggacgaggaaacgaaaagaagccaagttcagtgcgagcactctctatcgtgctcccaatagtgttgcttgttttcctttgcttgggagtttttctcctttggaaaaattggcgactcaaaaatattaatagcatcaactttgataacccagtctatcagaaaacgacggaagatgaagtccacatttgccataaccaggacggatatagttatccaagccgtcagatggtatcacttgaggatgatgttgct

SEQ ID NO: 16091 - DNA, 2580 bp, synthetic construct
  misc_feature 1..2580: note = source = /note="Description of Artificial Sequence: Synthetic coding sequence"
  source 1..2580: mol_type = other DNA
atgggaccttgggggtggaaactgcgctggactgtggccctccttctggccgctgccggcaccgcagttggcgacagatgtgagcggaacgagttccaatgccaagatggcaagtgcatatcgtacaaatgggtgtgcgatggatcggcagagtgtcaggatggctccgatgagtcgcaagagacttgtctgagcgtgacttgtaagtcgggagatttctcgtgtggaggtcgcgtgaaccgatgtatcccacagttctggagatgcgatggtcaagtcgactgtgacaatgggagcgacgaacaaggttgccctcccaagacctgctcccaggatgaatttcgatgccatgacgggaagtgcataagccggcaatttgtctgcgatagcgatcgggattgtcttgacggcagcgacgaagctagctgtcctgtgttgacctgcggccccgcatcgttccaatgcaattcgtctacctgcattcctcagctgtgggcctgtgataacgatccagattgcgaggacggaagcgacgaatggcctcagcgttgccggggtctgtacgtgttccagggagattcctcgccttgttccgccttcgagttccactgtctttccggcgaatgtatccatagctcgtggaggtgcgatggcggccctgactgtaaggataagtcggacgaagaaaattgtgctgtggcaacctgtcgtcctgatgaatttcagtgttcagacggtaactgcatccacggatcacgccaatgtgatagagaatacgattgcaaggacatgagcgacgaagtcggatgtgttaacgtgaccctctgtgaagggcctaacaagtttaagtgtcattccggtgaatgtattacgctggataaggtgtgcaatatggccagggactgtcgcgactggtccgatgaacctatcaaagaatgcggaactaacgaatgtctggataacaacggaggctgctcgcatgtgtgcaatgatcttaagattggatatgaatgtgactgccctgatggattccagctcgtggcacaacggaggtgtgaagatatcgacgaatgtcaggatccagacacttgctcgcaactgtgcgtgaaccttgaaggaggatacaagtgccagtgcgaggaaggtttccaactggatcctcatactaaagcgtgtaaggcggtcggctccattgcatacctgtttttcactaatagacatgaagtgcgaaaaatgaccctggatcggtcggaatacacctcgttgatccccaaccttaggaacgtcgtggcccttgataccgaggtggcatcaaaccgaatatactggtcggatctgagccaaagaatgatttgctcaactcagcttgatcgagcacatggagtttcctcctacgacaccgtcatttcgcgggacattcaagcaccagacgggcttgcggtggattggatccatagcaacatctactggaccgatagcgtcctgggcaccgtctccgtggcagataccaaaggagtcaagcgtaagactctgtttcgagagaacggaagcaagccgcgagcgattgtggtggatcctgtgcacggctttatgtactggacggattggggtaccccggccaaaatcaagaaggggggcctgaacggagtggatatctatagtcttgtgactgaaaacattcaatggccaaacggaatcactcttgacttgctctcaggacggctctactgggttgactccaagctccactccatttccagcattgacgtgaacggaggaaaccggaaaacgattctggaagatgaaaagcgtctggcacaccctttttcccttgcagtgttcgaggataaagtgttttggacggacattatcaatgaggcgattttctctgcaaacagattgaccggtagcgatgtcaatcttcttgccgagaacctcctttcgcctgaggatatggtcctgttccataacctgacccagcctcgcggcgtgaactggtgtgagagaaccacgctgagcaacggcggatgtcaatacttgtgtctgccagcaccacaaatcaatccccattcaccaaagttcacctgtgcatgccctgatggcatgttgctggcccgggatatgcgctcctgccttaccgaggcagaggccgcagtcgctacccaggaaacgtcaactgtgaggcttaaggtttcgtcgaccgcagtccggactcaacataccaccactcggccagttcccgatacctcgagactgcctggcgccactcctgggttgacgaccgtcgaaattgtgactatgagccaccaagcacttggggatgtcgcaggacgcggtaacgaaaagaaaccatcgtctgtgagagcactgagcattgtgctccctatagtccttctggtgttcctgtgtcttggggtgtttcttctttggaagaactggagacttaagaacatcaactccataaactttgataacccagtctaccagaaaaccacggaggatgaggtgcatatttgccacaaccaggacggttactcatacccttcgcggcagatggtgtcattggaagatgatgtggca

SEQ ID NO: 16092 - DNA, 2580 bp, synthetic construct
  misc_feature 1..2580: note = source = /note="Description of Artificial Sequence: Synthetic coding sequence"
  source 1..2580: mol_type = other DNA
atggggccttggggatggaagctgaggtggacggtcgcccttctcttggctgccgctgggactgccgttggagatcgttgcgaaagaaacgagttccagtgccaggatggcaagtgtatctcatacaaatgggtttgcgacggcagcgctgagtgtcaggacggttcagacgagagccaggagacttgtctctcggttacgtgtaagtcgggtgatttctcttgtggtggacgggtgaaccgttgcatcccgcaattctggcgttgtgacggccaggtggattgcgataatggctccgatgaacagggctgccccccaaagacttgcagccaagatgagttccgatgccacgatggcaagtgcatttccagacagttcgtctgcgacagcgacagagactgtctcgatggaagcgacgaggcgtcgtgccccgtcttgacctgcggccctgcttcgttccagtgcaattcctccacgtgcatcccccagctgtgggcgtgcgacaatgatcctgattgcgaggacggatcagacgagtggcctcaaaggtgtcgcgggctctatgtgtttcaaggcgatagctcgccatgctccgccttcgagttccactgcctgtccggcgaatgtattcatagctcttggcgttgcgacggtggccccgactgcaaggacaaatccgatgaagagaactgtgccgtcgcgacttgccgtcccgacgagtttcagtgcagcgatggtaactgcattcatggttcacgtcagtgcgatcgagagtacgattgcaaggatatgagcgatgaggtcggttgcgtcaatgtaaccttgtgtgagggtccaaacaagttcaagtgccatagtggagagtgcatcactctggacaaggtgtgcaacatggctcgtgactgcagggattggtcggacgagccaataaaagaatgtggaaccaatgagtgcttggacaataacggcggatgctcccacgtatgcaacgatcttaagatcggctacgagtgcgactgtcccgatggctttcaactagtggcccagaggcgctgcgaagatatcgatgagtgccaggatcccgatacctgttcgcagttgtgtgtcaatctggagggcggctacaagtgtcagtgcgaggagggttttcaacttgacccacacactaaggcgtgcaaagccgtgggatccatcgcttacctcttcttcactaacaggcacgaggtcagaaagatgactctggatcggtccgagtatacttcgctcattcctaatctacgcaacgttgtggccctggacaccgaggtcgcctccaacaggatctactggtcggatctctcccagcgtatgatctgtagcacccagctggatcgcgcgcatggtgtctcgtcgtacgataccgtcatctctcgggacattcaggcacctgatggccttgccgttgactggattcatagcaacatttactggaccgattctgtcctcgggaccgtttccgtggccgataccaagggagtcaagcgaaaaaccctctttcgcgagaatggttccaaacctcgtgctatcgttgtcgatcccgtgcatggcttcatgtattggacggactggggtaccccggccaagatcaaaaagggcggcctcaacggtgtggacatctacagccttgtaactgagaacatccagtggcccaatggaattacgctggatctattgagcggacgcctatactgggtcgattcgaagctgcactctatctctagcatcgacgtcaatggcggcaaccggaaaactatcttggaggacgagaagcgcctggctcatcccttctcgctcgccgtgttcgaggacaaagtgttctggaccgacatcatcaatgaagccatcttctccgctaaccgtctgaccggctccgacgtcaatcttctggccgaaaacctcttgtcccccgaggatatggtgctcttccacaaccttacccagccccgcggagtgaactggtgcgagagaacgacactaagtaacggaggatgccagtatctgtgtctacccgcgccccagattaacccccactcccccaagtttacctgtgcctgccccgatggtatgctgttggcacgcgatatgcgctcctgcctgactgaggccgaggccgctgtggcgacccaggagacgtccactgtacgcctaaaagtgtccagcaccgcggttcgaacccaacacaccacgacccgacccgtgcccgatacaagtcgtttgcctggcgcaacaccagggctgaccacagtggagatagtcaccatgtcccatcaggcactgggagacgtcgccggccggggcaacgagaagaagccctcatccgtccgtgccttgtcaatcgtcctccccattgtgttgctggttttcctctgtctgggggtttttctactttggaagaactggcgcttaaagaacattaactccataaacttcgataaccctgtctaccaaaagaccactgaggatgaggttcacatctgccataaccaagatggctactcttatccatcgcgccagatggtgtctctcgaggacgacgtcgcc

SEQ ID NO: 16093 - DNA, 2580 bp, synthetic construct
  misc_feature 1..2580: note = source = /note="Description of Artificial Sequence: Synthetic coding sequence"
  source 1..2580: mol_type = other DNA
atgggaccctgggggtggaaacttcgatggactgtggcactgcttctggccgcggcgggaaccgcagtgggagatcgctgcgaaagaaatgagtttcagtgtcaggatggaaaatgcatctcatacaagtgggtgtgtgatggtagcgctgagtgtcaagatggatcagatgaatcgcaggaaacttgtctgtccgtgacctgcaagagcggtgactttagctgtggcgggcgcgtcaatcggtgtataccacaattctggcggtgtgacggccaagtggactgtgataacgggtcagatgagcagggttgtccaccaaagacttgttcacaggatgaatttaggtgccatgacggaaagtgcatttcccgccagtttgtgtgtgattccgatcgagactgtctcgacggatcggatgaagcatcttgccccgtccttacctgcggaccggcatcatttcagtgcaacagctcaacttgtattccgcaactgtgggcttgcgataatgaccccgactgtgaagatggctcagatgaatggccccagcggtgcaggggcctttacgtgtttcagggtgattcttcgccatgctcggcattcgaattccattgcctctccggtgaatgtattcattcatcatggcgatgtgatggaggcccagattgtaaggataagtcggacgaagagaattgtgccgtggcaacgtgtcgaccagatgaatttcaatgctcagatggaaattgcatacacggttcgaggcaatgcgaccgcgaatacgattgtaaagatatgagcgatgaagtcggttgtgtcaacgtgactctttgtgagggtccgaataagttcaaatgccattcgggcgaatgtattactcttgataaagtttgtaacatggcacgtgattgcagagattggagcgatgaacctatcaaggaatgtgggactaacgaatgtctcgataacaatggaggatgctcgcatgtgtgcaacgaccttaagattggatacgaatgcgattgccctgatggatttcaacttgtggcccagcggcgctgtgaggacatcgatgaatgccaggatcctgacacctgttcccagttgtgcgtgaatctggagggaggttacaagtgtcagtgtgaagagggatttcagctggacccacacactaaggcttgcaaagcggttggatccattgcatacctgtttttcactaaccgacatgaagtgcgtaagatgactctcgatcgcagcgagtacactagccttattcctaacctgcggaacgtagtcgccctggatactgaggtggcaagcaacaggatatactggagcgacctgtcgcagcgaatgatttgctcaacccaacttgatagagcgcatggtgtgtcaagctacgatacggtcatttcgcgcgatattcaagcacctgacggtcttgcagtggattggatccattccaacatttactggaccgactccgtgctgggtaccgtctcggtggctgacaccaaaggggtcaagagaaagactctcttccgcgagaacggttccaagccaagagcaattgtcgtcgatccagttcatggatttatgtactggactgattggggcacgccagccaagataaagaagggaggactcaatggtgtggacatttactcgcttgtgacggaaaacatccagtggccaaacggtataactctggatctgctttcaggcagactctactgggtcgattccaagttgcactcaatctcgtcgatcgatgtgaacggaggtaataggaaaaccattctggaggacgaaaagcggctcgcacatccattctccctggcagtctttgaagataaggtgttctggaccgatatcatcaatgaagcaatcttttccgccaaccgactcactggttcggacgtcaaccttctggccgaaaatcttctgtcccccgaggacatggtgctgttccataacctcactcaacctcgcggagtgaattggtgcgagcgcactactctgtcgaacggtggctgtcaatacttgtgcctccctgcaccacaaatcaaccctcattccccgaagttcacctgcgcatgcccagatggaatgttgctggcaagggacatgagatcctgtttgactgaggccgaggcagccgtcgcaactcaagaaacctccactgtcagactcaaagtctcgtctactgcagtccgcacccagcatactaccacccggccggtgcctgacaccagcagactccctggagcaacccccggactgactactgtcgaaatagtgactatgtcacatcaagcacttggggacgtggcaggacgcgggaacgagaaaaaaccctcctctgtccgcgcactctctattgtgcttcctatcgtccttctggttttcctttgcctgggagtgtttcttttgtggaaaaactggagactgaagaacattaactcgatcaactttgataaccctgtctatcaaaagaccaccgaagatgaagttcatatttgccacaaccaagacggatactcgtacccgtccaggcaaatggtgagccttgaggatgatgtggcc

SEQ ID NO: 16094 - DNA, 2580 bp, synthetic construct
  misc_feature 1..2580: note = source = /note="Description of Artificial Sequence: Synthetic coding sequence"
  source 1..2580: mol_type = other DNA
atgggcccttggggctggaaactgaggtggacagtggcgctgctcctggctgctgccggcaccgccgttggtgacaggtgcgaaaggaatgagttccagtgtcaagatggcaaatgcatcagttataaatgggtctgtgatgggtccgccgaatgtcaggacggcagcgacgagtcgcaggaaacatgtctgagtgtgacctgtaaatcaggagatttcagctgtggcggaagggttaataggtgtatcccacagttttggcgctgcgacggccaggtggattgcgacaacgggagtgacgagcaagggtgtccccccaaaacctgttctcaagacgagttccgatgtcatgacgggaagtgcatctcacgtcagtttgtgtgtgactctgacagagattgcctggatgggagtgatgaggcctcctgtccggtattgacatgtggccccgcgtcattccagtgcaattcttccacctgtattccccagctctgggcctgcgacaacgatccggactgtgaagacggatctgacgaatggcctcagaggtgcagaggactgtacgtttttcagggggattcgagtccatgctcagcattcgagttccactgcctgtcgggtgaatgcatccactccagctggaggtgcgatggggggcctgattgtaaggataaatctgacgaagagaattgtgcggtggcaacctgtaggcccgatgagttccagtgctctgatggcaactgcatacatgggtccagacagtgtgaccgagagtacgattgcaaggatatgtctgatgaagttgggtgtgttaatgtcactctctgcgaggggcccaacaagttcaaatgtcactccggcgaatgcataaccttggataaagtttgcaacatggccagggattgtagggattggtccgatgagccgatcaaggaatgtggaaccaacgagtgcctggataataacggcgggtgctcccacgtatgcaacgatctgaaaatcggctatgagtgcgattgtcctgacggatttcagcttgtagcccagcggcgatgtgaagatatcgacgaatgccaggatccagacacgtgttcccagctgtgtgtgaatctggaggggggttataaatgccagtgtgaggaaggattccagctggatcctcacacaaaggcttgtaaggccgtaggatctatagcttacttgttttttacaaacaggcacgaagttagaaaaatgaccctcgatagatccgaatacacttcccttattccgaatctccggaacgttgttgccctggacactgaagtggcttcaaatcgaatttactggagcgatctcagtcagaggatgatctgcagtacccaacttgacagggcccatggggtgtctagttatgataccgtaatttccagagacatccaggccccagacggtttagcggtggactggattcactcgaatatctactggactgactccgtccttggcaccgtgtccgtggccgataccaagggtgtgaagcgcaaaacccttttcagggaaaatggcagcaagccgcgcgctatcgttgtcgatcctgtacatggattcatgtactggacagactggggtacacccgccaagatcaagaaagggggacttaacggcgtagacatctacagcctcgttaccgagaacattcagtggccgaacggaatcacacttgatctgctgagcggcaggctgtactgggttgattccaaattgcattccatcagtagtattgatgtgaacggaggtaaccgtaaaacaatccttgaagatgaaaagaggctggcgcatcctttttcgttggcagtgtttgaagacaaggtgttctggacagacatcataaatgaagctatcttcagcgccaatagactgacaggtagcgacgtgaacctgctggctgagaacttgctgagcccggaggacatggttctgttccacaatctcactcaacccaggggcgttaactggtgcgaacgaacaaccctgtccaatggtggctgccagtacctctgtttgcctgctccccagatcaacccccatagcccaaagttcacatgcgcttgcccagatggaatgttgctagccagagacatgcgatcgtgcctgacagaggcagaagcggccgtggccacacaggaaacttccactgtgcgacttaaggtgagctccacagccgtacgaacccagcatacgacgactcgccctgtccctgacaccagcaggctgcccggagccacccctggactaactacggtggagatagtaactatgtcacatcaggccctgggcgatgtagctggtcgcgggaacgagaaaaagcccagctctgtgagggccctctcaatcgttttacccattgtgcttttggtgttcttatgtctgggtgtgttcctcttgtggaaaaactggagactgaagaatattaacagtattaattttgataaccccgtttatcaaaagaccaccgaagatgaagtgcacatctgccataatcaggatggctacagttacccgtcacgacagatggtttctctcgaggatgacgttgct

SEQ ID NO: 16095 - DNA, 2580 bp, synthetic construct
  misc_feature 1..2580: note = source = /note="Description of Artificial Sequence: Synthetic coding sequence"
  source 1..2580: mol_type = other DNA
atggggccgtggggatggaaactccgttggaccgttgctctcttgctggctgcggcaggcacggccgtgggcgaccgttgcgaacgcaatgagttccagtgccaggatggtaagtgcatcagctataaatgggtgtgtgatggctccgccgaatgccaggatggctctgatgaaagccaagagacctgcctcagcgtcacctgcaaatctggtgatttttcgtgcggcggacgagtcaataggtgcataccgcagttctggcggtgcgatggccaagtcgactgtgataacggcagcgatgagcagggctgtcctccaaaaacctgctcccaggacgaattccggtgccacgatggaaaatgcataagtcgccagttcgtgtgtgactcggaccgcgattgcctggatggctccgacgaggcgtcgtgtcccgtgctgacatgtgggcccgcttcctttcaatgtaactcctccacctgtataccccaattgtgggcgtgcgacaacgatcccgactgtgaggatggctcggatgagtggccgcaaaggtgccgaggactgtatgtttttcagggcgattcgtctccgtgctcagcgttcgaattccactgcctgtcgggtgaatgcatccactcaagttggcgctgcgacggggggccagactgcaaggataaatcggatgaggaaaattgcgctgtcgcgacatgtaggcccgatgaattccagtgctccgacggaaattgcatccatggcagtcgccaatgcgatcgggagtacgactgcaaagatatgagtgacgaagtgggatgtgtcaacgttaccctatgtgagggtccgaacaagttcaagtgccacagtggcgagtgcattaccttggacaaggtttgtaacatggcgcgagattgcagagactggagtgacgagcctatcaaggagtgtggaacaaacgagtgcttagacaataacgggggatgctcccacgtgtgtaacgacctgaagatcggatatgagtgcgattgtcctgacggtttccagctcgtggcgcagcggcgatgcgaggatattgacgagtgccaagaccctgatacctgttcacagttatgcgtgaaccttgagggtggatataaatgtcagtgtgaggagggctttcagctcgatccccacacaaaagcgtgcaaggccgtgggttccatcgcttacctgttcttcacgaaccgtcacgaggtgcggaaaatgactcttgatagatcggagtatacttcgcttatccctaacttgcgtaacgtcgtggccctggacacagaagtcgcttcgaaccgcatttactggagtgacctctcccaacgcatgatctgcagcacgcaactggatagggcgcatggcgtgagctcctacgataccgtgatctcgagggatattcaggccccggatggcctcgctgtggattggatccactccaacatatactggaccgactcggttttaggcaccgtcagcgtggccgataccaaaggagtaaagcggaagacgcttttcagggaaaacggaagtaagccccgggccatagtggtggatcccgtccacggatttatgtactggacggattggggaactccggctaagatcaaaaagggcggcctgaatggagtggatatctactccctggtgacagagaatatccagtggcccaatggcataactctggatttgctttcgggccgcttgtattgggtggactccaaattacattctatttctagcatcgacgtgaacggtggcaatcgtaagacgatcctggaagatgaaaaacgtctagcgcacccattttcactcgccgtctttgaagacaaggttttttggactgacatcattaacgaagctattttttccgcgaaccgtctcacgggatccgatgtgaatctgctggcagagaatctgctctcgcccgaggatatggtcctgttccataatctcacccagccaaggggagtaaactggtgcgaacgcacgacgctcagcaatggaggctgccagtacctgtgtctgcccgccccccaaataaatccgcattccccaaagtttacgtgcgcctgccctgatggtatgttgcttgcgcgcgatatgcggtcgtgcctgaccgaggcagaggccgcggtggccacacaggaaacgtccaccgtgcgcttgaaggtgagtagtactgcggtgcgcacccagcacacgacaacccgtccggtcccggacacatctcgcttgccgggcgcaaccccgggactgacaacggtggagatagtcactatgtcacaccaggctctgggcgatgtcgcgggtcgagggaatgagaagaagccaagttctgtccgggctctatccattgtgttgccgatcgtgctgcttgtcttcttgtgccttggtgtctttttgctgtggaagaactggcggttgaagaacatcaactccataaatttcgataacccagtttaccagaaaaccactgaagacgaggttcacatctgtcataatcaagatggctactcgtatccgtctcgccagatggtcagcctggaggatgatgttgca

SEQ ID NO: 16096 - DNA, 2580 bp, synthetic construct
  misc_feature 1..2580: note = source = /note="Description of Artificial Sequence: Synthetic coding sequence"
  source 1..2580: mol_type = other DNA
atggggccttgggggtggaagctgcgctggactgtggcattgctgctcgctgcagcgggaaccgcggtgggagatcgatgcgaaaggaatgagtttcagtgtcaagatggcaagtgtatttcgtataagtgggtctgtgatggttcggctgagtgccaagatggatcggatgaatcgcaagaaacgtgcctctcagtgacctgcaagagcggggacttttcgtgcgggggaagagtcaacagatgtatcccgcaattttggcgttgcgatggtcaagttgactgtgacaatggctcggacgaacaggggtgtccccctaagacctgctcccaagatgaatttaggtgtcatgatggaaaatgtatcagccgccaattcgtgtgtgacagcgacagagactgtctggatgggtccgatgaggcttcctgccccgtgttgacctgtgggcctgcctcctttcaatgtaatagctccacctgcataccgcagttgtgggcatgcgacaatgaccctgactgtgaagatggttcggatgaatggccccagagatgccgggggctctacgtattccagggagattccagtccatgctcggcatttgaattccactgtctgagcggagaatgtattcattcatcgtggagatgtgatggcggtcccgattgtaaggataagagcgatgaggagaactgtgcagtggcaacctgtcgtccagacgaatttcaatgttcggatgggaactgcattcatggatcgcgacaatgtgatcgtgagtatgactgtaaggatatgtccgatgaagtgggatgcgtgaacgtgactctttgtgaaggtcccaacaaattcaagtgtcattcgggggagtgtattacgctcgacaaggtctgtaatatggccagggactgtagagattggagcgacgaaccgattaaagagtgtggaacgaacgaatgtctcgataacaatggaggatgcagccatgtgtgcaatgaccttaagattgggtacgagtgtgattgtccagacggttttcaactcgtcgcacaacggcgctgcgaggacatcgatgagtgccaggacccagatacctgctcccagctgtgtgtgaacctcgagggtggctacaagtgtcaatgcgaagaggggttccagctggatccacataccaaagcatgtaaagcggtgggttccattgcctacctgttctttactaaccggcacgaagtgcgcaagatgaccctggatcgttctgaatacactagcctcattcccaaccttagaaacgtggtggccttggacacggaagtggcctccaatcgcatctactggtccgatctttcgcaaagaatgatctgctccacccagctggatcgcgcacatggagtgtcatcgtacgacacggtgatttcacgcgatatccaagcaccagatggccttgcggtcgattggattcacagcaacatatactggactgattcagtgctggggaccgtgtcagtggcagatactaagggagtgaagagaaaaactctgtttcgagagaatgggtcaaaaccaagggcgattgtggtggaccctgtgcacggctttatgtactggaccgattggggtacgccagcaaagatcaaaaagggcgggctcaacggtgtggacatttactcgctcgtgactgaaaacattcagtggccaaacggtattactcttgatcttctgagcggacgcctgtactgggtggattccaagttgcactcgatttcatcgattgatgtcaacggcggaaaccgtaagaccatcttggaggatgaaaagagacttgcccacccattttcgcttgcagtgttcgaggataaggtgttctggaccgacatcataaatgaagccatcttcagcgcaaatcgtctcactggctcggacgtcaaccttcttgctgaaaacctcctttcgcctgaggatatggtgttgttccacaacctgacccagccaagaggcgtcaactggtgtgaaaggaccactctctccaacggaggatgtcagtacttgtgcttgcctgcaccacaaatcaatccgcattccccgaaattcacctgtgcgtgtcctgacggtatgctgcttgcacgggacatgaggtcatgcctgactgaagccgaagcagcagtcgcaacccaggaaacgtccacggtgcgcttgaaggtcagcagcaccgcagtgagaacccagcatactactactagacccgtgcctgatacctcgaggcttccaggagccactccaggcttgaccaccgtggaaatcgtgactatgtcccatcaagcccttggcgacgtggcaggtaggggaaatgaaaagaaaccatcgagcgtgcgagcactttccatcgtccttccaattgtgctcctggtgtttctctgccttggtgtgtttctgctgtggaaaaactggagattgaagaacattaactcaattaactttgacaatcccgtgtaccaaaagaccaccgaagatgaagtgcatatctgtcataaccaagatggatactcgtacccgtcccgccagatggtgtccctggaagatgatgtggca

SEQ ID NO: 16097 - DNA, 2580 bp, synthetic construct
  misc_feature 1..2580: note = source = /note="Description of Artificial Sequence: Synthetic coding sequence"
  source 1..2580: mol_type = other DNA
atgggcccatgggggtggaaactgcggtggactgtggcgctgctcctggcggccgccgggactgcagtgggcgatcggtgcgagcgtaacgaatttcagtgccaagatggcaagtgtatctcatacaagtgggtgtgcgatgggagcgccgaatgtcaagatgggtccgatgaatcccaggaaacttgtctgtccgtgacgtgcaagtcgggagacttcagctgtggaggaagagtgaatcggtgtataccgcagttttggagatgcgatggccaagtcgactgtgataacggatcggatgagcagggatgcccacctaaaacctgttcgcaagatgaatttcgatgtcacgatggaaaatgcatttcgcgacagtttgtgtgcgactccgatcgggactgtcttgatggatccgacgaagcatcatgtccagtgcttacttgcggaccggccagctttcaatgtaatagctccacttgtatccctcaactttgggcatgcgataacgatcctgattgtgaggacggaagcgatgagtggcctcagagatgtagaggactttatgtgtttcaaggagactcctcgccatgtagcgcatttgaattccattgtcttagcggcgaatgtatccattcctcgtggcgatgcgatggcggtccggattgtaaggacaaatctgatgaagagaactgcgctgtggccacttgtcggcctgacgaattccagtgtagcgatggaaactgcattcatggatcacgccagtgtgatcgagaatacgattgcaaagacatgtcagatgaagtcggttgcgtgaatgtgactttgtgtgaaggacccaataagtttaagtgccattccggtgaatgtataacgcttgataaggtgtgtaatatggcaagagactgcagagactggtcggatgaaccaattaaggaatgtgggacgaacgaatgcctcgacaataacgggggctgttctcatgtgtgtaatgatctgaagatcggatacgagtgtgattgccctgatggttttcaactggtcgcccagcggagatgtgaagatatagacgagtgtcaggatccagatacctgttcccaactgtgtgtgaacctggagggtggctataagtgccagtgtgaggagggatttcagctggacccccataccaaggcctgtaaggccgtgggaagcatcgcgtacctcttcttcactaaccgccacgaagttaggaagatgacgcttgaccgcagcgaatatacttccctcattcccaacctgcgcaacgtcgtggcacttgacactgaggtggcatcaaaccgcatatactggagcgatctgtcgcagagaatgatttgttcaactcaactcgatcgcgctcacggtgtgtcaagctatgacaccgtcatttcgcgggatattcaagcacccgacggactggcggtcgattggatccattcaaatatctactggacggactcagtcctggggactgtgtctgtggcagacacgaagggcgtgaagcgcaagactctgtttcgggagaatggttccaagccacgtgccattgtcgtcgatcctgtgcacggattcatgtactggactgactggggcaccccagcgaagataaagaagggtggacttaatggagtcgacatttactcgcttgtcaccgagaacatacagtggccaaatgggataaccctggatcttctttctggtcgtctctactgggtggactcgaagctccattccatttcctcaatcgatgtgaacggtggtaaccgaaagaccattctggaagatgaaaaacgtctggctcatccatttagccttgcagtgtttgaggacaaggtgttttggactgatatcattaacgaggcaattttctcggccaatcgccttacggggtcagatgtgaacctgctggcagaaaacctgctttcgccagaggacatggtgcttttccataatctgacccaacctcgaggtgttaattggtgtgaaaggaccaccctctccaacggaggctgtcaatacctttgtctgcctgcccctcagatcaaccctcattcgcccaagtttacttgcgcatgtccggatggaatgcttctcgctcgggatatgaggtcgtgtttgactgaggcagaagctgcagtggccacccaggaaacgagcactgtcagacttaaggtgagctcgactgcagtccggacccaacatactactacccggccagtgcctgatacctcgcgcctgccgggtgcaaccccagggctcaccaccgtcgagattgtcactatgagccaccaggcgcttggtgatgtggcaggcaggggaaacgagaaaaagccgtcctccgtgcgggcactctccatagtgctgcccatcgtgctgcttgtctttctttgtcttggagtgtttttgctttggaagaactggaggctcaagaacatcaactcgatcaactttgacaacccagtgtaccaaaaaactaccgaagatgaagttcacatttgccacaaccaggatggatactcatacccatccaggcaaatggtttcacttgaggatgatgtggcc

SEQ ID NO: 16098 - DNA, 2580 bp, synthetic construct
  misc_feature 1..2580: note = source = /note="Description of Artificial Sequence: Synthetic coding sequence"
  source 1..2580: mol_type = other DNA
atgggcccgtggggctggaagctccgctggaccgtggcgctcctgctggccgccgcggggaccgcagtgggggaccgctgcgaacggaacgagttccagtgccaagacggaaaatgtatttcgtacaaatgggtgtgtgacgggtctgctgagtgccaggacggctcagatgagtctcaagaaacctgcctgagcgtcacttgcaagtccggcgatttctcctgcggagggagagtgaaccggtgcatcccccagttttggcgctgtgacggccaggtggactgcgacaacggcagcgatgaacaggggtgcccgccgaaaacctgctcccaggatgagtttcgctgccatgatggtaagtgcatcagcagacaatttgtgtgtgattcggatcgtgactgcctcgacggaagcgacgaggcgtcctgtccagtgctcacttgtggacctgcatccttccagtgtaacagctccacctgcattccgcagctgtgggcctgcgacaacgacccggattgcgaggacggatcagacgaatggccccagcggtgccgcggcctgtacgtctttcagggggactcctcgccttgctccgcgttcgaatttcactgcttgtcaggagaatgcatccactcatcctggagatgcgacggaggtcctgactgcaaggacaaatcagacgaagaaaactgcgccgtggctacctgccgcccagacgaattccagtgctccgacggcaactgtatccacgggtcgcggcagtgcgaccgcgagtacgactgcaaagacatgtcggacgaagtcggctgcgtgaatgtgaccttgtgcgaaggaccgaacaagttcaagtgtcacagtggtgagtgcatcactttggataaggtgtgtaacatggcgcgcgattgcagagactggtccgacgaacctatcaaagaatgtggaaccaacgagtgcctggataacaatggcgggtgttcccatgtgtgtaacgatctgaagatcggttacgagtgcgactgtccggacggctttcagctggtggcgcagcgacgctgcgaagatatcgacgaatgtcaggatccggacacgtgctcccagctctgcgtcaatctggagggaggttacaagtgccaatgcgaagagggatttcagctcgatccgcataccaaggcgtgcaaggccgtgggctcgattgcctacctgtttttcacgaaccgccacgaagtgcggaaaatgaccctggatagatccgagtacacctccttgatccccaaccttagaaacgtcgtcgccctggataccgaagtcgcatcaaatcggatctactggtccgacctgtcgcagaggatgatctgctcaactcaactggaccgcgcgcacggagtttcttcgtacgatactgtcatttcgagagacatccaagcgccagatggactggcagtggattggatccactctaacatctactggaccgactcggtcctgggaactgtgtccgtcgccgacaccaagggtgtcaagcggaaaaccctgttccgcgaaaatggatcgaagccgcgcgcgatcgttgttgacccggtccatggattcatgtactggactgactggggaactccagccaagatcaagaagggaggcctgaatggagtggacatatactcgctggtgaccgaaaacatccagtggcctaatggcattactcttgatctgctgtccgggcgcctctactgggtcgactcgaagctgcattccatctcgtcgatcgatgtcaatggaggtaaccggaaaaccatcctcgaggacgagaagcgcctggcgcacccgttcagcctggcggtattcgaggacaaggtgttctggaccgatatcattaatgaggcaatcttctcggcaaacagacttaccggatccgacgtcaacctgctggcagaaaatcttctttcgccggaagatatggtgctgttccacaacctcactcagccacgcggcgtcaactggtgcgagcgcactactctctccaacggaggatgccagtacctttgcctgccagctcctcaaatcaatccacactcgccgaaattcacctgcgcgtgcccagacggcatgctcctggcccgggatatgagaagctgcctgactgaggccgaagcagcggtggcaacccaggagactagcactgtgagactgaaggtgtcgtcgaccgctgtgaggacccaacatactacgactcgtcctgtgccagatacttcccggctgccgggtgccactccggggctgactactgtcgaaattgtgactatgtcccaccaagccctgggcgatgtggccggacgcgggaacgagaaaaaaccttcctcggtgagagcgctgagcatcgtccttcccatcgtcctgctcgtgtttctgtgtctgggcgtctttctgctgtggaagaactggaggctcaaaaacatcaattccatcaattttgataatccggtgtaccagaaaactaccgaagatgaagtgcacatctgccacaaccaagatgggtactcgtacccgagcagacaaatggtgtccctggaggatgatgtggct

SEQ ID NO: 16099 - DNA, 2580 bp, synthetic construct
  misc_feature 1..2580: note = source = /note="Description of Artificial Sequence: Synthetic coding sequence"
  source 1..2580: mol_type = other DNA
atggggccatggggctggaaactgaggtggacagtcgcgcttctacttgcagcggctgggacagcagtgggtgataggtgcgagagaaacgagttccagtgtcaggatgggaaatgcatttcgtacaaatgggtgtgcgatggatcagcagagtgtcaagatggatctgatgagagtcaagagacatgtctctccgtcacttgcaaatcaggggactttagctgcggaggacgcgtcaaccggtgcattcctcagttctggcggtgtgacggccaggtggattgcgacaacgggtctgatgaacaaggatgtcccccaaaaacatgttcacaggacgagttcaggtgccacgatggaaagtgtatttctagacaatttgtgtgcgactcagatagggactgtttggacggaagcgatgaagccagctgccccgttctgacatgtggccctgctagctttcaatgcaacagcagcacctgtattccccaactttgggcctgcgataacgacccagactgtgaggatgggagcgatgaatggcctcaaagatgtaggggtttgtatgtattccagggcgactcgagtccgtgctccgctttcgagttccactgccttagcggcgagtgtatccacagctcatggcggtgcgacggtggacccgattgcaaagacaagagcgatgaagaaaactgtgccgttgctacctgccgccccgatgaatttcaatgctccgatggcaattgcatacatgggtccagacagtgtgatagagaatatgactgtaaagacatgtccgatgaggtgggctgcgtgaacgtgactttgtgcgaaggacccaacaagtttaagtgccatagcggtgaatgcatcacactggataaagtctgcaacatggcaagagattgcagggactggtcagatgagcctattaaagagtgtggaacaaacgaatgtctcgacaacaatggaggctgctctcatgtatgtaacgatttgaaaatcggatacgagtgcgattgtcccgacggctttcaacttgtggcccaacgcaggtgcgaggatatagatgaatgtcaggatccggatacctgcagccagctgtgcgtcaacctggaaggggggtataaatgtcagtgtgaagaaggttttcaactcgatcctcacactaaagcatgtaaggctgtcgggagtatcgcttatcttttttttacgaataggcatgaggtgcgtaaaatgacactggacagaagcgagtatactagccttatcccaaatctgcgcaatgtggtggctttggataccgaggtagccagcaaccgcatatactggtctgacctgtctcaaagaatgatatgctcaacccagctggatagagcacatggagtgtcctcctacgacactgtcatctcaagagatatccaggcacccgacggacttgctgtcgattggatacatagcaacatttactggacagattcagtacttggaacagtctctgtcgcggatacaaaaggagttaagcgcaagaccctgttcagggagaacggctcaaaacctcgcgcaattgtggtggatccggtacatgggtttatgtactggactgattggggaactccagctaagatcaagaaaggcggtctcaatggagttgatatctattctctcgtgaccgagaacattcagtggcctaatggcattaccctcgatttgctgagcggacggttgtattgggtggacagcaagcttcacagcatcagctctatcgacgtaaacggcggcaacagaaaaacaattctggaagatgaaaaaaggctggcccacccattttcgttagctgttttcgaggacaaagtcttttggactgatatcatcaacgaagccatctttagcgctaaccggcttacaggtagcgacgtgaatctgctagccgaaaacctgttgtcacctgaggatatggttctgttccataaccttacacaaccgcggggagtcaactggtgcgagcggactaccttatctaacggaggttgtcaatacttgtgcttgccggccccccagataaacccacacagccccaagttcacttgcgcttgccctgatggaatgctgcttgcaagagatatgaggagctgtctgactgaggctgaggctgcagtggctacccaagagacctccacagttcgactcaaagtcagcagcacggccgtgaggacccagcacacgacgaccaggcctgtgcccgacacatcgcggctccctggcgctacgccaggtctgacaaccgtcgagattgtcacaatgagccaccaggcactgggcgatgttgccggcaggggtaatgaaaaaaagccgtccagtgtgagagcactttctatagtgttacccatcgtattgcttgttttcctctgccttggcgtctttctgctctggaagaactggcggctcaaaaacatcaattcaatcaactttgataaccctgtttatcaaaagacaaccgaagacgaggtgcacatctgtcacaaccaggatggatatagctatccatcccgtcaaatggttagcctggaggatgacgtggca

SEQ ID NO: 16100 - DNA, 2580 bp, synthetic construct; identical to SEQ ID NO: 16076
  misc_feature 1..2580: note = source = /note="Description of Artificial Sequence: Synthetic coding sequence"
  source 1..2580: mol_type = other DNA

SEQ ID NO: 16101 - DNA, 2580 bp, synthetic construct
  misc_feature 1..2580: note = source = /note="Description of Artificial Sequence: Synthetic coding sequence"
  source 1..2580: mol_type = other DNA
atgggtccatggggctggaaactgcgctggactgtagcactgctgctggcagccgcgggcacggcggtgggtgatcgatgtgagcgcaacgagttccagtgccaggatggtaaatgcatttcctacaaatgggtgtgtgatggctccgctgagtgccaggacggcagcgatgaaagccaggaaacctgtcttagcgtcacctgtaaaagcggtgacttttcctgtggcggacgggtcaatcgttgtatcccgcaattttggcgctgtgatggccaagtggactgtgataatgggtctgatgaacagggttgtcctccaaagacctgctctcaagacgaatttcgctgccatgatgggaagtgcatcagccgccagtttgtctgcgacagcgatcgcgactgtctggatggttcagacgaagcttcctgcccagtactgacctgtgggcccgcaagttttcaatgcaattccagcacctgtatcccccagttgtgggcgtgcgacaacgacccagactgtgaggacggtagcgatgaatggcctcagcgctgtagaggtctgtacgtgtttcagggcgattcgtcaccatgctccgcgttcgagtttcattgcctgagcggcgaatgtattcatagcagttggcggtgcgacgggggcccggattgtaaagacaagtctgatgaggaaaactgcgcagtggccacatgtcgcccagacgagttccagtgttccgacgggaactgcatccacggcagccgccaatgcgatcgcgaatacgattgcaaggacatgtcggacgaggtcgggtgcgtaaatgtcactctgtgcgagggccctaacaagttcaagtgccactctggcgagtgtattacgttagataaggtctgcaatatggctagggattgtcgtgactggagcgatgaaccgattaaagagtgcggtaccaatgagtgtttagacaacaatggtggttgctcccacgtgtgtaacgatctgaaaatcggttatgaatgcgattgtccagacggtttccagctggttgcccaacgtcgctgcgaagatatcgatgaatgccaggatccagacacctgctcccagctctgcgtgaacttggagggcgggtacaagtgccagtgcgaggaaggcttccagttagatccacacactaaagcttgcaaggccgtcggttctatcgcatacctgttcttcactaatagacacgaagtgcggaaaatgaccctggatcggagcgagtatacgagcctgataccgaatctgcgcaatgtcgtcgccctggacactgaagtcgcgagcaaccgcatctactggagcgatctgtcacagcgcatgatttgttcaacccaacttgatcgcgcccacggggtgtcaagctatgataccgttatctctcgggacattcaggctccggacggtctggcggtcgactggatccacagcaacatttactggacggatagcgtcttgggtacggtgagcgtggccgacacgaagggcgttaagcgtaaaaccttgttccgcgagaacggcagcaagcctcgcgcaatcgttgtcgaccctgtccacggtttcatgtactggactgattgggggacccctgcaaagattaaaaaaggaggcttgaacggcgtggacatctactctctggtcacggagaatatccagtggcctaacggaattactctggacctgctgagcgggcgcctatactgggttgattcaaagctgcacagcattagcagcattgacgttaacgggggcaaccggaaaacgattctggaagacgagaagaggttggcccaccctttttcacttgctgtgttcgaggataaagtgttttggaccgatatcatcaatgaagcaattttcagcgcgaaccgcctgaccgggagcgacgtcaatctgctagccgagaatctgctgagccctgaagatatggtgctgttccacaatctgacccaaccacgcggtgttaactggtgcgaacgcaccactcttagcaacggcggatgccagtacctgtgcctgcctgctccacaaattaacccacactctccgaaatttacctgcgcttgcccggacggtatgctcttggcccgcgacatgcgctcctgcctgactgaggcggaggccgcggtggctacgcaggagacttctactgtccgcctgaaggtcagcagcactgccgtccggactcaacataccacgacccgcccggttcctgatacttcccgattaccgggtgccaccccgggcctgaccactgtggaaatcgtgacgatgtcacaccaagccctgggggatgtcgctggacgcggtaatgaaaagaagccttccagcgttcgcgctctgagcattgtgctcccgatcgtcctgctggtctttctgtgcctcggggtatttctgctgtggaagaactggcggctgaagaatattaacagcatcaactttgacaatcctgtctaccagaaaacaaccgaggatgaggtccatatctgtcacaaccaggatggttacagctatccttcccgccagatggtttcactggaggacgatgtcgct

SEQ ID NO: 16102 - DNA, 2580 bp, synthetic construct
  misc_feature 1..2580: note = source = /note="Description of Artificial Sequence: Synthetic coding sequence"
  source 1..2580: mol_type = other DNA
atgggaccatggggctggaagctgcgctggaccgtcgcactcctcctggcagcggcaggtaccgcggtcggcgatcgatgtgaacgaaacgaatttcagtgccaagatggcaagtgtatatcatataagtgggtgtgtgatggttcggctgaatgtcaggacggaagcgatgaatcgcaagaaacgtgtctctcggtgacctgtaagtccggcgacttcagctgtggtggaagagtcaacaggtgcatcccccagttctggaggtgtgatgggcaagtggactgcgataatggcagcgacgaacaagggtgtcctccaaaaacctgctcccaggacgaatttaggtgtcatgatggcaaatgtatatcacgtcaatttgtgtgcgactcggaccgagattgcctcgatggatccgatgaagcctcctgtcctgtgctcacctgtggccctgcatcgtttcaatgcaattcatcaacttgtattccccaactgtgggcctgtgataatgacccagattgtgaagatgggtccgacgagtggcctcaacggtgtcgggggctgtacgtgtttcaaggggactcgtcaccctgtagcgcattcgaatttcattgcctttccggtgagtgtatccatagcagctggcggtgtgacggtggaccagactgtaaggataagagcgacgaagaaaactgtgcagtggccacttgtcgcccagacgaattccaatgcagcgatggaaattgcatccatggtagccgccagtgcgatcgcgaatacgattgtaaggatatgtccgacgaagttggatgtgttaatgtcaccctctgcgaagggccaaacaaattcaagtgtcatagcggcgagtgcattaccctggacaaggtgtgtaatatggcaagagactgtagagactggtcggatgagccaatcaaggaatgtggcactaatgagtgtctcgataacaacggaggttgttcgcacgtgtgtaacgatctcaaaattgggtacgagtgtgactgtcctgatggatttcagctggtggcgcaaagaagatgtgaagatatcgatgagtgccaggatcccgatacctgcagccaattgtgcgtgaacctggaaggaggatacaaatgccaatgtgaagagggattccaactggaccctcacaccaaggcctgtaaagcagtcgggtcgattgcatacctgttctttaccaatcgccatgaagtgaggaagatgaccctggatcgatctgaatacacttcgctgattccgaatttgcgtaatgtggtcgcattggataccgaggtggcaagcaaccgaatctactggtcagatttgagtcagagaatgatttgctcgacccagctggatcgagcccatggagtctcctcatacgacactgtgatctcgagggatatccaagcaccagacggtctggcagtggattggatacactcgaacatttactggaccgacagcgtccttgggaccgtgtcagtggctgacactaagggagtcaagcggaaaactctgttccgggaaaacggctcgaagccccgagcaattgtggttgatcccgtccatggattcatgtactggactgactggggcacccccgccaagattaagaagggaggtcttaacggcgtggacatttactcgcttgtcacggagaatattcagtggcctaatggtataaccctggacttgctttccggccgcctttattgggtggattcaaagttgcatagcatctcttcgatagatgtcaacggaggaaaccgcaaaactatcctcgaagatgagaagaggcttgcgcatccattttccctggcagtgttcgaggacaaagtcttttggacggatatcatcaatgaagcgatattctccgcaaaccgacttaccggaagcgacgtcaacctgctcgcagaaaatctgctgagccctgaagatatggtcctgtttcataatctcactcaaccccgcggcgtgaattggtgtgaaaggaccaccctgtccaacggtggctgtcagtacctttgtctgcccgctccacagattaaccctcattcgcctaagtttacctgtgcatgcccagacggcatgctcctggcaagagatatgcgttcctgtctcaccgaagccgaagcagcagtcgcaacccaagaaacttcgactgtgaggctgaaggtatcctcgactgcagtgagaacccagcatactaccactcgcccagtgcctgatacgtcgagactgccaggtgcaactcctgggctgaccactgtggaaatcgtcaccatgtcacatcaggcacttggggatgtggccggccgtggaaacgaaaagaagccttcatcggtccgggctttgtcgattgtgctccctatcgtgctgctggtttttctttgtctcggagtctttctcctctggaagaactggcggctgaaaaacataaacagcattaactttgataaccctgtctaccaaaagactactgaggatgaagtgcatatctgtcataaccaggacggttactcttacccatccaggcaaatggtcagcctggaggatgatgtggcg

SEQ ID NO: 16103 - DNA, 2580 bp, synthetic construct
  misc_feature 1..2580: note = source = /note="Description of Artificial Sequence: Synthetic coding sequence"
  source 1..2580: mol_type = other DNA
atgggaccttgggggtggaaactacgctggaccgttgcactgctgcttgctgctgctggaacagctgtgggagatcggtgcgagaggaatgagttccagtgtcaggacggcaagtgtattagctacaaatgggtgtgtgatgggtctgcagagtgccaggacgggtcggatgagagtcaggagacctgcctatctgtaacgtgcaaaagcggggacttttcttgcggcggaagagtcaaccgttgtattccacagttctggagatgcgacggccaggtcgactgcgataacggctctgacgagcagggctgcccccccaagacttgctcacaggatgagttcagatgtcatgacggaaagtgcatctcacgccagtttgtatgtgatagtgatagggattgcctggacggatctgacgaggcctcgtgcccggttcttacctgcggacctgcctcattccagtgtaattcatcaacttgtatcccacagctgtgggcttgtgacaatgaccctgactgcgaggacggaagtgatgagtggccacagcggtgtcggggtctctacgtatttcagggggatagctctccctgctccgccttcgagtttcactgtctctctggagagtgtatccactctagctggaggtgtgatggcggtcctgactgtaaggacaaatcagacgaggaaaactgtgctgtggcaacctgccgccctgacgagtttcaatgtagtgacgggaactgcattcacggctcccgccagtgtgaccgggagtatgactgtaaagacatgagcgacgaggtcggttgtgttaatgtcactctctgtgaaggcccgaacaagtttaagtgtcatagtggcgaatgcatcacgctagacaaggtgtgtaatatggccagagactgcagagactggtcagatgagccaattaaggagtgcgggaccaatgagtgccttgataacaatggggggtgctcacacgtgtgtaacgatcttaaaatcggttatgagtgcgattgtccagatggttttcagctcgtggcacagcgacgttgcgaggacatcgacgaatgccaggaccccgatacatgttctcagctgtgcgtgaatcttgaaggcggttataaatgtcagtgtgaagagggctttcagctcgacccacataccaaagcctgcaaggccgttggctcaatagcctacctctttttcacaaacaggcatgaagtgaggaagatgacgctggacaggagtgagtacacgagtctgatacccaatctgcggaatgtggttgcactggatacagaggtggcgagcaaccgaatctactggagcgatttgtcacaacggatgatctgctccacccagctcgaccgagcacacggtgtgagctcttacgatacagtcatcagtcgggatatccaggctcctgatggactggcagtcgactggatacattcaaatatctactggaccgactccgtcttggggaccgtgtctgtcgcagacacaaagggcgtgaaacgcaaaaccctttttagggaaaacggctcaaagccccgagcaattgtcgttgatcccgtccatggtttcatgtactggactgattggggtacaccggcaaagataaaaaaggggggactcaacggagtcgatatttattctctggttaccgagaatatacaatggcccaatggcattacactggatctcttaagtggccggctgtactgggtggactctaaattgcacagcattagctctatagacgtgaatgggggcaaccgtaagaccattcttgaggatgagaaaagactggcccacccattttctctagccgtcttcgaggacaaagtcttttggacagatattattaatgaggccattttttctgccaacaggctgactggctccgacgtgaacctccttgctgaaaatctattgagtccggaggatatggtcctgtttcacaacctgacacagccacgtggcgtgaactggtgtgaaagaacgacccttagtaatggcggctgtcaatatctttgtcttccagctccacagatcaatccacactctcctaagttcacctgcgcatgtcctgatggcatgctgctcgcccgcgacatgaggagctgtttgacggaagccgaagcagctgttgcaacccaggagacatccacggtccggctgaaggtaagcagcactgccgtaagaacgcagcacacgaccacacggcccgtgcccgatacgagccggctccctggcgcaactccgggactgactactgttgagatcgttaccatgagtcaccaggctctgggagacgtggctggcagaggtaacgaaaaaaaacccagctctgtgcgcgccctcagtatcgtgttacccatcgtgctcctggttttcctgtgcttaggggtcttcctattatggaagaactggcggctgaagaacatcaacagtatcaacttcgacaatcccgtttatcagaagaccactgaagatgaggtacatatatgccacaatcaggatggatactcctacccttctcgtcagatggtaagtctagaggacgatgtggcc

SEQ ID NO: 16104 - DNA, 2580 bp, synthetic construct
  misc_feature 1..2580: note = source = /note="Description of Artificial Sequence: Synthetic coding sequence"
  source 1..2580: mol_type = other DNA
atgggtccatgggggtggaagctgcgctggactgtagccttactcctagcagcagcagggaccgcggtgggagaccggtgcgagcgcaatgagttccaatgccaagatggtaagtgcatcagttacaaatgggtgtgtgatggttcagccgaatgccaggacggcagtgatgagtctcaagaaacatgcctgtccgtgacatgtaagtcgggggacttcagttgcggcggccgcgtaaaccggtgcattccccaattctggagatgcgacgggcaggtggactgcgacaacggcagcgacgaacagggctgcccacccaagacctgttctcaggatgaattcaggtgtcatgacggcaaatgtattagtcgacaattcgtctgtgactcagatagggattgcctggatggatcagatgaagcatcctgccctgtgctcacatgcggaccagcatctttccaatgtaattcctccacctgcatcccccagctgtgggcgtgcgacaatgaccccgattgcgaggatggcagcgatgagtggccccaacgatgcagaggactgtacgtttttcagggggactccagcccatgcagtgccttcgaattccactgtctgagcggtgaatgcatacattctagctggcggtgcgatgggggtcctgattgcaaggacaaatctgatgaggaaaactgcgcagtagctacctgtcggcctgatgagtttcagtgcagtgatggaaactgcatacatggttctaggcagtgtgatcgcgagtacgattgcaaagatatgtctgatgaggtgggctgcgtgaatgtgacactgtgcgagggtccaaacaagtttaagtgtcatagtggagagtgtataactctcgataaagtgtgcaatatggccagggattgccgcgattggtctgatgagcctatcaaagagtgtggaactaacgagtgtttggacaacaacggtggttgcagtcacgtctgtaacgatttaaaaatcgggtacgaatgtgattgtccagatggcttccagctagttgcccaacgccggtgcgaggacatcgatgagtgtcaagatcctgacacctgttcccagctttgtgttaacttggaaggaggatacaagtgtcagtgtgaagaaggattccaattggacccccacactaaggcctgtaaagccgtcggcagcatcgcatatttgttctttaccaacaggcatgaagtgagaaaaatgactttggatcgctctgagtatacctccttgatacctaacttacggaatgtggtggccttggatacagaagtcgcttctaaccgcatttactggagcgacctcagccagcggatgatttgcagcactcaactggaccgggcgcatggtgtctcctcatatgatacagtgatttcccgcgacattcaggcccccgacggcctggctgttgattggattcactccaacatctattggacagacagcgtgttgggcactgtgtccgttgccgacaccaagggagtcaaaagaaagaccctgttcagggagaatggatctaaaccccgcgccattgttgtagaccccgtccacggtttcatgtactggacagattggggtaccccagccaaaattaagaaaggggggttaaacggtgtggacatttacagcctggtgaccgagaatattcagtggcctaacggcattactcttgatctcctgtctggccgcctctattgggttgattctaaactgcatagtatctcctcaatcgatgtcaatgggggaaaccgcaaaactatccttgaggacgagaaaaggctagctcaccctttctcactggctgtattcgaagataaagtgttttggactgatatcataaatgaagcgattttttccgccaacaggctgacaggaagcgatgttaatcttcttgcggagaatttgctaagccccgaagatatggtgttgtttcataacttaacccagccccgaggtgtcaactggtgcgagaggaccactctttccaatggtggatgtcagtacttgtgtctgccggcgccccagataaatccgcactcacctaagtttacatgtgcgtgccccgacggaatgctgcttgctagagatatgcgatcctgcttaacagaagccgaggccgctgtggccacccaggagaccagtactgtgaggcttaaggtgtcttccaccgccgtacgcacacaacacacaacgactaggccagtgcccgacacgagtagactccctggcgccacaccgggattgaccactgtggagatcgtgaccatgtcacatcaagcacttggagatgtcgcggggcgaggaaacgaaaagaaaccttcatcagtgagagcactgagcattgtcctgcccatcgtactactggtgtttttatgcctgggggtgttcttgctgtggaaaaattggcgcctgaagaatatcaacagcatcaactttgataaccccgtatatcagaaaactaccgaggatgaggtgcacatatgtcataaccaggatggctattcctacccctcccgccagatggtctccttggaggacgatgtcgca

SEQ ID NO: 16105 - DNA, 2580 bp, synthetic construct
  misc_feature 1..2580: note = source = /note="Description of Artificial Sequence: Synthetic coding sequence"
  source 1..2580: mol_type = other DNA
atggggccatgggggtggaaactgcggtggacagttgcgcttctactagctgcggcagggaccgccgttggggatagatgtgagcggaatgagttccagtgccaggatggtaaatgtattagttataagtgggtctgcgatggttcagccgaatgccaggatggtagtgatgaatcccaggagacatgtctcagcgttacatgtaaatccggagatttcagctgcggagggcgggtgaatcgctgtatccctcaattctggaggtgtgatggacaggtcgattgcgacaacggatctgacgaacagggatgcccaccaaagacctgtagtcaagacgaattccggtgccacgacggcaagtgtatctcccggcagttcgtctgtgacagcgatcgggactgcttggacgggtcggatgaagcctcatgccccgtgctgacatgcggcccagcttcctttcagtgtaattcctccacatgtatcccacaattatgggcgtgcgacaacgaccctgattgcgaggacgggtcggatgaatggccccagagatgccggggcctgtacgtgttccagggtgacagcagtccctgctcagccttcgaattccactgtcttagcggcgaatgtattcactcttcctggagatgtgacgggggcccagactgtaaggataagtccgatgaggaaaactgcgccgtggccacctgtcgtcccgacgagttccaatgctccgatggaaactgcatacacggctctagacagtgtgatcgcgaatatgattgcaaggacatgagcgacgaagtgggctgtgtcaatgtgacactctgcgagggccctaacaagtttaaatgccacagcggtgagtgtatcaccctggataaggtctgcaacatggctagagattgccgagactggtctgacgagcctatcaaagaatgcggaaccaacgaatgcctggacaataatgggggatgctcccatgtgtgtaacgacctgaagatagggtacgagtgtgattgccctgatggattccagctggttgcacaaagaagatgtgaggatatcgatgagtgccaggatccagacacctgttcccagctatgcgtgaacctcgagggaggttataagtgccagtgcgaagaaggcttccagctcgacccccatacgaaggcatgcaaagcggtgggcagtatagcttatttgttttttactaataggcacgaggttcgaaaaatgacactggatcgatctgagtatacctcgcttattcctaacctacgcaatgtcgtggctctggacaccgaggtagcttctaaccggatctattggtccgacctatcccagcggatgatctgctccactcagctggatcgcgcacacggtgtctcctcatacgacaccgtgatttctcgggacatacaggccccggacggcttggctgtcgactggatacactcaaacatctactggactgattcagtccttggtacggtgtcagtggcagatacaaagggggtgaagcggaagacactgtttcgggagaatggctccaaacctagagcgatcgtggtggatcccgtccacggcttcatgtactggacggactggggcacaccagcaaaaattaaaaagggtggcctcaacggcgtggacatttactctttggttacggagaacattcagtggcctaatggtatcaccctggacctccttagtggacgcctctactgggtggacagcaagcttcactctattagctccatcgacgtgaatggcggcaacaggaaaactattctggaagatgagaagcgtttggcgcacccctttagcctggctgtgtttgaggataaggtattctggacggatattattaacgaggccatctttagtgcaaaccgcttgacagggagtgacgtgaatcttctggctgaaaacctgctgtcccccgaggatatggtcctgttccacaacttgacacagccaaggggcgtcaattggtgtgaaagaacaacactgagcaatggtggctgtcagtatctgtgcctcccagcgccacaaattaacccacactcacccaaattcacctgcgcctgccccgatggtatgctcctcgcgcgggatatgaggtcatgtctcacagaggcggaagccgcagtggccacacaagaaacctcaactgtgagactgaaggtatcctctacagcagtccgaacacagcacaccacgaccaggccagtgcctgacacttcacggctgcctggagctacccctggcttaactacagtcgaaattgtaaccatgtcacaccaggcgcttggcgacgtcgcggggagaggcaatgagaagaagccctcaagcgtaagagccctcagcatcgtcttgccgatcgtcctgctggtcttcctgtgcctgggagtgtttctcttgtggaagaactggagactaaagaatataaattcaatcaatttcgacaaccctgtgtaccagaagaccacggaggatgaagtgcatatttgccacaaccaggacggatatagttacccaagcagacagatggtgtccctggaagatgacgtcgcc

SEQ ID NO: 16106 - DNA, 2580 bp, synthetic construct
  misc_feature 1..2580: note = source = /note="Description of Artificial Sequence: Synthetic coding sequence"
  source 1..2580: mol_type = other DNA
atgggaccctggggttggaaacttaggtggaccgtcgcactgcttcttgccgcagccggaactgctgtgggtgatcgctgtgaaaggaacgaatttcagtgtcaagatggcaagtgtatctcctacaagtgggtgtgtgatggatccgcagagtgtcaggatggatcagatgaatcccaagaaacttgcctctccgtgacttgtaagtcgggggactttagctgcggtggtcgagtcaatcgatgcatccctcaattctggagatgtgatggacaggtggattgcgataacggatcggacgaacagggatgcccaccaaagacctgtagccaagatgaattcagatgtcatgacgggaagtgtattagccgacaatttgtgtgtgacagcgaccgggattgccttgacggctcagacgaggcctcttgcccagtgctgacttgcggaccggcctcgttccagtgcaactcgtccacctgtattcctcagctttgggcgtgcgacaacgatcctgattgcgaggacggatccgatgagtggccccaacgttgtagagggctctacgtgtttcagggagactcatccccatgctctgcctttgaattccattgtctttccggcgaatgcatccattcctcgtggcgctgcgatgggggacctgattgcaaggataagtcggacgaagaaaactgcgcagtcgcaacgtgccgcccagatgaattccagtgttcagacggtaattgtattcacggctcaaggcaatgcgaccgcgaatacgactgtaaggatatgtccgacgaagtcggttgtgtgaacgttaccctgtgcgagggtcccaacaagtttaagtgccattcgggagagtgtataacccttgataaggtgtgcaacatggcacgggactgtcgggattggtccgatgaacctatcaaagaatgtgggaccaacgagtgtctggacaacaacgggggctgctcgcacgtgtgtaacgatttgaaaattgggtacgaatgcgattgtcctgatggttttcaactcgtcgcacagaggcgctgtgaggacatcgatgagtgtcaggaccccgacacttgctcccaactttgtgtgaatctggaaggtggatacaagtgtcaatgtgaagagggctttcagctggacccacatactaaagcatgcaaagcagtgggttcgattgcatacctgttctttaccaatagacatgaagtccgaaagatgaccttggaccggtcggagtacaccagcctgattccgaatctgagaaatgtggtcgcactggataccgaagtcgcatcaaaccgcatatactggagcgatttgtcgcagaggatgatttgtagcactcagctggacagagcacatggcgtttcgtcatacgataccgtcatttcgagggacatacaggcgcccgatggtcttgccgtggattggattcactcgaatatctactggaccgatagcgtgctgggcacggtgagcgtcgcagacaccaagggtgtcaagcggaaaaccctctttcgcgaaaatggttcaaaaccaagagccatcgtggtggatccagtgcatggatttatgtactggactgattggggaactccagcaaagataaagaaaggtgggctgaatggagttgatatctattcgttggtgaccgagaatatacaatggcctaatggaatcaccctggacctgttgtcaggacggctgtattgggtggattccaagctgcattcgatttcgtccatagatgtgaatggcggtaacaggaaaaccattcttgaagatgaaaagagacttgcgcatcccttttccctcgcagtgttcgaagataaggtgttctggaccgacattatcaatgaggcaatcttttccgcaaaccggctgaccggttcggacgtgaatctgcttgcggaaaacctgttgtcgcccgaggacatggtcctgtttcataacctgacccagccacggggagtgaactggtgcgaacgcactactctttcgaacggaggatgccaatacctctgtctccctgcacctcagattaaccctcatagccctaaattcacttgtgcatgcccagacggtatgctgcttgcaagagatatgagatcgtgcctgacggaggcagaagcagcggttgcaacccaagagacttctactgtgcgactgaaagtcagcagcaccgccgtgcgcacccaacacacgaccacccgccctgtgccggatacctcccgtttgccgggcgcgaccccagggcttaccaccgtggaaattgttaccatgtcacaccaggcgcttggcgatgtcgcgggccggggaaatgagaagaagccttcctcggtgcgcgcgctgtcgattgtccttcccattgtgttgctcgtgtttctttgcctcggagtctttctcctttggaagaactggcggctgaaaaacattaactccatcaactttgacaacccagtctaccaaaaaaccacggaggacgaagtccacatatgtcacaaccaagatggttactcgtacccttcccggcaaatggtttcacttgaagatgatgtggcc

SEQ ID NO: 16107 - DNA, 2580 bp, synthetic construct
  misc_feature 1..2580: note = source = /note="Description of Artificial Sequence: Synthetic coding sequence"
  source 1..2580: mol_type = other DNA
atgggtccgtggggctggaagctgcgttggactgtggctcttctcctggctgccgccggaacggcggttggcgaccgctgcgaaagaaacgaattccagtgccaagacggcaagtgtataagctacaagtgggtgtgcgacggatcggccgaatgtcaggatggatcagacgagtcccaggagacttgcctgagcgtgacctgcaagtccggagacttctcatgcgggggacgggtcaatcggtgcatcccacagttttggagatgcgacggtcaggtggactgcgataatggaagcgacgaacagggctgtcctccaaagacttgttcgcaggacgagtttcggtgtcatgatggaaagtgtattagccggcaattcgtgtgcgattcagacagagattgcctcgacggatccgatgaagcctcctgccccgtgctgacctgcggacctgcgtcgttccagtgcaattcgtcgacctgcatccctcaattgtgggcctgtgacaatgatccggactgcgaagatggctcggatgaatggccacaacggtgccggggcctttacgtgttccaaggggactcatccccgtgctcggcgttcgaattccactgcttgtccggcgaatgcatccactcatcgtggagatgcgatggaggaccggactgtaaggataagtccgacgaggaaaactgcgccgtggcgacttgtagaccggatgagttccagtgttccgatggcaattgcatccacggatcgaggcagtgcgaccgggaatacgattgcaaagacatgtcagatgaagtgggatgtgtgaatgtcactctttgcgaaggccctaacaaattcaaatgccactctggggaatgcatcaccctcgacaaggtgtgcaatatggcgcgggattgcagagattggagcgacgagcctatcaaggaatgtggcactaacgagtgtctcgacaataatggagggtgcagccacgtgtgcaacgacttgaagatcggatacgagtgtgattgcccggacggatttcaactggtcgcccagcgccggtgtgaggatattgatgagtgccaagacccagatacctgctcgcaactgtgcgtgaatctggagggtggatacaagtgccaatgcgaggagggcttccagcttgatccgcacactaaggcgtgcaaagccgtgggatccatagcgtacctgtttttcaccaaccgccacgaagtccgcaagatgaccttggacagatccgaatacacttcactcatcccaaacctgcgaaacgtggtcgccctggacactgaagtggcatcgaacagaatctactggagcgacctgagccaacgcatgatctgctcaactcagcttgatcgcgctcacggcgtgtcaagctacgacaccgtgatctccagagacatccaagcgccggatggactggctgtggactggatccacagtaacatctactggacggattcagtgctgggaactgtctcggtggcagacaccaagggagtgaagcgcaagactctgttccgcgaaaatggctccaagccaagagccattgtggtcgacccagtccatggattcatgtactggaccgactggggaaccccagccaagatcaagaaggggggcctgaatggcgtcgacatttactcactcgtcaccgaaaacatccaatggcctaacggaataaccttggatttgctgagcgggcgcctgtattgggtcgactcgaaactgcattcgatctcgagcatcgatgtgaacggaggaaaccgcaaaaccatcctggaagatgaaaagcgactggcgcatccgttttcgctggccgtgttcgaggacaaagtgttctggaccgacatcatcaacgaggccatcttctccgcgaaccgcctcaccggctcggacgtgaacctcctggcggaaaacttgctctcacccgaagatatggtgctctttcacaacctgactcagccacggggagtgaattggtgcgagcgcaccactttgtcgaacggaggctgtcaatacctttgtttgccagccccgcaaatcaatccgcacagccccaagttcacttgcgcatgcccagacggtatgctcctggcacgcgatatgcgctcctgcttgactgaagccgaagcagccgtggctacccaggaaaccagcaccgtgcgcctcaaggtgtcaagcactgcagttagaactcaacacactaccacgcgccccgtcccggacactagccgtctcccaggcgcgactccgggcctgacgaccgtggaaatcgtgaccatgtcgcatcaggctctcggtgacgtggccgggaggggaaatgaaaagaagccctcgtcggtgcgcgccctgtccatcgtgctcccgattgtcctgctcgtgtttctgtgcttgggcgtgttcctgctgtggaaaaactggcggctgaagaacatcaactcgatcaactttgacaatccggtgtaccagaaaactactgaggacgaggtgcatatctgccacaaccaagacggttactcgtacccgtcgcggcaaatggtgtcgttggaggacgacgtggct

SEQ ID NO: 16108 - DNA, 2580 bp, synthetic construct
  misc_feature 1..2580: note = source = /note="Description of Artificial Sequence: Synthetic coding sequence"
  source 1..2580: mol_type = other DNA
atggggccctggggatggaaactgagatggactgtggccctgctgctcgcggctgctggcactgccgtgggcgacagatgcgagaggaatgagtttcaatgccaggacggcaagtgtattagctacaagtgggtctgtgatggcagtgccgagtgccaggatggctccgatgaatcccaggaaacgtgtttgtctgttacgtgtaaatcaggggacttcagctgtggaggacgagtgaatcgctgcatcccccagttttggcggtgtgacggccaggtcgactgtgacaatggaagcgatgagcaagggtgtccacccaagacctgcagccaggatgagtttagatgtcacgacgggaagtgtatttcaaggcagttcgtgtgtgactccgacagggattgcttggacggtagcgatgaagcatcctgcccagtactgacatgtggacctgcatcatttcaatgtaactctagtacctgcattcctcaactgtgggcctgtgacaacgacccggattgtgaggacggtagcgatgaatggccacagcgatgtcggggactgtatgtgttccagggtgactcctcaccctgttccgcttttgaatttcactgcctgagtggggagtgcatccacagttcctggcgctgtgacggcgggccagactgtaaggataagtctgatgaagaaaactgtgccgtggcaacctgcaggccagatgagttccagtgttctgacggtaactgcatccatggcagtaggcaatgcgaccgggaatacgattgcaaggacatgtccgacgaagtgggttgcgtcaacgtgacattgtgtgaggggccaaacaagtttaaatgccactccggcgagtgcataacccttgacaaggtatgtaatatggccagagactgcagggattggagcgatgaacccatcaaagaatgtgggacaaacgagtgtctggataataatggtggttgcagccacgtgtgtaatgacctcaaaatcggctacgagtgcgactgccccgacggattccagctggtggcccaaaggcgctgtgaggacatcgacgagtgtcaggacccagatacctgctcccagctgtgcgtgaaccttgagggaggctataaatgtcagtgcgaagaaggcttccagctggatccccacacaaaagcctgcaaggccgttgggtctatagcgtacttgttctttaccaatcggcacgaagtgaggaagatgacccttgaccgctctgagtatacctcactgattcccaacctccggaatgtcgtggctctggacacagaagtggctagcaatagaatctactggtcagacctgagccagcggatgatctgctcaacccagcttgacagggcccacggcgtttcaagctacgatacggtgatcagtagagacattcaggcacccgacggtctggccgtagactggatccattctaatatctattggactgatagtgtcttgggcacggtatccgtggccgacaccaagggtgttaaaaggaaaaccttgttccgagagaatgggtctaagccccgagcaatcgtggtcgacccggtgcacggttttatgtactggactgactggggaacgcccgccaagattaagaaaggtggcctgaatggtgtggacatttacagcctggtaactgaaaatatccagtggccgaacggcatcacccttgacctgcttagcgggagactctactgggtggactcaaagctgcacagcataagtagcatagatgtgaatggaggtaatcgaaaaaccatactcgaagacgagaaaagactggcccatcccttttccctggcagtgtttgaagataaagtattctggacagatattattaacgaggccatttttagtgccaataggctgaccggttccgacgtaaatctgctggcagagaatcttttgtctccagaggacatggtgttgtttcataatttgactcagccgcggggcgtaaactggtgcgaacggactaccttgagtaatggaggatgtcagtatctgtgcctgccggccccacagatcaaccctcatagccccaagttcacctgtgcctgtcccgatgggatgctgcttgcccgggatatgcgcagctgcttgactgaagcggaagccgctgtagctactcaggaaacctcaaccgtgaggcttaaggttagttccactgctgtgcgcacacaacacacaactacgcgccccgtgccagatacttctcgcttgccaggtgctacccctggactcaccacagtggagattgtgaccatgtcccaccaggccctcggagacgtcgctggtcgcggcaacgagaagaaaccatcctccgttcgggctctctcaattgttctgccaattgtgctgcttgttttcctgtgcctgggcgtattcctgctgtggaaaaattggcgcctgaaaaatatcaactccatcaatttcgataaccccgtataccagaaaacaacagaggatgaagttcacatatgtcataaccaagacggctacagctatccatccaggcagatggttagtttggaggacgatgtggcc

SEQ ID NO: 16109 - DNA, 2580 bp, synthetic construct
  misc_feature 1..2580: note = source = /note="Description of Artificial Sequence: Synthetic coding sequence"
  source 1..2580: mol_type = other DNA
atgggaccctggggctggaagcttcggtggacagttgccctcttgctggcggcggccgggaccgcagtgggagaccggtgcgagcgcaacgaatttcagtgccaggacggtaagtgtatctcatacaagtgggtctgcgacgggtccgcagagtgtcaagacggctcagatgaaagtcaggagacttgtctttctgttacctgtaagtctggcgacttttcttgcggagggagggtgaacaggtgcatccctcagttctggaggtgcgatggtcaggtcgattgtgataacgggtcggacgagcaggggtgcccaccaaagacgtgttctcaggatgagtttcgctgccacgatggtaagtgcatttcacggcaattcgtttgcgatagtgatagagactgcctcgatggaagtgatgaggcttcttgtcctgtgctgacatgtggccctgcctcttttcagtgcaatagcagcacctgcatccctcagctgtgggcgtgcgataacgacccagattgtgaagatggaagcgatgaatggccccagaggtgtcggggtctctatgtattccagggggattcctccccttgttcagcttttgagtttcactgcctttccggggagtgcatccacagttcctggaggtgcgatggtgggccagactgcaaggacaaaagtgacgaggagaactgtgccgtggcaacatgtcggccagatgagttccagtgctccgacgggaactgtatccacggctctcgccagtgcgatagagaatatgactgtaaggatatgtccgatgaagtgggctgcgtcaatgtgaccctgtgtgaggggccgaataaatttaagtgtcatagtggcgaatgtattacgctggacaaggtctgtaatatggccagagattgccgtgactggtcggacgagccaataaaggagtgtgggacaaacgaatgccttgataacaacggtggatgctcgcacgtctgtaacgatctgaaaattgggtatgagtgcgactgccctgacgggtttcagttggtggctcagcggcgctgcgaggacattgatgaatgccaggacccagacacatgttctcagctgtgtgtgaatctggaaggaggatacaagtgccagtgtgaagagggcttccaactcgatccccacactaaggcttgtaaggccgttggcagtatagcgtacctctttttcacaaatcggcatgaagtgcgtaaaatgacgctggacagatcggagtatacatcgttgattccaaacctccgtaatgttgtggcactggatactgaggttgcatccaaccgcatatactggtctgatttgagccagaggatgatttgttcgacccaattggatcgcgcacacggagtgtcatcgtacgataccgtcatctcaagggatatccaagcacccgatggccttgctgtcgattggatccactccaacatctactggacagattctgtgcttggtacagtgagcgtggccgacaccaaaggagtcaagagaaaaaccctgttccgcgagaacggatcaaagcccagggcaattgtcgtcgatccagtgcatggtttcatgtactggaccgattgggggacccccgcgaaaatcaaaaagggaggactgaacggcgttgacatctacagcctagtgacggaaaacatacagtggccaaatgggatcaccctcgatcttctaagtgggcgtctgtactgggtcgatagtaagctgcattccatctcatctatcgacgttaatggaggcaacaggaagacgattctggaagatgagaaaaggctggcccatccattttctctggccgtgttcgaagataaggtattttggacggacattattaacgaagcgatcttttcggcgaatcggcttacagggtccgatgttaaccttttggccgaaaatctgctgtctcccgaggacatggtgcttttccataacctgactcagccccgaggagtgaactggtgtgaaaggactacattgtccaatggaggctgccaatacctctgtctgccagccccacagataaatccgcacagccctaagttcacttgtgcctgccccgacggtatgctgcttgctagggacatgagaagttgtttaaccgaagctgaggctgcagtggccacacaagagacctcaaccgtgagactcaaagtctcttccaccgcagtgaggacacagcatactaccactcgtccggtgcccgacaccagccgcctccctggcgcgactcccggtctgacaactgtggagattgttaccatgtctcaccaggccctgggggatgtagcgggtcgagggaacgagaagaaaccatcttcagtccgagcactatcaatcgtcctgccaatcgtcctgttggtatttctgtgcctgggagtgtttttattgtggaaaaactggagacttaagaatattaatagcatcaacttcgacaatccggtttaccagaaaacaaccgaggatgaggtccacatttgccacaaccaggatggctactcctacccatcgcggcaaatggtgtcgctggaggacgatgtagcg

SEQ ID NO: 16110 - DNA, 2580 bp, synthetic construct
  misc_feature 1..2580: note = source = /note="Description of Artificial Sequence: Synthetic coding sequence"
  source 1..2580: mol_type = other DNA
atgggaccatggggatggaagctgcggtggactgtggcacttctccttgctgccgcaggcaccgcggtcggtgatcgctgcgagaggaacgagttccaatgccaggatggcaagtgtattagctataagtgggtgtgtgacggttccgcagaatgccaggacggcagcgatgaaagccaagaaacctgtctgagcgtcacttgtaagtcaggtgattttagctgtggaggacgcgtaaatcgctgcatcccacaattttggcggtgcgatggccaagtggactgtgataacggatcggacgaacaaggatgcccacctaagacctgttcccaggacgagtttcgatgccatgatggtaagtgtatttcgagacagtttgtgtgcgatagcgatcgcgattgtcttgatggttccgatgaagcgtcgtgcccagtgcttacgtgtggacctgcctcgtttcagtgtaatagctcaacctgtatccctcaactttgggcctgtgacaatgatcctgattgtgaggacggttcagacgaatggccccagaggtgcagaggactttacgtgttccaaggtgattcctccccctgttcagcattcgaattccactgtctgagcggggagtgcatccacagctcctggcgttgtgatggaggccctgattgcaaggataagtccgatgaggagaactgcgcggtcgcaacctgtagacctgatgaattccagtgttcggatggcaattgtattcatgggtctaggcaatgcgacagagagtacgattgtaaggatatgtcagatgaggtgggttgtgtgaatgttactctgtgcgaagggccaaataagttcaagtgtcattctggtgagtgtatcacgctggacaaggtgtgcaacatggctcgggattgccgcgactggagcgacgaaccaatcaaagagtgcggtaccaatgaatgcctggataacaacggtggatgttcccatgtgtgcaacgatcttaagattggatacgaatgtgactgtcctgacggatttcaattggtcgcacagcggcggtgtgaagatatcgatgagtgtcaggatccggacacttgttcacaactttgtgtgaacctggaagggggatacaaatgccaatgtgaagaaggatttcaactggaccctcacactaaggcctgcaaggcggtgggaagcatcgcttatctgtttttcaccaacagacatgaggtgagaaaaatgactcttgataggtccgagtacacttccctcatccccaacctgagaaatgtggtagcactggacaccgaagtggcttcaaacagaatttactggtccgacctctcccagaggatgatctgctctactcaacttgatcgggcacacggagtctcttcgtacgatactgtgatctcccgggacattcaggcaccggacggtcttgccgttgattggatacattccaacatctattggactgattccgtgctggggactgtgagtgtggctgataccaaaggagtgaagcgcaagactctgtttagggaaaatggctcgaaaccacgcgcaatcgtggtggatccagtgcacggttttatgtactggactgattgggggactcctgcgaagataaagaaaggtggcctgaacggtgtggacatatactcacttgtgaccgagaacatccagtggccgaacggaataactcttgaccttctcagcggacgactttactgggtggactcgaaacttcattcgatatcgtcgattgacgtgaatggaggaaatcgaaagaccattctggaagatgaaaaaagactcgcacacccgttttcgctcgctgtctttgaggacaaggtcttttggaccgatatcataaacgaagcgatattctctgcaaatagacttaccggatcggacgtcaacctccttgcagagaaccttctctccccagaggacatggtgctgtttcacaacctcacccagcccaggggggtgaactggtgtgagcggaccactttgtccaatggtggatgtcagtacctttgtctgcctgcaccacagatcaaccctcactcgccgaaattcacgtgcgcatgccccgatggtatgctccttgcacgtgacatgcgcagctgtcttaccgaggcggaggcagcagtggcgactcaagaaaccagcaccgtgaggttgaaggtgtccagcaccgcggtgaggactcagcataccacgactagaccagtcccagatacctcgagactcccgggcgcaacccctggacttactactgtggagattgtcactatgtcccaccaggccctgggcgacgtggcaggtcgcggtaacgagaaaaaaccatcgtcggtgcgagcactgtcaatcgtgcttccaattgtgctgctggtctttttgtgcctgggggtgtttcttctgtggaagaattggcggctgaagaacattaactcaattaactttgataacccggtctaccaaaagaccaccgaggatgaagtccacatttgtcataaccaagatggatactcgtacccctcacggcagatggtgtcactcgaggacgatgtcgca

SEQ ID NO: 16111 - DNA, 2580 bp, synthetic construct
  misc_feature 1..2580: note = source = /note="Description of Artificial Sequence: Synthetic coding sequence"
  source 1..2580: mol_type = other DNA
atgggaccttgggggtggaagctgagatggactgttgctttgcttctcgcagcagccggcacagctgtcggcgacagatgtgaacgaaacgagttccaatgccaggatggaaagtgcatatcttacaagtgggtttgcgatggatctgcagagtgccaagacggctctgatgagtcccaggagacatgcctaagtgttacctgtaagagcggagacttcagttgcgggggcagagtgaacagatgtatccctcagttctggagatgcgatggacaggtggattgcgataatggcagcgatgaacagggttgtcccccaaagacctgttctcaggatgaatttcgatgccacgatgggaaatgtatcagcagacagttcgtgtgcgattccgacagagattgcctggatggcagcgatgaagcttcttgcccagtcttgacctgcggcccggcctcattccagtgtaactcatccacctgcatcccacagttatgggcttgcgataacgaccctgattgtgaagacgggagcgatgagtggccccagaggtgtagaggcttgtacgtcttccaaggtgactcatccccatgttctgctttcgaattccattgcctcagtggcgagtgcatacatagcagctggagatgcgatggaggacctgactgcaaggataagagtgatgaggagaattgcgcggtagcgacatgccgtcctgacgagttccagtgttcagatggaaactgtattcacggctctcgccaatgtgatagagagtatgattgcaaggacatgagcgatgaagttggctgcgttaacgtgacattatgtgaaggaccaaacaaatttaagtgtcacagcggagaatgcattacactggataaggtctgcaacatggcacgcgactgccgcgactggagtgacgagcctatcaaagaatgcggcactaatgagtgtctcgataacaacggggggtgtagccatgtgtgcaacgatctaaagataggctacgaatgcgactgcccagatggattccagctggttgcacagaggaggtgcgaagatatcgatgaatgccaggatcctgatacctgcagtcagctctgtgttaacttggagggtgggtataaatgtcaatgcgaagagggatttcagctcgacccccatacaaaggcctgcaaggctgtgggctctatcgcctacctgttcttcacaaataggcatgaggtgagaaagatgaccctcgacaggtccgagtacactagcttgataccaaacctgagaaacgttgtggcgcttgacacagaggtcgctagtaatcggatatactggagcgatctgtcacagaggatgatctgtagtacacagctcgatcgggcacacggagtcagtagctacgacacagtgataagccgcgatatccaagcacctgatggccttgcagtggattggatacatagcaacatctattggacagacagtgtgttggggaccgtcagcgtggccgatactaagggagtgaagaggaagacactgttccgtgaaaacggctcgaaaccgagggctatcgtggtcgatccagtacacgggtttatgtactggactgattggggcactcctgcaaaaatcaaaaaagggggactgaacggcgtggatatctacagcctggtcactgaaaacattcagtggccaaatggcatcacactagacctgttgagtggcagactttactgggtcgattccaagcttcacagtatctcttcaattgatgttaatggtggaaatcggaagaccatcctcgaagacgagaagcgactggcccacccctttagcctggccgtattcgaggataaagtcttctggaccgacatcataaacgaagcaattttttccgccaacagactcaccggatccgacgttaatttactagccgagaacctgctgtccccagaagacatggtgctattccataacctgacccagcctcggggggttaattggtgcgaacgcacaaccctcagcaacggcggatgccaatatttatgcctcccagctcctcagattaatccccacagccccaaattcacttgcgcgtgccctgatggaatgcttctggcaagagacatgcggagctgtctcacagaggccgaggctgctgttgctacccaagagacaagcaccgtccgattgaaagtttccagtaccgcggtccggacacaacacactactaccaggcctgtgcccgatacatctcggctgcctggggctacgccagggctaaccactgtcgagatagtcacaatgagccaccaggcattgggcgatgtggcaggccgcggcaatgagaagaaaccgagctccgtcagagcactcagtatcgtcctgcctattgtgctgttagtgttcctgtgtctgggagtcttccttttgtggaagaactggcgtctgaaaaacatcaacagtatcaattttgataacccagtctaccagaagaccacagaggacgaggtccatatttgccacaaccaagatgggtactcctatccgtcccggcagatggtgtctctggaggacgatgtggcc

SEQ ID NO: 16112 - DNA, 2580 bp, synthetic construct
  misc_feature 1..2580: note = source = /note="Description of Artificial Sequence: Synthetic coding sequence"
  source 1..2580: mol_type = other DNA
atgggaccatggggttggaagctgagatggactgtggcgctccttctggcggccgccggtactgcagttggtgacagatgtgaacgcaacgaatttcaatgtcaagacggtaaatgcatttcctacaagtgggtgtgcgacggatcagcagaatgccaggatggttcagacgaatcccaagaaacctgcctgagcgtgacttgtaagtcgggagatttcagctgcggagggcgggtgaatcggtgtatcccccaattttggaggtgcgatggtcaagtggattgtgataatggatcagatgagcagggatgtccccctaagacctgttcacaggacgagtttaggtgtcacgacggaaaatgtatcagcagacaattcgtctgtgattcggatagagattgtctggatggctccgacgaagcatcatgcccagtgctcacgtgtggacctgcgtcgtttcagtgtaactcctctacttgtattccacaactttgggcatgtgataacgatccggattgtgaagatggcagcgatgaatggccacaaagatgccggggactgtatgtgtttcagggagattcgtccccttgttccgcctttgaatttcattgtctttcgggagaatgtattcattcgtcgtggcgatgcgacggtggccctgactgtaaggataagtctgatgaagagaactgtgccgtggcaacttgcagacctgacgagtttcaatgttccgatggaaattgcattcatggttcgagacaatgtgatagagagtacgattgtaaggacatgtcggatgaagtcgggtgtgtgaacgtgacgctgtgtgaaggcccaaacaagttcaaatgccatagcggcgaatgcatcaccctggataaggtttgcaatatggcaagggactgcagggactggtccgacgaacccatcaaggaatgcggaaccaatgagtgcctggacaacaacggtggatgttcgcatgtatgcaacgacctcaagattgggtacgaatgtgactgtcccgatggcttccaactggtggcacaaagaagatgcgaggatattgacgaatgtcaagacccagatacctgcagccaactttgtgtgaaccttgagggaggatacaagtgtcagtgtgaagaaggttttcaattggatccacacaccaaggcgtgcaaggcagtaggttcaattgcctacctgtttttcaccaatcggcatgaagtcaggaagatgacgctggatcggtcggagtatacctcccttatccctaaccttagaaacgtggtggcacttgataccgaggtggcctcaaacagaatatactggtcggatctgtcgcagcggatgatttgctccactcagcttgaccgggcacacggggtcagctcctacgatactgtcatttcaagggacatccaagcacctgacggtctggcagtggactggattcactccaacatttactggacggactcggtcttgggaactgttagtgttgccgatactaaaggggtgaagcgcaaaaccctgtttcgggaaaacgggagcaagccgcgcgccattgtcgtggaccctgtgcatggattcatgtactggaccgactgggggaccccagctaagatcaagaaagggggacttaatggagtggatatctacagccttgtgacggaaaacattcagtggcctaatgggattacccttgatctgctgtccggccgcctgtactgggtcgattcaaaactgcattcaatttcctcgatcgatgtaaatggtgggaataggaaaactattctggaggatgagaaaagacttgctcatccctttagcctggccgtgtttgaagataaggtattctggaccgatatcataaatgaagcaatcttcagcgccaaccgccttactggttcggacgttaatcttcttgctgaaaacctgctgagccctgaagatatggtgctcttccacaacctcacccagcctagaggtgtgaattggtgtgaaagaactaccttgagcaatggaggttgtcaatacctctgtctccccgctcctcagattaatccacattcaccgaaattcacttgtgcctgtccggacggcatgctccttgcgagagatatgagaagctgtttgactgaggccgaggcagctgtggcaacccaggaaacgagtactgtgagactgaaagtttccagcactgcagtgagaacccagcataccactacccgtcctgtccctgacacttccaggcttcctggcgcaaccccaggcctcaccaccgttgagattgtgaccatgtcgcaccaagcactcggtgatgtggctggccgcggcaacgaaaagaagccttctagcgtgcgtgccttgtcgattgtgctgcccattgtcctgctcgtgtttctgtgtcttggtgtgttccttttgtggaagaactggaggttgaaaaacataaactccatcaatttcgataaccctgtgtaccagaaaactacggaggacgaagtgcacatctgccataaccaggatggatacagctaccctagcagacagatggtcagccttgaggatgacgtggca

SEQ ID NO: 16113 - DNA, 2580 bp, synthetic construct
  misc_feature 1..2580: note = source = /note="Description of Artificial Sequence: Synthetic coding sequence"
  source 1..2580: mol_type = other DNA
atggggccctggggttggaaactgcggtggactgttgcccttctgctagctgctgcaggcaccgccgtgggggacagatgcgaacgcaatgaatttcagtgccaggatgggaagtgcatatcctataaatgggtttgtgacggcagcgcagagtgccaggacggtagcgacgaatcacaagaaacctgcctgagtgtcacctgcaaaagcggggactttagttgtggcggacgtgtcaacaggtgcattccccagttctggcggtgcgacgggcaggtggactgcgataacggatctgatgagcagggatgtccccccaagacttgctctcaggatgagtttcggtgccatgacggcaaatgcatatccagacagttcgtgtgcgattctgatcgagattgtctggatgggtcggatgaggcctcctgccccgtgctgacgtgtggtccagcatccttccagtgcaactcttcgacatgtatcccacagctgtgggcgtgcgacaacgatcccgattgcgaggatggttctgacgagtggccccagcgttgtcggggcctctacgttttccaaggcgattcttccccgtgtagcgcattcgagtttcactgcctctctggggaatgcatccactccagttggagatgcgacggcggacctgattgcaaagacaagagcgacgaggagaattgcgcggtcgcaacctgtaggcctgatgagtttcaatgctcagacggaaattgtattcacggaagtcggcagtgtgaccgcgaatatgactgtaaagatatgtctgatgaggtagggtgtgtgaacgtaacactgtgcgagggacctaacaagttcaaatgccactcgggggaatgtatcaccttggacaaggtttgcaacatggctagggattgtcgggattggagtgacgagcccatcaaggagtgcggaacaaatgagtgcctggataacaacggtggatgcagtcatgtgtgcaatgacctgaagatcggctatgagtgcgattgtccggatgggtttcagctcgtggcccaacgacgttgcgaagacatagacgagtgtcaggatccagatacttgctcccaattatgtgtcaatctagagggaggctataagtgtcagtgcgaggagggcttccagctggaccctcatacgaaggcctgcaaagctgtcggatccattgcgtacctgttcttcaccaaccgtcacgaagtccgaaagatgactctcgataggagtgaatacaccagcctaattcctaacctgaggaatgtcgtggcactggacaccgaggtggcctcgaatcgcatttactggagcgacctgagtcaacgtatgatctgcagtacccaactggatagggcacatggagtttcatcatatgatactgttatctcgagagacattcaggcacccgacggcctggcggtggactggatccatagcaatatctactggacagacagtgtgctggggaccgtatcggtggccgacacaaaaggagtgaagcgtaaaaccctgttcagagaaaatgggagtaagcccagggccatcgttgtggaccctgtacacggcttcatgtactggacagattggggcacacccgcaaaaatcaaaaagggtggactcaatggcgtcgacatatactctttggtaaccgagaatatccagtggccaaatggcatcaccttggaccttttatctggccggctctattgggtggattctaaactgcattctatcagcagtatcgacgtaaatggaggcaatcgcaagactatcctcgaagatgaaaaacgactagcccatccattctcactggctgtgtttgaagacaaggttttttggactgatattattaatgaggccatcttcagtgccaaccgcctaaccgggagcgatgtgaatttgttggccgaaaatttactgtcccctgaggacatggttctctttcataatctgacccagcctaggggcgtgaactggtgtgagcgcacaacactaagcaacggagggtgtcagtatctctgcctgccagccccacagattaacccacatagtccaaagtttacctgcgcttgtcctgacggcatgctgctggcccgggatatgagatcatgtttgaccgaggctgaggctgcggtggcaacgcaagagacaagtaccgtacgtctgaaggtttctagcaccgccgtacggacacaacacaccactactaggcccgtccctgacacctcccgactgcctggtgctaccccgggacttactacggttgaaatagtcactatgtcgcaccaggcactgggcgacgttgccggccggggtaatgaaaagaaaccgtcatccgtgagggcactgtcgattgtgctgcctatcgttctactggtgttcctgtgtttgggggtgttcctgctatggaaaaattggcgcctgaaaaacattaactccatcaacttcgataatcctgtatatcaaaagaccaccgaagacgaagtacacatatgtcacaatcaggatggttacagctacccaagtcggcagatggtgtcactcgaagatgacgtggcc

SEQ ID NO: 16114 - DNA, 2580 bp, synthetic construct
  misc_feature 1..2580: note = source = /note="Description of Artificial Sequence: Synthetic coding sequence"
  source 1..2580: mol_type = other DNA
atgggaccttgggggtggaagctgcggtggaccgtggcgctgctccttgccgccgcggggactgccgtcggggatcgctgcgaacgcaatgaattccagtgccaagatggaaagtgtatctcctacaagtgggtgtgcgacgggtccgccgaatgtcaggatggttcagacgagtcacaggaaacctgcctgtccgtgacttgtaagtcaggagatttctcgtgcggaggaagggtgaatagatgtatcccgcagttctggaggtgcgatggacaagtggattgcgacaacggatcggatgagcagggatgcccgccgaagacctgcagccaggatgaattcagatgccacgatggtaaatgcatttccagacaatttgtgtgtgacagcgacagggactgcctggacggatcagatgaggctagctgcccggtattgacctgtggacccgccagcttccagtgcaacagctccacctgcatacctcagctgtgggcgtgcgataatgacccagattgtgaagatggatcagatgaatggccgcaaaggtgccggggcctgtacgtgttccagggtgactcctccccctgcagcgcgttcgagttccactgcctgtcgggagaatgtatccactcctcctggcggtgcgatggaggcccagactgcaaggacaagagcgacgaagagaactgcgcagtcgctacctgtcgcccggacgagtttcagtgctcagacggcaattgcattcatggatctcggcagtgcgacagagaatacgactgtaaagacatgtcggacgaggtggggtgcgtgaacgtgactctctgtgagggacccaataagtttaaatgtcattcgggagagtgtattacccttgacaaggtgtgcaacatggcccgcgactgtcgggattggtcagatgagccaatcaaagagtgcggtaccaatgagtgtctggacaacaacggaggttgcagccacgtgtgcaatgatttgaagattggttacgaatgcgactgcccggacggtttccaacttgtggcacaacggagatgcgaggatatcgacgaatgccaagatccggatacttgctcccaactctgtgtgaacctcgaaggagggtataaatgccagtgtgaagaaggattccagctcgacccgcacaccaaggcctgcaaggcagtgggatccatcgcctacctgtttttcaccaaccggcatgaagtcagaaagatgacgctcgaccgcagcgagtacactagcctcattccaaatctccgcaatgtggtggcactggatacggaagtggcctctaacagaatctactggtctgatttgagccaacgcatgatctgcagcacccaactggatcgggcccatggcgtgtcttcgtacgacaccgtgatctcacgggatatccaggccccggacgggttggcagtcgattggatccacagcaacatctattggactgactccgtcctcgggactgtctcagtcgctgacactaaaggagtgaagagaaaaaccctgttccgcgaaaacggctcaaaaccaagagcgatcgtggtggacccggtccacggattcatgtactggaccgactggggaaccccggcgaaaatcaaaaagggaggactcaacggggtcgacatctactccttggtgaccgaaaacatccagtggccaaacggaataaccttggatctgctttccggtagactgtactgggttgacagcaagctccatagcatcagctcgatcgatgtcaacggaggtaatcgaaaaacgattttggaagacgaaaagcgcctcgctcaccccttttcgctggcggtgttcgaagataaagtcttttggactgacatcatcaacgaggcgattttctccgccaaccggctgacgggatcggacgtgaatctcctggccgagaatttgctcagcccggaagatatggtgcttttccataaccttacccaaccgcggggcgtgaactggtgtgagcgcacgactctttccaacggcggatgccagtacctttgcttgccagcccctcaaatcaatccgcattctcctaagtttacctgcgcctgcccagatggaatgctccttgcgcgcgatatgcggtcctgcctgaccgaagccgaggctgcagtggcgacccaggagactagcactgtgcgcctgaaagtctccagcaccgccgtcaggacccagcatactaccactcgcccggttccggacacctcgcggctgcccggagctacccctggactgaccactgtcgagatcgtcacgatgtcacatcaggcgttgggtgacgtggccgggcgcggcaacgagaagaagcccagctcagtgcgcgctctctcaatcgtgctcccgatcgttctgctggtgttcctgtgccttggagtgttccttctttggaagaactggcggctcaagaatatcaactcaatcaacttcgacaacccggtgtaccagaaaactaccgaggatgaggtgcatatctgccacaatcaggacggatactcctacccttcacgtcagatggtcagcctggaggacgatgtggcc

SEQ ID NO: 16115 - DNA, 2580 bp, synthetic construct
  misc_feature 1..2580: note = source = /note="Description of Artificial Sequence: Synthetic coding sequence"
  source 1..2580: mol_type = other DNA
atgggaccatggggctggaagttgagatggactgtggccctccttctcgcagcagcggggacggcagtcggcgataggtgcgagcgtaacgagttccaatgccaggacggcaagtgcatctcatacaagtgggtctgtgacggtagcgcagagtgtcaagacggatcagacgaatcacaggaaacctgcttgtcggtgacctgtaagtccggggatttcagctgtgggggtcgggttaatcgatgcattcctcagttttggagatgcgatggacaagtggattgcgataatggatccgacgaacaagggtgtcctcctaaaacctgttcccaagacgagttccgctgtcatgatggtaagtgcatatcacgccaatttgtgtgcgattccgatagagattgtctcgatggctcggatgaagcaagctgtccagtgctcacctgcggacccgcatcgtttcagtgtaatagctcaacgtgcatcccgcagctctgggcctgtgataacgatcccgattgtgaagatggatcggacgaatggcctcagcgatgtcggggtctttacgtgtttcaaggagattcctcaccctgcagcgcttttgaattccactgcctctcgggggagtgcatccattcatcgtggagatgtgatggaggacctgattgtaaagacaagtcggatgaagaaaactgtgcggttgcaacctgcagacctgatgagtttcaatgctcggatgggaactgcatccatgggtcccgacaatgcgaccgggaatacgattgtaaagatatgtcggatgaggtgggttgtgtcaacgtgactctctgtgaaggccctaacaaattcaagtgtcatagcggcgaatgtatcaccctggataaggtctgtaatatggccagggattgtagggattggtccgatgaaccgattaaagaatgtggtaccaacgaatgccttgataacaatgggggctgtagccatgtgtgcaatgacctcaaaatcggatacgaatgtgattgccctgatggttttcaactggtggcacagcgtagatgtgaggacattgatgaatgtcaagatccagacacctgttcacaactgtgcgtgaatctggaaggggggtacaaatgtcaatgcgaggaaggattccaacttgatccgcatactaaggcctgcaaggcagtgggaagcattgcataccttttctttaccaatcgccacgaagtgcgaaaaatgaccctggatcggtcggaatacaccagcctcattcccaatctccggaatgttgtggccctggacactgaagtggcatccaatagaatatactggagcgatctttcacagcgcatgatttgttcaacccagttggaccgcgcacacggtgtgtccagctacgacacggtgatctcaagagatattcaagcgccagacggccttgccgttgactggattcacagcaacatttactggactgattccgtgcttgggactgtgagcgtggcagatactaagggggtcaagcggaaaactctgtttagagaaaacggctcaaagcctcgcgctatcgtggtggaccctgtccacggtttcatgtactggactgactggggtactccagcaaagataaagaaaggaggtcttaacggggtggacatttactccctcgtgacggaaaacattcagtggcctaacgggattaccctggatcttcttagcggacggctgtactgggtcgattctaaacttcactccatctcctcgattgatgtcaacggaggcaacaggaaaactattctcgaagatgaaaagaggcttgctcatccctttagcctggccgtttttgaagataaagtgttctggaccgacatcattaacgaggcaatcttcagcgcaaacagattgactggttcagatgtcaatcttctggcagaaaacctgctgtcccccgaagatatggtgctctttcataatcttactcagccccggggcgttaattggtgtgagcggaccaccctctccaatggtggatgtcagtacctttgtctcccagcaccacagattaatccgcactcgccaaagttcacctgtgcctgccccgatggcatgctcctggcacgcgacatgcgttcgtgtcttacggaagcggaagcggcagtggcgacccaggaaacttcgacggtccggctcaaggtgtctagcaccgcggtccgcacccaacataccactaccagacccgtgcctgacacttcacgacttcctggagcaactcctgggctcacgaccgtcgaaattgtgaccatgtcccatcaggccctcggtgacgtggctggaaggggcaatgaaaagaaaccttcgtcagtgcgagcactttcgattgtcctgcctatcgtgctgctggtgtttctttgtcttggtgtgttcctgctctggaaaaactggcggctcaagaacatcaactccattaacttcgataaccctgtctaccaaaagactacggaagatgaggtccatatatgtcataatcaggatgggtacagctatccctcacgacagatggtgagcctggaagatgacgttgcg

SEQ ID NO: 16116 - DNA, 2580 bp, synthetic construct
  misc_feature 1..2580: note = source = /note="Description of Artificial Sequence: Synthetic coding sequence"
  source 1..2580: mol_type = other DNA
atgggcccttggggatggaaactgcgctggacagtggcactgctgttggccgcagccggaaccgccgtcggagaccggtgtgaaaggaacgaatttcagtgccaggatggcaagtgtatttcatataaatgggtctgcgatggttccgctgaatgccaggacggcagtgatgaaagtcaggagacttgtctgtccgtgacctgcaagagcggcgattttagttgcgggggccgtgttaatcgttgcattcctcagttttggagatgcgacggtcaggtagactgcgataacggttccgatgagcagggatgcccaccaaagacatgttcccaggatgaattccggtgtcatgacgggaaatgcatctctcgccagttcgtgtgtgattccgaccgcgactgccttgacgggtctgacgaagcctcttgccccgtacttacatgtggtcctgcctctttccagtgcaactcgtctacatgcattccccagctgtgggcatgtgacaatgacccagattgcgaagatggcagtgatgagtggccccagcgatgcaggggactgtacgtgtttcagggtgacagcagtccctgttccgcttttgaattccattgtcttagtggcgagtgcattcactcttcatggagatgcgacggcggtccagactgcaaggataagtctgatgaggagaactgtgccgtcgccacctgtcggcccgacgagttccagtgttcagacgggaactgcatccacggaagccgtcagtgtgatcgcgagtacgattgtaaggacatgtctgacgaagtcggttgcgtgaatgtcaccctctgcgagggacctaacaagtttaaatgtcactctggggagtgcatcaccctcgataaagtctgtaacatggcccgggattgtcgggattggtcagatgaaccaataaaggaatgcggaaccaatgaatgcttagataataacgggggctgcagtcacgtttgtaatgatttgaagattggttatgaatgtgactgccccgacggcttccagttggtggcccagcggcggtgtgaggacattgacgagtgccaagaccctgatacatgtagccagttatgcgtcaatctggagggtggctataagtgtcagtgcgaagagggctttcaactggacccgcatacaaaggcctgcaaggccgtgggcagtatcgcctatctattttttaccaatcgccacgaagtgaggaaaatgacacttgatcgctctgagtacacatctctcatccctaatctccgcaatgttgttgcgctggatactgaggtcgcctcaaatcggatttattggtctgatcttagccagaggatgatctgttctactcagctcgaccgagcccatggagtctcttcatacgatactgtcatatctagggatatccaggccccagatggtttggctgtagattggatccattccaacatctattggaccgacagcgtgttggggactgttagcgtggcagacacaaaaggcgtcaagcgaaagaccctcttcagagagaacggatctaaacctcgagccattgtcgtggaccccgtgcatggcttcatgtactggactgattgggggactcccgctaagatcaagaagggaggcttgaacggggtcgacatatatagcctcgtgactgagaatattcagtggcctaacggcatcaccctcgacctgctgtctgggcggctctattgggtggatagcaagttacattcaatctcaagcatcgatgtaaacggtggcaacaggaaaaccatcctggaagatgaaaagcggctggcacatcctttcagcctggccgtgtttgaggataaggttttctggactgacatcatcaacgaagccatcttttccgccaataggcttacaggatcggacgtcaacttgctggcagagaacttgctctcacctgaagatatggtgctgttccataacctaactcagcctcggggagtcaattggtgtgaaaggactactctgtctaatggaggatgccagtacctttgtttacctgcaccgcaaatcaatccccactcaccaaagttcacttgcgcctgtcctgatgggatgttgttggcccgagatatgagatcctgccttaccgaagctgaagctgctgtggccacacaagagaccagtactgttagactgaaggtgagttcaactgccgtacggacacagcacaccaccacccgacctgttcccgataccagtaggttgcctggcgctacacctggtctgacaacggtggagattgtgactatgtctcaccaggctttgggggatgtggctggacgtggtaatgaaaaaaaaccttcttccgttcgagccctgtccatcgttctgcctattgtgttactcgtgttcctgtgtcttggagtatttctgctgtggaagaattggcgcctcaagaatatcaattcaattaacttcgataacccagtgtaccagaaaacaaccgaggatgaggtgcacatctgccataaccaagatgggtattcatatcccagccgtcaaatggtaagcttagaggatgatgtggct

SEQ ID NO: 16117 - DNA, 2580 bp, synthetic construct
  misc_feature 1..2580: note = source = /note="Description of Artificial Sequence: Synthetic coding sequence"
  source 1..2580: mol_type = other DNA
atggggccttggggctggaaactaagatggaccgtcgccctgctcctggctgctgcggggacagcagtgggagataggtgcgaacgaaacgagtttcagtgccaggacggtaagtgcatttcctataaatgggtttgtgatggatctgcagagtgccaggatggcagcgatgagagtcaagagacatgtctttccgtgacatgcaagagtggggacttctcctgcggagggagggttaatcggtgcattccccagttttggcgctgtgatggccaggtggactgtgacaatggatcggacgaacaagggtgcccacccaagacatgctcccaggacgaatttcggtgccacgatgggaaatgcattagtcgacagtttgtttgtgacagtgatcgtgattgcctggacgggtccgacgaagcctcttgccccgtattgacttgcgggccagcctctttccaatgcaacagctccacctgcatcccccagctttgggcttgtgataacgaccccgactgtgaagacggttcggatgaatggcctcaacgatgtcgagggctgtacgtcttccaaggggattcgtccccctgtagcgccttcgaattccattgtctctctggagaatgcattcatagttcctggaggtgcgatggggggcctgattgtaaggataaatcagacgaggagaactgtgccgtcgctacctgcaggccagacgaattccagtgttccgatggcaactgtatccacggaagtaggcaatgtgacagagagtatgattgcaaggatatgagcgacgaagtcgggtgtgtgaatgtgacactgtgtgaaggcccgaataagttcaaatgtcactccggcgagtgtattaccttggacaaggtctgtaacatggccagggactgtcgcgattggagtgacgagcccatcaaagagtgcggcacaaacgaatgcttagacaataatggcggctgctcccatgtctgtaatgacctgaaaatcggctatgagtgcgactgtccggatgggttccagctggtcgcacagcggagatgtgaggacatcgacgagtgccaggacccggacacatgttcccaattgtgcgtgaacctcgagggggggtacaagtgccagtgcgaagaaggttttcaattggacccacacactaaagcctgcaaagcggtggggagcattgcttacctcttttttaccaacaggcatgaagtgagaaaaatgaccctcgacagatcagaatacacctcactgatccccaacctcaggaacgtcgtggcactagacaccgaggtcgcctcaaatagaatttattggagtgacctgtcccagcgcatgatctgctcaacacagctcgaccgagcgcatggcgtcagctcttacgatactgtcatttcccgtgatatccaggcacccgacgggctcgccgtggattggattcactctaatatttactggacagactcagttctggggaccgtaagcgtggccgataccaaaggggtcaagaggaagaccttattccgagaaaacgggtccaagccccgcgctattgtggtagaccctgtgcatggttttatgtattggaccgattgggggacccctgccaagatcaagaaggggggcctgaatggggtggatatttacagtctggtgaccgagaacattcaatggccaaatggtataaccctagatctgttgtccggccgtttatattgggtggactctaaactgcattccatcagcagcattgacgtaaacggagggaaccgcaagacaatattggaggacgagaagaggttggcgcaccccttctcgctggccgtattcgaggataaggtcttctggacagacattataaacgaagctattttctccgccaatcggctgacgggctccgacgtgaatctactcgcagaaaaccttttaagtcctgaagacatggtgctatttcacaaccttacacaacccaggggggtcaattggtgtgagagaaccactttatccaacgggggctgtcagtatctgtgtctgcctgccccccaaattaacccccacagccctaagttcacctgtgcttgccccgacggtatgcttctggcaagggatatgcgatcctgcctgaccgaagccgaggccgccgtcgcaactcaagaaacttctactgtccggttaaaagtttcatctacagcggtcagaacacagcatacaactacccgccctgtccccgacaccagcaggctgcccggcgccaccccaggattgacaacagtggagattgttacgatgagtcaccaagccttgggggacgttgccggaagggggaatgaaaaaaaaccctcatccgttagagcgctgtcaattgtactccctatcgtattgttagtgttcctctgcctcggcgtctttttactttggaagaattggagactgaaaaatatcaactccatcaactttgataacccagtatatcagaaaaccacagaggacgaggtccatatttgtcataatcaagatgggtactcttacccgtccagacaaatggtctccctagaagacgatgttgca

SEQ ID NO: 16118 - DNA, 2580 bp, synthetic construct
  misc_feature 1..2580: note = source = /note="Description of Artificial Sequence: Synthetic coding sequence"
  source 1..2580: mol_type = other DNA
atgggaccgtggggctggaagttgcggtggaccgtggcactcctgctggctgcggccgggaccgcggtgggcgatagatgcgaacgtaatgagttccaatgccaagacggtaagtgtatttcgtacaaatgggtctgtgatggatcagccgagtgtcaagacggctccgatgagtcgcaagaaacgtgcctttcagtcacttgcaaatcgggagatttctcatgcggaggacgcgtcaaccggtgcatcccgcagttctggcggtgtgatggacaagtggattgcgataatggaagcgatgagcaagggtgtcccccgaaaacttgctcccaggacgaatttaggtgccacgatgggaagtgcatctcgaggcaatttgtgtgcgactccgatagagattgcctggacggttcggacgaggcgagctgtccagtgttgacctgcggaccagcctcttttcaatgcaactccagcacctgcattcctcagctgtgggcgtgtgacaatgatccggactgtgaggacgggtcggatgagtggccacagcggtgtcggggtctttacgtgttccagggagactcttccccgtgctcggcgtttgaatttcactgcctgtccggagagtgtatccattcgagctggcggtgcgacggaggaccggactgtaaggacaagtcagacgaggagaactgtgccgtcgccacttgccggccagacgaattccagtgctcagatggaaactgtatccacggcagccggcagtgcgaccgggagtacgattgcaaggacatgtccgatgaagtgggatgtgtcaatgtgactctgtgcgaaggcccaaacaagtttaagtgccactccggagaatgcattactctggataaagtgtgcaacatggcccgcgattgccgcgactggtccgacgaaccgatcaaagaatgcggcaccaacgagtgtttggacaataacggaggctgtagccatgtctgcaatgacctgaagatcggatacgaatgtgactgcccagacggatttcaactcgtcgcgcaacgccgctgcgaggatatcgatgaatgccaggatcctgacacttgttcacaattgtgtgtcaacctcgagggcggatacaagtgccagtgtgaggaagggttccagctggacccgcatactaaggcatgtaaggccgtgggatcgatcgcgtacctgttcttcacgaatcggcacgaagtgcggaagatgactctggacagatcggaatataccagcctgattccgaacctgcggaacgtggtcgcactggacaccgaagtggcgtccaatagaatatactggtcggacctctcccagcggatgatctgctcaacccaacttgaccgcgcgcatggcgtctcctcatacgacaccgtgatctcacgcgatattcaggccccggacgggctggcagttgattggattcattcgaacatctactggacggacagcgtgctgggtacggtgtcagtggccgatactaagggggtcaagcgcaagaccctgttccgcgaaaatgggtcgaagcccagagccatcgtggtcgacccagtgcacggattcatgtactggaccgactggggcactccagccaagatcaagaaagggggattgaatggagtggacatttacagcctggtgaccgagaatatccaatggccgaacggaatcaccctggatctgctgtcggggcgcctttactgggtcgattcaaagctccattccatcagctcaatcgatgtgaatggggggaaccgcaaaaccattctcgaagatgaaaagcgcctggctcacccgttcagtctggcggtgttcgaagataaagtgttctggaccgacattatcaacgaagccatcttctccgccaaccggctgactggctccgacgtgaacctgctcgccgagaacctcttgtcgccggaagatatggtgctctttcataacttgacccagccacggggcgtgaactggtgtgagcgcaccactctctcaaatggaggatgtcaatacttgtgtctgccagccccccagatcaacccgcactcgccaaagttcacttgcgcatgtcccgacgggatgctgctcgctcgcgacatgcggtcctgcctcaccgaggcagaagctgcagtcgcgacgcaggaaacctcaaccgtgagactcaaggtgtcgtcgaccgccgtacggactcagcacactaccacccggccagtgccggatactagccggctgcctggagcaaccccgggactgaccacggtcgaaatcgtcactatgtcccaccaagccttgggagacgtcgccggccgcggtaatgagaagaagccctcgtccgtccgggccctcagcatcgtgctgccaatagtgctcctggtgttcctgtgcctgggagtgtttctgctgtggaagaactggcgtctcaagaatatcaattcaattaacttcgacaacccggtgtaccaaaaaactaccgaggacgaggtgcatatctgccataaccaggacggttacagctacccgtctcgccaaatggtgagcctggaggacgacgtggct

SEQ ID NO: 16119 - DNA, 2580 bp, synthetic construct
  misc_feature 1..2580: note = source = /note="Description of Artificial Sequence: Synthetic coding sequence"
  source 1..2580: mol_type = other DNA
atgggaccttgggggtggaagctgagatggactgtggcccttcttctggccgcagccggaactgcagtcggtgacaggtgtgagcgcaacgagtttcaatgtcaagacggaaaatgtatatcatacaagtgggtgtgcgacgggtccgcagaatgccaggatggatcagatgagtcacaagaaacttgcctctcggtgacctgtaagagcggagatttttcgtgcggaggacgcgtcaacagatgtattcctcagttttggaggtgtgatggacaagtcgattgtgacaacgggtcggacgagcaaggttgtccacccaagacctgcagccaagatgaattcagatgtcacgacggcaagtgtataagtaggcagttcgtatgcgattcagatagagactgcctggacggaagcgatgaggcttcgtgtccagtgctgacctgtggcccagcctcgtttcagtgcaactcaagcacctgtatccctcagctttgggcatgtgataacgatcctgattgcgaggacggttcagacgaatggccacaaagatgccgaggactgtacgtctttcagggtgatagctcaccttgttccgcattcgagtttcactgcctgtcaggggagtgcatacactcttcgtggaggtgcgatggtggccccgactgcaaggataagtccgacgaggaaaactgcgcagtggcgacctgtaggccggatgagtttcaatgctccgatggtaactgcatccacggtagcagacaatgcgatagggagtacgactgtaaggatatgtcggatgaggtggggtgtgtgaacgtgactctctgtgaaggacctaacaagttcaagtgccattccggtgagtgtattactcttgataaggtgtgtaatatggccagggactgtcgggactggtccgatgaacccattaaggagtgcggcactaacgaatgccttgacaacaacggcggatgttcacacgtctgcaacgatctgaagattggatatgaatgcgattgtcctgacggtttccaacttgtggcccaaagaagatgtgaagatatagatgaatgtcaagaccctgacacttgcagccagctgtgcgtcaacctcgaaggtgggtacaaatgtcagtgtgaagaaggttttcagctggacccgcacaccaaagcatgtaaggctgtggggtcgatagcatacttgtttttcaccaaccgccatgaggtgcgtaagatgaccctcgaccgatcggaatacacctcactgattcccaatcttcgcaacgtggtcgcactggataccgaggtggcttccaatcgcatatactggtcagacctgagccagagaatgatctgcagcacccaactggacagggcacatggggtgtccagctacgacactgtcatttccagggacatacaggcacccgatggcctcgcagttgattggattcattcaaacatttactggaccgattccgtgctgggcacggtttctgtcgcagataccaagggtgtgaagagaaagaccctgtttcgagagaatggatcgaagcctcgcgcaatagtggtagatccagtgcacggattcatgtactggactgattgggggaccccggcaaagatcaagaagggagggcttaatggtgtcgacatttactccctcgtgactgagaacattcaatggcctaatggaattaccctggacctgctctcgggccgcctttactgggttgactcaaaacttcattcgatctcctcgatcgacgtcaatggagggaacaggaaaactattttggaagatgagaagcgacttgcacatccattctcactggcagttttcgaagataaagtgttttggactgacatcataaacgaggctattttctcagcaaacagacttacgggatcggacgtgaatttgctcgcagaaaatctgctgtcccccgaagatatggtgctctttcataaccttacccagccacgcggcgtgaactggtgcgaacgcaccactctttcgaatggagggtgccagtatctttgcctgcctgcgccacagattaacccacactccccaaagttcacttgtgcatgcccggatgggatgctcctcgccagagatatgcgatcctgcttgacggaggcagaagcagctgtcgcgacgcaggaaacttccaccgtgcggcttaaggtgtcaagcactgccgtgagaacccagcatacgactacccggccagtccctgatactagccgacttcctggtgccactcccggacttaccaccgtggaaatcgtgaccatgtcacatcaagcattgggcgatgttgcaggcagaggaaacgagaaaaagccttcgtcggtccgggcactctccatcgtgctgccaattgtgcttctcgtgttcctgtgtcttggagtgtttcttctctggaagaactggcgcctcaaaaacattaactcgatcaactttgataatcctgtttaccagaaaactactgaagatgaagtgcacatttgccacaatcaggatggatactcgtaccctagtagacagatggtgtcgctggaagatgatgtggca

SEQ ID NO: 16120 - DNA, 2580 bp, synthetic construct
  misc_feature 1..2580: note = source = /note="Description of Artificial Sequence: Synthetic coding sequence"
  source 1..2580: mol_type = other DNA
atgggcccttggggttggaaactgcgatggaccgttgcactgttgctcgccgccgctgggactgcagtgggcgaccgttgcgagcggaatgaatttcagtgtcaggacgggaagtgcatatcatacaaatgggtgtgtgacgggtcagccgagtgccaagatgggtctgatgagagccaggagacctgcctcagtgtaacctgcaagtctggagatttttcatgcggtggcagggtgaatagatgtattccacaattttggcgatgtgacggccaggtcgattgcgacaatggatctgacgagcagggctgccctcctaaaacgtgttcacaggatgaattccggtgccatgatggtaaatgtatctctcgccagttcgtctgcgacagcgatagagactgtctggatggttcagatgaagcctcctgtccagtgctaacctgtggtcccgcctcttttcagtgcaactcctctacttgcattccacaactgtgggcatgtgataatgatcccgattgtgaagacggatctgacgagtggcctcagagatgcagggggctgtatgtgtttcagggggatagtagcccctgtagcgcttttgagtttcactgtctctccggcgagtgcattcacagtagctggagatgcgatggaggcccagattgtaaagataaatcggacgaggaaaattgcgccgtcgcaacttgcagacccgacgagtttcagtgctctgatgggaattgtatccacggatcaaggcagtgcgaccgggaatatgattgcaaggacatgagtgacgaggtcgggtgtgtgaacgttactttgtgcgaagggcccaacaaatttaagtgccactccggagaatgcataaccctagacaaagtgtgtaatatggcccgggattgtagagactggagtgacgaacccattaaagagtgtggcaccaacgaatgtttagataataatgggggatgttcacatgtgtgtaacgacctgaagatcggctatgaatgcgattgccctgacggtttccaactggtcgctcagcgcagatgcgaggatatcgacgagtgccaggacccagatacatgtagtcaactgtgcgtaaatctggaaggaggatataagtgccagtgcgaggaaggcttccagttggacccccatactaaggcctgcaaggccgttggatcgatcgcctatctattctttacgaatcggcatgaggtgaggaagatgaccttggacagatcggaatacacctcactcatccccaacctcaggaacgtggtggccttggataccgaggtggccagcaaccgcatctactggagcgacctttctcagcggatgatttgttcaacacagctggatcgggctcacggagtgagctcgtatgatactgtgataagtcgagacatccaggctcccgatggcttggcagtggattggattcatagtaacatatattggaccgattccgtgctgggaaccgtcagcgtggccgataccaagggtgtgaaacgcaagactctttttcgcgagaacgggtcgaagccaagagcgattgtagttgacccagtccatggctttatgtattggactgattgggggaccccagccaagattaagaagggcggacttaatggagtggacatctattcactggtgacagagaatatccagtggcctaatggtattactttggatctgctgtccggccgactatactgggttgattcgaaactacactcaataagtagtatcgacgtcaatgggggtaatcgaaaaacaattctggaggacgaaaaaaggctcgcccatccctttagcttagccgtattcgaagataaggtattctggacagacattatcaatgaggccattttctctgctaatcgtctgaccggcagcgatgtgaatctgctagctgaaaatctcctgtcccccgaagacatggtcctgttccacaacttgacgcagcctcgaggcgtaaactggtgtgaacgtacaaccctgtcaaatggcggctgtcagtacctttgtctgccagctccacagatcaatccccactcccccaagttcacctgcgcctgccctgatggaatgctactcgccagagatatgcggagctgcctcacggaggctgaagcagccgtggcaacacaggaaacttccactgtccggttgaaggtttccagcaccgctgtccggactcaacataccacaacccgtcccgtgcctgacacgtctagacttcctggagccacacctgggttgaccacagtggagattgtcactatgagccaccaagctctgggggacgttgccggtaggggaaacgagaaaaagcccagtagtgtgcgggccttgagtattgtactgcccatagtgttgctggtgttcttgtgcctcggcgtgttccttctctggaaaaactggaggttgaaaaacataaacagcatcaacttcgataatcccgtataccagaagacaactgaggacgaggttcacatttgtcacaaccaagatggctactcttatccatctaggcagatggtgagcctcgaggacgacgtggca

SEQ ID NO: 16121 - DNA, 2580 bp, synthetic construct
  misc_feature 1..2580: note = source = /note="Description of Artificial Sequence: Synthetic coding sequence"
  source 1..2580: mol_type = other DNA
atgggcccatggggctggaagttgaggtggacggttgcgctgctccttgcggctgccggcaccgccgtgggagatcgctgcgagcggaacgaatttcaatgccaggacggcaaatgcataagttataagtgggtgtgcgacgggagtgccgagtgtcaagacggctctgacgagtcccaggaaacttgcttgagcgttacctgcaagtccggagatttcagttgcggaggccgcgtaaataggtgcataccccagttttggaggtgtgatgggcaagtggattgcgacaacggctctgatgagcagggctgtccccctaaaacctgctcacaggatgaattcaggtgccatgatggtaaatgtatcagcaggcagtttgtttgtgattccgatagggactgcctggacggatctgacgaagccagttgcccggtcctgacttgtggtccagcgtccttccaatgcaactcctccacgtgtatcccccagttgtgggcgtgtgataacgaccctgactgcgaagacgggagtgacgagtggccccagagatgtaggggactgtacgtgtttcaaggggactcaagcccatgttccgcctttgagttccactgcctctccggcgagtgtattcactcaagctggagatgtgatgggggcccagattgtaaagacaaaagcgacgaggagaattgtgccgtggctacctgtcgccccgatgagttccagtgttccgacggtaactgtatacacggatcacgccaatgcgaccgagaatatgactgcaaggacatgagcgatgaggtgggatgcgtgaatgtcacgctgtgcgaggggcctaacaagttcaaatgccactccggtgagtgtattactcttgataaggtttgcaatatggctcgagattgcagagattggtccgatgagcccataaaagagtgtggcaccaatgaatgtttggataacaacggcgggtgctctcacgtgtgcaacgatctcaagattggctacgagtgtgattgtccagatgggttccaactcgtggcgcagcgccgctgcgaagacattgatgaatgtcaggatcctgatacgtgctctcagctttgcgtgaaccttgaagggggttataaatgtcaatgtgaggagggttttcagctggatcctcacacaaaagcatgcaaggctgtcggttcaatcgcatatctttttttcacgaatcgacatgaagttcgcaagatgaccttggaccgaagtgagtacacctccctgatcccaaacttgaggaacgtggttgctttggacactgaggtggcctccaataggatttattggtctgatctgagccagcgcatgatctgtagtactcagctcgaccgggctcacggcgtgtctagttatgatacagtcatctcccgggacatccaggctcctgacggccttgcggtagactggatccattctaacatctactggacagactccgttctcggtacggtctccgttgccgataccaaaggtgtgaagagaaaaaccctgtttcgcgaaaatggatccaaacctcgcgcgattgttgttgatccagtgcatggcttcatgtactggaccgactggggcactcccgccaagattaaaaaggggggtctcaatggcgtggacatttacagcctggttaccgagaatattcagtggcccaacggaatcaccctggacctgctgtctggcaggctgtactgggtggactccaaactgcattccatcagttcaattgatgtgaacggtgggaaccgaaaaaccatcctcgaggatgagaagcgcctggcacatccgttcagccttgccgtgttcgaagacaaggttttctggactgacattattaacgaagccattttcagcgctaaccgactcacggggagcgacgtgaatctgctggccgaaaatctgctctcaccagaagacatggtcctgttccataacctgacgcagccccggggagtaaattggtgtgagaggactaccctgtcaaatggggggtgtcagtacctgtgtctgccggcgccccaaatcaatccccacagccccaaatttacctgtgcctgccctgacggaatgctgctggccagagatatgagatcctgtctgacagaagcagaggctgccgtggccactcaggaaacttccacagtgaggcttaaggtgagtagtaccgccgtgcgcacgcagcacaccacaaccaggcctgttccggatacgagtagactgcctggcgccacaccggggctcactacagttgagattgtcacaatgtcacaccaggcgctgggagatgtcgctggtcggggtaatgagaagaagccatcatccgttagagcactgagcattgtgttgccaattgtgctgctggtgtttctctgtcttggtgtgtttcttctgtggaagaattggcgcctcaagaacatcaacagcattaacttcgacaatccagtttaccagaaaacaacagaagacgaagtacacatttgtcataaccaggatggctacagctatccctcacgccagatggtttctcttgaggacgatgtggct

SEQ ID NO: 16122 - DNA, 2580 bp, synthetic construct
  misc_feature 1..2580: note = source = /note="Description of Artificial Sequence: Synthetic coding sequence"
  source 1..2580: mol_type = other DNA
atgggcccctggggttggaagttaagatggacagtagcactccttttggctgctgcaggaacagctgtgggggaccggtgcgagagaaacgagttccagtgtcaagatggtaagtgcatttcgtacaagtgggtttgcgatggtagcgccgaatgccaagatggttccgatgaaagtcaggagacttgcttgtcagtcacctgtaaatctggggatttctcgtgtggaggtcgtgttaacagatgcataccacagttctggcgttgtgacggtcaggttgattgtgacaatggtagcgacgagcagggctgtcccccaaagacttgctcccaagacgaatttcgatgccatgatggaaagtgcatctcaaggcagttcgtttgcgatagcgaccgtgattgtctcgacggttcagacgaggctagctgtcccgttctaacttgcggaccggctagctttcagtgcaactcctcaacttgcattccacaattatgggcctgcgacaacgatcccgattgcgaggatggtagtgacgagtggccgcaacggtgcaggggtctgtacgtatttcagggtgattcctccccatgctcagccttcgaattccattgtttgtcgggggagtgtattcactcatcatggcgatgtgacggaggacccgattgtaaagataaaagcgatgaggagaactgcgcagttgcaacctgtcgtcccgacgagttccaatgttcagacgggaactgtatccatgggtcccgtcagtgtgatagagaatacgactgcaaagatatgagtgatgaggttggttgcgtcaatgtaaccctttgtgagggaccgaacaaatttaagtgccacagcggggaatgcataactttggacaaggtttgtaatatggctagggattgcagggattggtcagatgaaccaatcaaggaatgtggtacaaatgagtgcctcgataataacggaggatgcagccatgtttgtaatgacctcaagatagggtatgagtgtgactgtcctgatgggttccaacttgttgcccaaaggagatgtgaggacatcgatgagtgccaggatcccgacacctgttcacagttgtgcgtgaatcttgaaggaggttataagtgtcagtgcgaagaaggtttccaattagatccacacaccaaggcttgcaaagccgttggttctattgcttacctttttttcactaaccgtcatgaagtcagaaaaatgactttggatagaagcgagtacacttcgctgatacctaatttgcggaatgttgtcgcacttgatacggaagttgcttcaaatagaatttattggtcggacctttcacaacggatgatttgctcgacccaattggacagggctcatggcgtatctagttacgatactgtcatctctagagatattcaagcaccagacggcttggctgttgactggatccattcaaacatctactggacagattcggtccttggtaccgttagcgttgccgacacaaagggggtcaaacggaagacgttgttccgggaaaacggttctaagccccgagccatcgtggtcgacccagtccatggcttcatgtattggactgattggggtactcctgctaagataaaaaagggtggtcttaacggagttgatatttattcccttgtgacagaaaatattcagtggcccaatggtatcacgctggatttgctctcgggtcgtctatactgggttgattctaaactccactcaatttcaagcattgatgtgaatggcggtaataggaaaacaatccttgaggatgagaaaaggttggcacacccattctctcttgctgtgtttgaagataaggtattttggactgatattatcaacgaagctattttctccgctaataggcttactggctccgacgttaatttgttggcagaaaatctactttcccctgaggatatggtccttttccataatttgacgcagccaagaggtgttaattggtgtgaaaggactacgctttcgaatggaggatgtcagtatctgtgtttacctgccccacaaattaatccacactcaccaaagttcacgtgcgcatgtccagatgggatgttgcttgcaagagatatgagatcctgcttgactgaagctgaagctgcagtcgctacacaagagacttccaccgttagacttaaagttagtagtactgccgtgcgtactcagcatactacaaccagacctgtgccagatacctcaaggcttccaggggctactcctggactaaccaccgttgaaatcgttactatgtcgcaccaggcgttgggagatgttgccggaaggggtaatgagaagaaaccttcttcagttagggcattgtcaattgtgctccctattgtcttgcttgtgtttttgtgtcttggcgtctttctcctatggaagaactggcgacttaagaacataaactcgatcaactttgacaatcctgtttatcaaaaaactaccgaagatgaagtgcatatctgccataatcaggacggttacagctatccgtctcgtcaaatggtttctctagaagatgatgttgcg

SEQ ID NO: 16123 - DNA, 2580 bp, synthetic construct
  misc_feature 1..2580: note = source = /note="Description of Artificial Sequence: Synthetic coding sequence"
  source 1..2580: mol_type = other DNA
atgggaccttggggctggaagctgcgctggactgtcgcccttctgctcgccgccgctggcacagccgttggtgaccgctgcgagaggaatgagtttcaatgtcaggatggaaaatgtattagttacaagtgggtgtgtgatggtagcgccgagtgccaggatggttcagatgagtctcaagaaacttgcttgtcagtcacgtgcaaaagtggcgacttttcttgtggaggcagggttaaccgctgtattccccaattctggaggtgcgacggccaggtcgattgcgataacggttctgacgagcaaggttgtcctcccaaaacgtgctctcaggatgaattcaggtgccacgacggtaagtgcatatcaaggcagtttgtgtgtgatagcgaccgcgattgcctggatggatccgatgaagcaagctgccctgtccttacctgcggtcccgcgtccttccagtgtaactcctccacctgcatcccacagctgtgggcttgcgataacgatcccgactgcgaagatggttcagatgaatggccccagagatgccgcggtctctacgtcttccagggcgactccagcccatgtagcgctttcgaattccattgcttgtccggtgagtgtatccattcaagttggaggtgtgacggaggtcccgactgtaaggacaagtcagacgaagaaaactgcgcggtggccacttgccgccctgacgaattccagtgcagtgatggaaactgtatccatggcagcaggcagtgtgatagggaatacgattgtaaagacatgagtgatgaggtgggatgcgtaaacgtgaccttgtgcgagggtcctaacaagtttaaatgtcactccggagagtgtatcacgctcgacaaggtgtgtaatatggccagggactgtcgcgattggagcgacgagcccatcaaagagtgtggcacgaacgagtgccttgacaacaacggcggctgctcacacgtctgcaatgatctcaagattggttacgaatgcgactgcccagacggatttcagctggttgcccagaggcgctgcgaggatatcgatgagtgccaggacccggacacctgctcccaactgtgcgtgaacctggagggaggctataagtgccagtgtgaagagggcttccagttggatccgcataccaaagcatgcaaggctgttggttctatcgcatacttgttttttaccaacagacatgaggtccgcaaaatgactctggacaggagcgagtacaccagcctgatccccaacctccgcaacgtggtggctttggacaccgaagtagcctctaaccgcatatattggtccgacttgagccagaggatgatctgctcaacacagctggacagggcacacggcgtgtctagttacgatacagtgatttctagggatatacaggcgcccgatggtcttgcggtcgactggatccacagtaatatttactggacagactctgtcttgggcactgtcagtgtggccgacacaaaaggagtcaaaaggaagacgttgtttagggagaacggatccaagcctagagccatagttgtggatcctgtgcacggcttcatgtactggaccgactggggcacccctgctaagattaaaaaaggtggacttaacggtgttgatatctattccctggtgactgaaaatatccagtggcccaatggtattaccctcgacttgctctcaggtcgcctctactgggtggattctaagctgcattccatttcaagcatcgatgtgaacggcggaaacagaaagaccatcctcgaggatgagaagcgcctggctcacccttttagcctggcagtcttcgaggacaaggtcttctggactgacattatcaatgaggctatcttctcagcaaacaggttgacaggttctgacgtgaacctgctcgcggaaaatttgctgagcccagaggacatggttcttttccacaacctgacgcagcctcgcggcgtaaattggtgtgagaggacaacactgtctaacggaggttgccaatacctgtgcttgccggcacctcagattaatccccattcacccaaatttacgtgcgcctgcccggacggtatgttgctcgctagagacatgcgctcctgcctcactgaggcagaggccgcagtagcaactcaagagacctctactgtgagactcaaggtatcctctaccgctgtcagaacgcagcacactacaactagaccagtgccggacacctcaaggctgcccggcgcaactccaggcttgacaacggtcgagattgttacaatgtcccaccaggccctgggagatgtggcgggaaggggcaatgaaaagaagccttctagtgtccgcgcgctcagcatcgtgctgccaatagtactgttggtgttcctgtgtctgggtgtgtttttgctgtggaagaactggcgcctcaaaaacattaattcaatcaattttgataatccagtgtatcaaaaaactactgaagacgaggtgcatatatgtcataatcaggacggatatagttacccctcccgccagatggtgagcctcgaagatgatgtcgcc

SEQ ID NO: 16124 - DNA, 2580 bp, synthetic construct
  misc_feature 1..2580: note = source = /note="Description of Artificial Sequence: Synthetic coding sequence"
  source 1..2580: mol_type = other DNA
atgggaccttgggggtggaaactgagatggactgtggccttgctgctggcagcggcgggcactgctgtgggagacagatgcgagagaaacgagttccagtgccaggatggaaagtgcatctcatacaagtgggtctgcgacggctcagcagaatgtcaggacgggagcgacgaatcacaggagacttgtctgtctgtcacctgcaagtcaggcgatttctcatgcggcggacgagtcaacaggtgcatcccgcagttttggcgctgtgacgggcaggtggattgcgacaacggatcagatgaacaggggtgccccccaaagacgtgctcgcaagacgagttccggtgtcatgacggtaaatgtatttcccgtcagttcgtgtgcgactcggaccgcgactgcctggacggatctgacgaagcgtcgtgtccggtgctcacttgtggaccggcctcattccagtgcaatagctccacgtgcattccccagctgtgggcctgcgataacgacccggactgcgaggacgggtcagacgaatggccacagagatgtagaggactgtacgtctttcaaggcgattcgagcccgtgcagcgcctttgagttccactgcctgtccggagagtgcatccactcatcgtggaggtgtgacggtggacctgattgcaaggataaatcagacgaagaaaattgcgcggtggcaacgtgccgaccggatgagtttcaatgcagtgacggaaactgcattcacggctctcgtcaatgcgatcgggagtatgactgcaaagacatgtccgatgaagtcggctgcgtcaacgtgaccctgtgcgagggtcctaacaaattcaagtgccattcaggagaatgtatcactctggacaaggtgtgcaacatggccagagactgtcgcgactggtcggatgaaccaattaaggagtgtggcaccaacgaatgcctcgacaataatggcggatgttcgcacgtgtgcaatgatctcaaaatcggctacgagtgtgattgcccagatggctttcagcttgtggcacaacgccggtgcgaggacatcgatgaatgtcaggatccagacacttgctcccagctctgcgtcaatttggagggaggatacaaatgtcagtgcgaagaaggattccagctggacccgcacactaaagcatgtaaagcagtgggctccatcgcttacctgttcttcaccaaccggcatgaagtgagaaagatgactttggacaggagcgagtacacctcgcttatccctaatctcagaaacgtggttgcactggacaccgaagtcgccagcaatcgcatctactggtcggatctgtcccaacgcatgatttgctcgacccagctggaccgcgcgcacggagtgtcctcatacgacaccgttatctcccgggatatccaggcgcctgacgggctggcggtggattggatccactccaacatctactggaccgactccgtgctgggaaccgtctcggtggctgatactaaaggagtgaagagaaagaccctgttcagagaaaacggatcgaagccccgcgccatcgtggtggacccggttcacggatttatgtactggacggattggggcactcctgccaagatcaaaaagggtgggttgaatggagtggacatctactcactggtgaccgaaaacatccagtggcctaacgggatcacccttgacctcctttcgggtcgtctttactgggtggattctaagctccactcgatctcctccatcgacgtgaacggcggtaaccgcaagactattttggaggacgaaaaaaggcttgcgcatccgttctcccttgccgtctttgaggacaaggtgttctggacggacattatcaatgaggccatcttctcggcgaatcgcctcaccggttcggatgtgaaccttctcgctgaaaacctgctgagcccagaggacatggtgctgttccacaacctcacgcagccacgcggagtgaattggtgcgaaaggaccactctgtcgaacggggggtgccagtacctgtgcctgccggccccccagatcaatccacattcgcctaagtttacttgcgcctgcccagacgggatgctcctcgccagagacatgcggtcctgtctgaccgaagctgaagccgctgtggctacccaagaaacgtctaccgtgcgcctcaaggtgtcgagcaccgctgtgagaacccaacacaccaccacccgcccggtgcccgacaccagcaggctccccggagctactccggggctgactactgttgaaattgtgactatgagccaccaggccttgggcgatgttgccggaagaggcaacgaaaagaaaccttcctctgtgcgggccctctcgatcgtgctgcctatcgtgctccttgtgttcctgtgtctgggggtgttcctgctctggaagaattggaggctgaagaacatcaattcgatcaattttgacaaccctgtctaccagaaaaccaccgaggacgaggtgcacatctgtcacaaccaagatggctactcttacccgtcccgccaaatggtgtcgctggaggacgacgtcgcc

SEQ ID NO: 16125 - DNA, 2580 bp, synthetic construct
  misc_feature 1..2580: note = source = /note="Description of Artificial Sequence: Synthetic coding sequence"
  source 1..2580: mol_type = other DNA
atgggtccatggggttggaagctccgatggactgtcgcacttctgctggccgcagctggtactgcagtaggagatcggtgtgagagaaatgaattccagtgccaggatgggaagtgtattagctataagtgggtctgtgacggatcggcagaatgccaggatggcagcgacgagtctcaggaaacctgtctgagtgtcacgtgcaagtctggtgacttcagctgtggaggtcgcgtgaaccgctgcatccctcagttttggcggtgtgacggccaagtagattgtgacaacggatccgacgagcaaggatgcccgcccaagacctgctcgcaagatgagtttcggtgtcatgacggaaagtgcatctcccgtcagttcgtgtgtgatagcgacagggattgtctggacggctccgatgaggcttcctgtccagtgctcacatgcggcccagcctcattccagtgtaacagcagcacttgtataccccaactgtgggcttgcgacaacgaccctgattgcgaggacggctcggatgagtggccgcaacgatgccgcgggctgtacgtctttcagggcgactcatccccatgttctgcgttcgagttccactgccttagtggggaatgcattcactcaagctggaggtgtgacggcggccccgattgcaaggataaaagtgacgaggagaattgcgctgtggcaacttgccgacccgacgaattccagtgcagcgacgggaattgcatacatggatcacgccagtgtgaccgtgaatatgattgcaaagacatgtccgatgaggtgggctgtgtcaacgtgacgctctgtgaggggccaaataaattcaagtgtcactctggagagtgcatcactttggataaggtctgcaatatggctagggactgcagagactggtccgatgaacctatcaaagagtgcgggacgaacgagtgcctggacaacaacggagggtgtagccatgtgtgtaacgatctgaagattggttatgagtgtgactgcccagacggatttcagttagtcgcacagaggaggtgcgaggacattgacgagtgtcaggatcccgatacctgtagtcagctgtgcgtgaacctggagggtgggtacaagtgccagtgtgaagaaggctttcaacttgatcctcataccaaagcctgcaaggctgtaggtagtatcgcataccttttctttaccaaccgccacgaggttaggaagatgaccctggatcgaagtgagtacacatcccttattccaaacctacggaatgtggtggctcttgacactgaagtcgcgagtaaccgcatctactggtctgacctgtctcagcgcatgatatgctcgacccagttagaccgggctcacggggtatcatcctacgacaccgtcatctctcgggacattcaggcccctgacggtctcgctgtggattggatccactccaatatctattggacagattcagtgctcggaactgtatctgtggccgacactaagggtgtgaagcgtaagacactgttccgagagaacggatccaagccacgagctattgtggtcgatcccgtccacggcttcatgtactggaccgactggggtaccccggcgaaaattaaaaagggggggcttaacggtgtggacatctactccctcgtcaccgagaacatccaatggcccaacggcatcacccttgacctgctgagtggccggctatactgggtggattctaagctacactctatttcctccatagatgtgaatggaggaaaccggaagacaatccttgaggatgaaaagcggctggcgcacccatttagtctggcagttttcgaggacaaggtgttttggactgacattattaacgaggccatttttagcgcaaacaggctgaccggaagtgacgtgaacctcctggcagagaatctgctgagtccagaggacatggtacttttccataatcttacccagcctaggggggttaattggtgcgagcggaccacccttagcaacggcgggtgccagtatctctgcctaccagccccgcagatcaacccccatagtcctaaatttacttgtgcctgccccgacggcatgctactcgcgagggatatgcggagctgcctgactgaagcggaagctgcagtagctacacaggagacctcaaccgtacgactgaaagtgagttcaacggctgtgcggacacagcacactactacgcgccctgtgcctgacacatctcgccttccaggggccactcccggcctgaccaccgttgagattgtgacaatgtctcatcaggcattgggggatgtggctggaagggggaacgaaaagaaaccctcaagcgtgagagccctgtccatcgtcctgcctatcgtcctcctggtgttcctttgtttgggcgtcttcctactatggaagaactggcgcttgaagaatataaactcaattaatttcgacaatcctgtgtaccaaaagactacggaggacgaggtccatatttgccacaatcaggatggctatagctacccttcacgtcaaatggtgtccctggaggacgacgtggct

SEQ ID NO: 16126 - DNA, 2580 bp, synthetic construct
  misc_feature 1..2580: note = source = /note="Description of Artificial Sequence: Synthetic coding sequence"
  source 1..2580: mol_type = other DNA
atgggcccgtggggctggaagttgcggtggaccgtggcactgctactggctgcggccgggactgcagttggggacagatgtgagcgcaatgagttccagtgtcaagacggaaaatgcatatcttataagtgggtgtgtgacgggagcgccgagtgtcaggatggctcagacgagagtcaggagacatgtctctcagtaacatgcaagagcggggacttcagctgcgggggtagagtgaaccgttgtatcccacagttttggcgctgtgacggacaggtggattgcgataatggcagtgatgagcagggctgtccgcccaaaacttgtagtcaagacgagttccgttgtcacgacggtaaatgcatctccaggcagtttgtttgcgacagcgatcgcgactgcctcgacggctcagacgaggcctcttgtcccgtgctcacgtgtggtccagctagctttcagtgtaacagttcaacctgcatcccacaactttgggcttgcgataacgaccctgattgtgaggacgggtccgacgaatggccccagagatgccgcggactgtacgtgttccagggcgacagctctccttgttcagcctttgagtttcattgcctgtctggcgagtgtatacactcctcatggaggtgcgatggggggccggattgcaaagacaaatcagatgaggagaattgcgccgtcgccacatgccggcccgacgagtttcaatgttctgatggcaactgcatccacggctccagacagtgtgatcgggagtacgactgtaaggacatgagtgacgaggtgggctgtgtgaacgtaaccctgtgtgagggcccaaacaaatttaagtgccactctggcgagtgcatcacccttgacaaagtgtgcaatatggcacgagactgtcgggattggtcagacgagcctattaaggaatgtgggaccaacgagtgcctagacaacaatgggggttgttctcacgtgtgcaatgatctgaagattggctacgagtgcgattgccccgatggatttcagctggtggctcagcgcaggtgcgaagatatcgatgagtgtcaggaccctgatacctgctctcagctgtgcgtaaatcttgaaggagggtacaaatgccagtgtgaggagggtttccagttagacccacacaccaaagcttgcaaagcagtaggctccatcgcatacctgttcttcactaatcggcatgaggtgcgcaaaatgactctcgataggtcagaatatacgtccctcataccgaatttaagaaacgttgtggcactggacaccgaagtagcaagtaatcgaatctactggagcgacctctcacagcgaatgatctgttctacacagctcgatcgcgcacatggcgtttcctcatacgatacagtgatcagtagggacatccaagcacccgatgggctggcagtggattggattcactctaatatttactggacggactccgtcctagggacagtgtccgtcgctgacacaaaaggagtgaaacgaaagacactgtttcgagagaacggatccaagccacgggccatcgtggtggatcctgttcacggattcatgtactggaccgactggggaacacccgccaaaatcaaaaaaggaggattaaacggcgtcgacatctactcccttgtcactgagaatatccagtggccgaacggtataacattggacctgctttcaggtagactgtactgggtagatagcaagctccattccatcagctcgattgacgtaaatgggggaaacaggaagaccattcttgaagacgagaagcgactcgcacaccccttttctctggcagtgttcgaagacaaagtgttttggaccgacataatcaacgaggccattttttctgcgaacagactgaccggaagtgatgtaaaccttctggcagagaacttgctgtcgccagaagacatggtcctctttcacaacctgactcaaccccggggtgtaaactggtgcgagaggacaaccttgtcaaatgggggatgtcagtacctctgcctacccgccccgcagatcaacccacattcaccaaagttcacctgcgcttgtccagatgggatgctgctggctagggatatgaggagttgtctgacggaggccgaagctgccgtcgccacgcaggaaactagtaccgttagactgaaagtcagtagcaccgccgtgcggacccaacacaccactacaagacctgtcccggacacttccagactccccggagcaacacctggcctgacaacagtggagatagtcacaatgagtcaccaggccctcggagacgtggccggacggggtaatgaaaaaaagccttctagtgtgcgcgcccttagtattgtgttgccgatcgttcttctagtgttcctgtgcttaggggtcttcctactgtggaagaactggaggcttaaaaatatcaactctattaatttcgataacccggtttatcaaaaaaccacagaagatgaggtgcacatctgccataaccaggatggctacagctaccctagtcggcagatggtcagtttggaggacgatgttgcg

SEQ ID NO: 16127 - DNA, 2580 bp, synthetic construct
  misc_feature 1..2580: note = source = /note="Description of Artificial Sequence: Synthetic coding sequence"
  source 1..2580: mol_type = other DNA
atgggcccctgggggtggaaactacgctggacagtggcgctgttgctggctgcagcaggaaccgccgtcggagacaggtgtgagaggaacgagtttcagtgccaggatggtaaatgtatttcatataagtgggtgtgcgatggctcggccgaatgccaggacggctcagacgagagtcaggagacatgcctctccgtgacatgtaaatcgggtgattttagttgcggaggtcgcgtgaacagatgcattccccagttttggcggtgtgacggccaagtggactgtgacaacggatctgacgagcaggggtgtccccccaagacctgttcccaagacgaattcaggtgccacgacggaaagtgcattagtagacagttcgtgtgtgactccgatagagattgcctggacggatccgatgaagcctcatgccccgtattaacctgtgggccagctagtttccaatgcaacagctctacttgcattccccagctgtgggcctgtgacaacgatcccgactgtgaagacggtagcgacgagtggcctcagcggtgcagaggcctgtatgtgtttcagggcgactcgtccccctgcagcgcttttgaatttcactgcctgtctggggagtgcatccatagctcctggagatgcgatggcggcccagactgcaaggacaagtccgatgaggagaattgtgccgtggcgacctgccgaccagacgagtttcagtgctcagatggaaattgtatccacggctcaaggcaatgtgatcgggaatatgattgcaaggatatgtccgatgaagtaggatgcgttaacgtcacattgtgtgaaggcccaaacaagttcaaatgtcattcaggcgaatgtattacactggataaagtgtgtaatatggcacgcgactgcagagactggagcgacgaacctattaaggagtgcgggactaatgagtgtctcgataacaacggcggatgcagccacgtgtgcaatgacctgaagattggatatgaatgtgactgtcccgacggttttcagcttgttgcacaaaggcgatgcgaggacatcgacgaatgccaggacccagacacgtgttcccagctttgtgtgaaccttgaaggaggttataaatgtcagtgcgaggaaggctttcagctggatcctcataccaaagcgtgcaaagcagtgggcagcattgcctatttattctttaccaacagacacgaagtgcgcaagatgacactcgatcgctccgagtacacgagcctgattcccaacctgcgcaacgtcgttgccctggatactgaagtggctagcaaccgtatatattggtctgacctctctcagaggatgatatgttctacacagctggatagggctcacggggtgtccagctacgacacggtcatctcacgcgacatccaggcccccgacggtctggccgtggactggatacactccaacatatattggacagattctgtgctgggcacagtctccgtggccgatacaaagggcgtgaagagaaaaactctgttcagagagaacggttcaaagccacgtgcaatcgttgtggaccccgtgcacgggttcatgtactggactgattggggaacgcctgcaaagataaaaaaggggggcctcaatggtgttgacatatattcccttgtgaccgagaatattcagtggccaaatgggatcaccctggatcttctgtctggacggctctattgggttgatagcaagctccattcaatcagctctatcgacgtcaacggaggtaatcgcaaaaccattctggaagatgaaaagcgcctggcccacccatttagtctggccgtttttgaagataaagtgttttggaccgatatcatcaatgaggccattttcagtgcgaataggctgacgggcagtgatgtaaacctgctagcagagaacctgctgagtcccgaggatatggtgcttttccacaatcttacgcagcctagaggggtgaattggtgtgaacgtaccaccctatccaacgggggttgccagtacctttgcctacccgctccccagatcaacccacactcgcccaaattcacctgtgcctgtcctgatggaatgttattggctcgcgacatgaggagttgtcttacagaagcagaagctgccgtggccacccaggagacttcgacagtaaggctgaaggtttccagtacagcagtgcgaactcagcatactactacccgtcccgtgcccgacacctcccggcttcctggggcgacgccaggcctgacaactgtcgagatagtaacaatgtcgcaccaagccctgggagatgtggctgggcgcgggaatgagaagaagccctcatctgtgcgtgccttgagtatcgttttgccgattgtgctgctggtcttcctgtgtttgggagtatttctcctttggaagaactggagactaaagaatatcaatagcatcaacttcgacaacccagtctatcagaaaaccactgaagacgaagtgcatatttgtcataatcaggatggctactcttatccctcccgacagatggtctccttggaggacgatgttgct

SEQ ID NO: 16128 - DNA, 2580 bp, synthetic construct
  misc_feature 1..2580: note = source = /note="Description of Artificial Sequence: Synthetic coding sequence"
  source 1..2580: mol_type = other DNA
atgggcccctggggctggaaattgcggtggaccgtggcgctcctactcgcagcagcaggaacggccgtcggtgatcgatgcgagcgcaatgagttccagtgccaagacggaaaatgtataagctacaagtgggtgtgtgacggctccgctgagtgtcaagacggcagtgatgaaagtcaggagacatgtctcagtgtgacttgcaagtccggcgatttcagttgcggcggccgggttaaccggtgcataccccagttttggcgttgcgacggccaagtcgactgtgacaacggttcagatgaacagggatgcccgccaaaaacgtgctctcaagatgagtttcgatgtcacgatgggaagtgcatcagccggcagttcgtatgtgattcagaccgagattgcttggacggatcagatgaggcctcttgtcctgtgctcacttgtggtcccgcctcatttcagtgtaattcttcaacctgtattccccagctctgggcctgcgataatgatccagattgcgaagacggatcagacgaatggccacagagatgccgtggactttacgtgttccagggcgattcgtccccctgcagcgcttttgagttccactgcctgagcggggagtgtatccacagttcctggagatgcgacggcggaccagactgcaaagataagagcgatgaggagaactgcgctgtggccacatgtaggccagatgagttccagtgctctgacggcaattgcattcacgggagtcggcagtgtgacagggagtacgactgtaaagacatgagcgatgaggtcggttgtgttaacgtcactctctgtgaaggcccaaacaaattcaaatgtcactccggggagtgtataactctggacaaggtttgcaatatggcccgggactgtcgcgactggtcagacgaacccatcaaagagtgcggaacaaacgagtgtcttgacaataacggaggttgtagccacgtctgtaacgatcttaaaattgggtacgaatgcgactgccctgacggcttccagctcgtggctcagcgaaggtgcgaagacattgacgaatgccaggacccggatacatgctcccagttgtgtgtgaatctggaggggggttataagtgtcaatgcgaagaaggattccagctggatccgcatactaaggcctgtaaagctgttggttctatagcttacctgttttttacaaaccgtcacgaggtgaggaagatgacactagaccgcagcgagtacactagccttattcctaacctccgtaatgtggtggccctggacacagaagttgcgagcaataggatttactggagcgacttgtctcagcgaatgatttgttctacccagttagaccgcgcacacggcgtttctagctacgacaccgtcatcagtcgcgacattcaggcccccgacggactggccgtcgattggatccatagcaacatctattggactgacagcgttcttggcacagttagcgttgcagacacaaaaggagtgaagaggaagaccctctttcgcgagaacgggtccaaacctcgcgccatagtggtcgaccctgtgcatggattcatgtactggacagactggggcacacctgctaagatcaaaaagggtggactcaacggcgtcgatatttactctttggtgactgaaaatatccaatggcccaatggtatcacactggacctactgagcggacgcctctattgggtagatagtaaactgcattccatcagcagcatagacgtcaatggaggcaacaggaagacaatccttgaagacgagaaaagactggctcacccgttttctctggcggttttcgaagacaaggttttctggacagatattattaacgaagccatattctcagctaataggctgactggttctgatgtgaatctcttggccgaaaatctcctctcgcctgaggacatggtcctcttccataacctgacccagcccagaggcgtcaactggtgcgagcgcaccactctcagtaatggagggtgccagtatctttgtctgcctgcgccgcaaattaaccctcatagccctaaattcacatgtgcgtgtccagacggcatgctgctcgccagggatatgcgtagctgcttgacagaagcggaagcagccgtggccacccaggagacctcaacagtgcgactgaaagtctcatcgactgcggtccgtacgcagcatactactacaagaccagtgcctgacacatcccggctgcctggggcgactcctggactgacaacagtcgaaatcgtcaccatgtcacaccaggcattgggcgatgtcgccggccgtggaaacgaaaaaaaaccatcaagcgttcgtgcactgagcattgtgctccccatcgttctcctagttttcctgtgtctgggtgttttccttctttggaagaattggagactaaagaacatcaacagtattaacttcgataaccccgtgtaccagaaaaccactgaggatgaggtgcatatttgccacaaccaggacggctatagctacccatcacggcagatggtatcactggaagacgacgtcgcg

SEQ ID NO: 16129 - DNA, 2580 bp, synthetic construct
  misc_feature 1..2580: note = source = /note="Description of Artificial Sequence: Synthetic coding sequence"
  source 1..2580: mol_type = other DNA
atgggaccttggggctggaaactccgctggaccgtggcactcctcctcgcggcagcaggaactgcagtgggagatcgttgtgaaaggaacgaattccagtgccaggacggtaaatgtatttcgtacaagtgggtctgtgacggatcagccgaatgccaggacggctccgacgaatcacaagaaacttgtctgtcggtcacttgtaagtcgggtgatttctcatgcggtggacgcgtgaatagatgtattcctcaattctggaggtgcgatggccaagttgattgtgataacggatcggatgaacagggttgcccaccaaaaacgtgttcccaggatgaattccgttgtcatgatggtaaatgcattagccgacaatttgtgtgtgacagcgacagggattgccttgacggatccgacgaagcaagctgtcctgtgcttacctgcggccccgcctcgttccaatgtaatagctccacttgtattccgcagctttgggcatgtgataatgatccggattgcgaggacggatccgatgaatggccacaaagatgtcgcggcctttacgtctttcagggcgattcgtccccgtgctccgcattcgagtttcattgtttgtcgggggaatgtatccattcctcgtggcgttgtgatggtggtccagattgtaaagataaatccgacgaagaaaattgcgcggtggctacttgtaggcccgatgaatttcagtgtagcgatggtaactgcatccatggcagcagacagtgtgatcgggaatacgattgtaaggatatgtccgatgaagtggggtgtgtgaacgtcacgctttgtgaaggaccaaataagtttaagtgtcattctggtgagtgtatcactctcgacaaggtgtgcaatatggcacgagattgtcgggattggtcagacgaacctattaaggaatgcggtaccaacgagtgtctggacaataatgggggatgtagccacgtgtgtaacgacctcaaaattggatacgaatgtgattgccccgacggttttcaactggtcgcacaacggagatgtgaggatattgacgaatgtcaagatcctgacacgtgttcgcaactgtgtgtgaatctcgaaggtggctacaagtgccaatgtgaagagggctttcagctggaccctcatactaaagcgtgtaaggccgttggatcaattgcttaccttttctttactaataggcatgaagtcagaaagatgacgctggaccgctcggaatataccagccttattccaaaccttcggaacgtggtcgctcttgatactgaggtggcctcgaatcgaatttactggtcagacctgtcccaacgaatgatctgtagcacccagcttgatcgcgcacatggtgtgtcgagctacgatactgtgatttcccgcgatattcaggcgccggatggtcttgccgtcgattggattcactccaatatctactggaccgattcagtgcttggaaccgtgtcggtcgcagatactaagggagtgaaaagaaagactctctttagggaaaacggaagcaaacctcgtgcaattgtggtggatcctgtccacggttttatgtactggactgactggggaactcctgcgaagattaagaaaggaggactgaacggtgtcgacatttacagcctcgtgaccgagaatatccaatggcctaatggcatcaccttggatcttctttccggccgactttactgggtggactctaaattgcactcgatctcatcgatcgacgtcaacggaggcaacagaaagactattctcgaggatgaaaagagacttgcacatcctttttcccttgcagtctttgaagataaggtcttttggactgatatcataaacgaggcaattttctcggcaaacagactgactggatccgacgtcaaccttcttgcggaaaatctgctctcaccagaagatatggtgctgtttcataacctcacgcaacccagaggagtgaattggtgtgaacgcacgaccctttcgaacgggggatgtcaatacctttgccttccagcacctcagatcaacccacattccccaaagttcacctgtgcatgtcccgacggcatgctgctggcacgcgatatgcgttcctgcctgaccgaagcagaggccgccgtcgctacccaagaaacctcgacggtgcgacttaaggtgtcgtcgaccgcagtgaggactcaacatactactacgcggcctgtgcccgacactagccggcttccaggagcaacccccggcctcaccactgtggagattgtcaccatgtcccaccaggctcttggagacgtggcaggtcgtggaaacgagaaaaaaccttccagcgtccgagctctgtcgatcgtactgcctatcgtgctgctcgtgtttctgtgccttggggtgttccttctttggaagaattggagactcaagaatatcaactcgattaactttgataatcctgtctaccaaaaaactaccgaagatgaagtccacatctgtcacaaccaggacggttacagctacccatcccgccagatggtatcgctcgaggacgatgtggca

SEQ ID NO: 16130 - DNA, 2580 bp, synthetic construct
  misc_feature 1..2580: note = source = /note="Description of Artificial Sequence: Synthetic coding sequence"
  source 1..2580: mol_type = other DNA
atgggaccttggggatggaaattgcgatggaccgtcgcactccttcttgcggcagcgggtaccgcggtgggagatcgctgtgaacggaacgaatttcagtgccaggatggcaaatgtatctcctacaagtgggtgtgcgacggtagcgcagaatgtcaagatggatccgatgaaagccaggaaacgtgcctgtcggtgacctgtaagtccggtgacttttcctgtggtggtagagtgaataggtgcatacctcaattctggcggtgtgacggccaagtcgattgtgataacggatcggatgagcagggatgcccacctaaaacttgttcgcaagatgagtttaggtgtcatgatggtaagtgtatttcgagacagtttgtgtgtgactcggaccgggactgtcttgacggaagcgatgaagctagctgtccagtgctgacttgtggtcccgcaagttttcaatgtaatagctcaacttgcatccctcaactttgggcctgtgacaacgacccagattgtgaagatggctcggacgagtggccgcaacgttgccgtggactttacgtgttccagggggattcgtcgccatgctcggccttcgagttccattgcctgagcggggagtgtattcactcgtcgtggcggtgcgacgggggccccgattgcaaggacaagtcggatgaagagaactgcgccgtcgccacttgtcgcccagacgagttccaatgttcagatggaaactgtatacacggatctcgacagtgtgatcgggaatacgattgtaaggatatgtccgatgaagtcggttgtgtgaatgtgactctctgtgaaggtcctaacaagttcaagtgtcattcaggagaatgtatcacccttgataaggtgtgtaacatggcccgagactgtagagattggtcggacgaaccaattaaggagtgtgggactaatgaatgccttgacaataatggcgggtgttcccacgtgtgcaacgacctgaagattggatacgaatgcgattgtcctgatggttttcaactcgtggcccaaagaaggtgtgaagatattgatgagtgtcaggacccggacacttgttcccagctttgcgtgaacctggaaggggggtacaagtgccagtgcgaagagggatttcagcttgacccacatactaaggcatgcaaggcagtgggatcgatcgcgtacctgttcttcaccaatcgccatgaagtccgaaagatgacgctcgatcgttccgaatacaccagccttataccaaatcttagaaacgtcgtggcgttggataccgaagtggcctctaaccgcatttactggtcggatttgtcacagcggatgatctgttcgactcaactggatagagcacatggggtcagttcgtacgatactgtcatctcccgagatatccaagcacccgatggattggcagtggattggattcattcaaacatttactggacggatagcgtgcttgggactgtttcggtcgcagatactaaaggagtgaagcgaaaaacgcttttccgcgagaacgggtcgaaaccccgcgctattgtggtggaccccgtgcatggttttatgtactggaccgattggggtactccagcgaagatcaaaaagggaggactcaacggtgtggacatatacagcctggtcactgagaatattcaatggcctaatgggatcactcttgatcttcttagcggcaggctgtactgggtggattccaaactgcattccatctcatcaatcgatgtcaacggcggcaatcgaaagacgatcctcgaggacgagaagagactggcacatccattttcgcttgcggtctttgaagataaggtcttttggaccgacataatcaatgaagctattttcagtgcaaatagacttactggctccgacgtgaatctgctggcagaaaatcttctctcgcccgaggacatggtgctttttcacaaccttacccaacctagaggagtgaactggtgtgaaagaaccaccctgtcaaatggaggatgtcagtacctctgtctgcccgcaccacagattaatcctcattcacccaagtttacctgtgcgtgccccgatggcatgctcctggctcgggacatgcgttcctgcttgactgaagctgaagcagcggtcgccacccaagaaaccagcaccgtgagacttaaagtctccagcaccgcagtgagaacccaacacaccactaccaggccagtccccgacacttcccgcctcccaggcgcgacgcccggtcttactaccgtggaaatcgtgaccatgtcgcatcaagccctgggtgacgtggccggtagggggaatgaaaagaagccatcctctgtgcgtgccttgtcaattgtgctgccaattgtgcttctggtgtttctctgtcttggagtgtttcttctgtggaagaactggagactgaagaatatcaattcgatcaacttcgataaccctgtttaccagaaaactaccgaggatgaagtccacatttgccataatcaagatggctactcctacccatcaaggcaaatggtgtcacttgaagatgatgtggcg

SEQ ID NO: 16131 - DNA, 2580 bp, synthetic construct
  misc_feature 1..2580: note = source = /note="Description of Artificial Sequence: Synthetic coding sequence"
  source 1..2580: mol_type = other DNA
atgggtccttggggctggaaactgcgttggacggtggcactgctccttgccgcggcaggtaccgccgtcggggatcgttgtgagcgaaacgaattccagtgtcaggacggaaaatgcatttcgtataaatgggtgtgcgacggttctgccgagtgtcaggacggttcagatgagagtcaggagacctgtttgtcagtgacttgcaagagtggggatttttcctgtggggggcgtgtgaatagatgtataccccagttttggagatgcgatggtcaagtggattgtgataatgggagtgatgagcaaggatgccctcccaaaacctgctctcaggacgagttcaggtgccacgatggtaagtgcatatccagacaattcgtgtgcgacagcgaccgggactgtctggacgggagtgatgaggcctcttgcccagttctcacctgtggcccagccagctttcagtgcaatagcagtacttgcatcccccagctctgggcttgcgacaatgatcccgactgtgaggacggatctgatgagtggccacagcgttgcagagggctgtatgtgttccaaggagatagtagtccgtgttctgcttttgagtttcactgcctgagtggcgagtgcatccattcctcatggcgttgcgatggggggcctgattgcaaggacaagtccgacgaagaaaattgtgccgtggccacctgccgaccagacgaatttcaatgctccgacggcaattgtatccatgggagccgacagtgtgatcgagagtacgactgtaaggacatgtccgatgaggttggctgtgtgaatgtgacgttatgcgagggccccaataaattcaaatgccacagcggagaatgcatcaccctggataaggtctgtaacatggcccgagattgccgagactggtctgatgagccaataaaggagtgcggcactgcagaatgtctagataacaacggtggctgttcccatgtgtgcaacgacctgaagatcgggtatgaatgtctttgcccagatggttttcagttggttgcccagagaaggtgtgaagacattgacgaatgtcaggatcccgacacctgttctcagttgtgtgttaatctggagggtggatataaatgtcagtgtgaggaaggtttccagctggatccgcataccaaagcttgcaaagcagtaggtagcatagcctacctgtttttcactaatcgacatgaagtacgaaaaatgaccctcgatcggtcggaatacacctccttgatacctaaccttaggaatgtcgtcgcccttgacaccgaggtggcctcaaatcgaatctattggagcgacttgtcacaaagaatgatttgcagcacacagcttgaccgggctcacggtgtaagctcgtacgatacagtcatatcacgcgacattcaggcgccggacgggctggcagtggattggattcactccaacatctactggacggacagtgtgctgggaaccgtgagcgtggccgataccaagggcgtaaagcgaaagactctgttcagggaaaacggatcaaagcctagagccatagtcgtagacccagtccatgggttcatgtactggacagattggggcacccctgcaaagatcaagaagggggggctgaatggggtggacatctactctctggtaactgaaaatatccaatggccgaacggaatcactttagacctgctctctggccgactctactgggttgattctaagcttcattctattagctccattgacgtcaatggcggtaacaggaaaaccatactcgaggatgagaaaagactggctcatcctttctccctggctgtctttgaagataaggtcttctggactgacataataaacgaagccatcttttccgcaaatcggttgaccggatctgacgtgaacttgcttgcagagaatctgctctccccagaagacatggttctattccacaaccttacgcagcctagaggggtcaattggtgcgaaagaactactctctctaacggcgggtgtcagtacctgtgcctgcccgcccctcaaatcaatccccatagccctaagtttacatgcgcatgccccgatggcatgctgctggccagagacatgcgatcttgtcttacagaggcagaggccgcggtcgccacccaagaaacctcgactgtcagactaaaggtgtcgagcaccgcagtgcgaactcagcacacaacaacccgccccgtgcccgatacgagtcgactgcctggagccacccctggtctgacaaccgtggaaatcgtgaccatgtcacatcaggccctcggcgacgttgccgggcgtggtaacgagaagaagccaagctccgtgcgagccctttctatcgtcctgcctattgtgttgctggtgtttctctgcctcggagtgtttctgctgtggaagaactggagactcaaaaatatcaattccattaatttcgacaatcctgtctatcagaaaaccaccgaagatgaagtgcacatttgccacaatcaagatgggtatagctatccttcacgacagatggtcagtttggaggacgatgtagcc

SEQ ID NO: 16132 - DNA, 2580 bp, synthetic construct
  misc_feature 1..2580: note = source = /note="Description of Artificial Sequence: Synthetic coding sequence"
  source 1..2580: mol_type = other DNA
atgggtccttggggctggaagcttcgctggacagttgcactgctcctggcggcagcaggtactgcagtcggtgacaggtgtgaacgcaatgagttccagtgccaggacggaaagtgcatcagttataagtgggtctgtgacggttccgcagaatgccaggacggtagtgacgaaagtcaggagacatgcttgagtgtcacctgtaagagcggcgatttctcatgtggcggtagggtcaacaggtgcatcccacaattctggagatgtgacggccaggtcgactgcgataacggctcagatgagcaaggatgcccccccaagacttgctcccaagatgagtttcgctgccacgatggcaagtgcatttccaggcaatttgtgtgtgattctgatcgcgactgcctcgacggaagtgacgaagcatcctgtcctgtgctgacatgtggccctgccagctttcagtgcaattcttctacatgtattccccaattgtgggcatgtgataacgaccctgactgcgaggatggcagtgatgaatggccacagagatgtaggggtctgtatgtattccagggagatagctccccctgttcagcgtttgagtttcactgcttgtctggtgaatgcatccacagttcctggagatgcgacggtggacccgactgtaaagacaaaagtgacgaggaaaattgcgcagttgctacatgtagacctgacgaatttcagtgttcagacggaaactgtatccacggtagtaggcaatgtgaccgcgaatacgactgcaaagacatgtccgatgaggtcggctgcgttaacgtgaccctgtgtgagggtccaaacaagttcaagtgccactcaggcgagtgcatcactctggataaggtctgtaatatggcaagggactgtagggactggtccgacgagccgatcaaggagtgcggcaccgctgaatgcttggataacaacggcggttgctctcacgtgtgtaacgacctgaaaatcggctacgaatgcctgtgtcccgatggctttcaactcgtcgctcagaggagatgtgaggacatcgacgagtgccaggaccctgatacatgctctcaactctgtgtgaacctcgaaggtggttataagtgtcaatgcgaggagggcttccagctggacccccacaccaaggcttgcaaagccgtaggctccatcgcatacttgttttttacaaacaggcatgaagtgagaaaaatgactctggataggagtgaatacacatccctgatccctaacctccgcaacgttgttgcactggacaccgaggtggcctccaacagaatctactggtcagacctgtcacaacgcatgatttgctctacacagctggaccgcgcgcacggcgtgagttcctatgatactgtaatctctagagacatccaggctccagacggtcttgcggtcgattggatccactctaatatatactggacagattctgtcctgggaaccgtgagcgtcgctgataccaagggcgtaaagaggaaaacactgttcagggaaaacggatctaagccccgcgcaatagtagttgaccctgttcacggcttcatgtactggaccgattggggaacaccagccaaaattaagaagggaggactgaatggtgtcgatatatactctttggttacagaaaatattcagtggccgaacggtatcacccttgatctgctgtctggaaggctctactgggtggattcaaaactgcactctatcagctccatagatgttaatggtggaaatcgcaagaccatccttgaagatgagaagcgcctggcccatcctttctccttggccgtgttcgaggataaggttttctggaccgatattatcaacgaggctatcttctctgctaatcgcctgacaggctccgacgttaacctgcttgctgaaaatctgctttcacctgaggacatggtactgtttcacaatctgacacagccaagaggagtaaactggtgtgaaaggactacactttctaatggtggttgtcaatacctttgcctcccggcgcctcaaattaatcctcactctcctaagttcacatgcgcttgccccgacggaatgcttctggcacgcgatatgcgcagttgccttaccgaagcggaggctgctgttgctacccaggaaacttcaacagttcgcctgaaggtctcaagtaccgcggtgaggactcagcataccaccaccaggcccgtgccagatacgagtagattgccaggcgcgactcctggacttaccactgttgagattgtaacgatgtcacaccaagctcttggtgacgtggccggtcgcggaaacgagaagaagcctagctctgtcagagccctcagtatagttctgcctatcgtgctgctggtgttcctgtgtcttggagtctttttgctgtggaagaactggaggctgaagaacataaattccatcaattttgacaacccagtataccagaagactacggaggacgaagtgcatatttgtcacaaccaggacggttactcatacccttcccgccagatggtctctttggaggatgatgttgcg

SEQ ID NO: 16133 - DNA, 2580 bp, synthetic construct
  misc_feature 1..2580: note = source = /note="Description of Artificial Sequence: Synthetic coding sequence"
  source 1..2580: mol_type = other DNA
atggggccttggggatggaagctgcgctggactgtggcactgctgctggctgcagcgggaacggccgtgggcgacaggtgtgagcgtaatgaattccagtgccaagacggcaagtgtatttcatacaagtgggtgtgtgatggatcagccgaatgtcaggatggctcggacgaaagccaagagacgtgcctgtccgttacttgtaagtcgggcgacttctcgtgcggcggacgcgtgaatcgctgcatcccgcagttctggcggtgcgacgggcaagtcgactgcgacaacggcagtgacgaacaaggatgcccgccaaagacttgctcgcaggacgaatttcgttgccacgacggtaaatgtatctcacgccaatttgtctgcgactcagatcgggattgcctggacggctctgatgaggcgtcgtgcccggtcctgacctgtggaccagcgagtttccagtgcaactcctccacttgcatcccgcaactgtgggcatgcgacaatgacccagattgcgaggacggttcggacgaatggccgcagcgctgcagagggctgtatgtgttccagggtgactcaagcccatgctcagcctttgagttccactgtttgagcggagagtgtatccactcctcatggcgctgcgatggaggtcctgattgcaaagacaagtccgacgaagaaaattgtgcagtagccacctgccggcccgatgagttccagtgttccgacggcaactgcatccatgggagccggcagtgcgacagagagtacgactgcaaagatatgtcagacgaagtcggctgcgtgaacgtgaccctctgcgagggaccaaataagttcaaatgccactcaggagaatgcataactctcgacaaagtgtgcaatatggccagggactgcagggactggtcagatgagccgattaaggaatgcggtactgcggaatgcctggacaataacggcgggtgtagccatgtgtgtaacgatctgaagattggatacgagtgcctctgtccagatggattccagctggtggctcagcggagatgtgaagatattgatgaatgccaggaccctgatacctgttcgcagttgtgtgtgaatctggagggaggctacaagtgccaatgcgaggagggattccaactggatccacacactaaagcctgcaaggccgtcggatctatcgcgtacctgttcttcacgaacaggcatgaagtccgcaagatgactctggatagaagtgaatacacctctctcatcccgaacctgcgcaacgtggtggccctggataccgaagtggcttccaaccggatctactggtccgacctgtcccagcggatgatctgctcgacccagctggatcgggcccacggagtgagctcgtacgacaccgtgatctccagagatattcaagccccggacgggttggctgttgattggatccattcgaacatctactggacggactccgtgctgggaacggtgtccgtggctgatacgaaaggagttaagcggaaaaccctgttcagggagaacggatcgaagccacgtgcaatcgtggtcgacccggtccacggtttcatgtactggaccgactggggaaccccggctaagatcaagaaaggcgggctcaacggcgtcgacatctacagcctggtgacggagaacatccagtggcctaacggaattactctggatttgctgtcaggtcgactctactgggtggactccaaactgcactccatcagcagcattgacgtgaacggaggaaatcgcaagactatcctggaggacgaaaagagactggcacacccgtttagccttgcagtgtttgaagataaggtgttctggaccgatatcatcaacgaagccattttctcggccaaccggctgactggatctgacgttaacctcctcgccgagaatctgctttcgccggaggacatggtgttgttccataacctgacgcaaccacggggagtcaactggtgcgaacggaccactctcagcaatggcggttgccagtacctctgtttgccggcgccccaaatcaaccctcattcacccaaattcacctgcgcttgtccggatggaatgctcctggccagggacatgcgctcgtgcctgacggaagccgaagccgctgtcgcgacccaagaaaccagcaccgtcagactgaaggtgtcctccaccgcagtgcgcactcaacacaccacgacgaggcccgtgcctgatacctcgaggctgcctggcgcgacccctggacttactaccgtcgagatcgtgactatgtcgcatcaggcactgggcgacgtggctggcaggggaaatgaaaagaagccgtcgtcagtgcgggccctgtctatcgtgctcccgatcgttctcctcgtctttctgtgcctcggggtctttctgctctggaagaattggcgactcaagaatatcaactcgatcaactttgataaccctgtgtaccaaaaaacgactgaagatgaggtgcacatctgccacaaccaggatggttattcctacccgtcccggcagatggtgagtctggaggatgacgttgcc

SEQ ID NO: 16134 - DNA, 2580 bp, synthetic construct
  misc_feature 1..2580: note = source = /note="Description of Artificial Sequence: Synthetic coding sequence"
  source 1..2580: mol_type = other DNA
atgggaccatggggatggaaactcagatggacggtcgcgctgctgctggcagccgctgggacggccgtgggagacagatgcgaaaggaatgaattccagtgtcaagatggcaagtgcatctcttacaaatgggtctgcgatggctctgcggaatgtcaggatggctccgacgaatcacaggaaacctgtctaagcgtgacctgcaaatcaggcgacttcagctgcggcggacgggtcaaccgatgtatccctcagttttggaggtgcgatggccaggtcgattgcgataacggttcagatgagcagggctgtccgcctaaaacctgttctcaggacgaatttaggtgtcacgacggcaaatgtatatctagacagtttgtgtgcgactctgaccgcgactgccttgacggctcggacgaggcatcttgtccagtgttgacgtgcggccccgcctcttttcagtgcaacagttctacctgcatccctcaactgtgggcgtgtgacaacgaccctgattgcgaagatggatccgatgagtggccccagcgctgtagggggctgtatgttttccagggtgacagctccccttgttcagcatttgagttccactgcctaagcggcgaatgcatccatagctcatggcgctgtgacggaggacccgattgcaaggacaaaagcgacgaagaaaattgcgcggtggctacgtgccggcctgatgaatttcagtgttctgacggtaattgtattcacggtagccgtcagtgcgacagagaatatgattgcaaagacatgagcgacgaagtgggctgtgttaacgtgacgctgtgcgagggcccgaataaattcaagtgtcattcgggggagtgcataacgctggataaagtctgtaacatggctcgagattgtcgtgactggtctgacgagcctattaaagaatgtggaacagctgagtgtctggataataacggaggatgttctcacgtgtgcaatgatctgaagattggatacgagtgtttatgtccggatggctttcagttggtggcgcagcggcgctgtgaagacatcgacgaatgccaagatcccgacacttgttctcaattatgtgtcaatctggaggggggatacaagtgccaatgcgaggaaggcttccaactcgacccccataccaaggcgtgcaaagccgtgggctctatagcatatcttttctttaccaaccgccatgaagtgcgtaagatgaccttggacaggtccgagtacaccagtcttatccctaacctgcggaacgttgtcgctcttgatacagaggtagcctcgaatagaatctactggagcgacttgagtcagcgtatgatttgtagtacccagctcgatcgggcccacggcgtctctagttatgacacagtaatctcgcgggacattcaggccccggacggcctggctgttgactggattcactcaaacatatactggactgattccgtcctcggtactgtaagcgtggcagacacaaaaggcgtgaaacgcaagactctattcagggagaatgggtccaagcctcgggcaattgtcgtggacccagtgcatggcttcatgtactggaccgattggggaactcccgccaaaattaaaaagggcggactgaatggtgtggacatttatagcttggtgacggaaaatattcagtggcctaacggaattactctcgatctgctgtctgggcggctgtactgggtggattccaaacttcattccatctccagtatcgacgtgaatggggggaacaggaaaacgatcctcgaagatgagaagcgccttgcgcaccctttctcgctcgcggtctttgaggacaaagtcttttggactgatatcatcaatgaggcgattttctccgcaaatcgcctgaccggatctgatgtcaatcttctcgcagaaaatctcttatcaccagaggatatggtattatttcacaacttgacccaaccaagaggcgttaactggtgcgaacggaccaccctctccaacggcgggtgtcagtatttgtgtctgccagcccctcagataaacccacacagtccgaaattcacctgcgcctgccccgacggcatgctgttggcacgagacatgaggtcctgtctcaccgaggccgaggccgccgtggctactcaggaaacaagcaccgtaaggttgaaggtgagctctacagccgtgcgtactcagcacacaacgacaaggccagttccggatacgtcccgcctgccgggtgcgacgccgggattaacgaccgtcgagatcgtaactatgtcacatcaggcattgggagatgtcgccggacgggggaatgagaaaaaaccttcttccgtccgagctctgagcatcgtgttgcccattgtgctcctggtgtttctgtgcctcggggttttcttgttgtggaaaaattggcgactaaaaaacatcaattccatcaacttcgataatccggtgtatcagaagactaccgaggacgaagtccacatctgccataaccaggacggctacagctacccatcccgacagatggtatccctagaggatgatgtggcg

SEQ ID NO: 16135 - DNA, 2580 bp, synthetic construct
  misc_feature 1..2580: note = source = /note="Description of Artificial Sequence: Synthetic coding sequence"
  source 1..2580: mol_type = other DNA
atgggtccttggggatggaagctccgctggactgtggcgctgctccttgctgccgccggaactgcggtgggagacaggtgcgaacgcaatgaattccaatgtcaggatggaaagtgtattagctacaagtgggtgtgtgatggctcggcggagtgccaggacggcagtgacgagtcgcaggaaacctgcctgtccgtcacttgtaagtccggagacttttcctgtggaggacgtgtgaacaggtgtatcccgcagttttggcgttgtgacggccaggtggactgcgacaacggatccgatgagcaaggatgcccgccgaagacttgtagccaagatgagttccggtgccacgacggcaagtgcatctcacggcaattcgtgtgcgattccgaccgcgactgtctggatggatcagatgaggcatcgtgccctgtgttgacctgcggcccagcatccttccagtgtaactcctccacctgcatccctcagctgtgggcctgcgataatgatccagattgcgaagatggtagcgacgaatggccgcaaagatgccgcggtttgtacgtgtttcagggcgactcatccccatgcagcgccttcgaatttcactgcctctcgggagagtgtatccactcctcctggcgctgcgatgggggaccagattgcaaggacaaatcggatgaggaaaactgtgctgtcgctacttgcaggccggacgagttccaatgctcggatggaaactgcattcatggatcgcgccagtgtgatcgggaatacgattgtaaggacatgtcagacgaggttgggtgcgtcaatgtgaccctgtgcgagggaccgaacaagtttaagtgccattcgggagaatgcatcacgctggataaagtgtgtaatatggcccgcgactgtcgggactggtccgacgaacctatcaaagagtgtggaactgcagagtgcctcgacaacaacggcggatgctcgcacgtgtgcaacgacttgaagattggatacgaatgcctgtgcccagacgggtttcagctggtcgcgcagcgccggtgcgaagacatcgatgagtgccaggatccagatacgtgcagccaactgtgcgtgaatctcgaaggaggctacaaatgccagtgcgaagagggctttcagctcgatccgcataccaaagcgtgcaaggccgttggaagcatcgcatatctcttcttcactaacagacacgaggtgaggaaaatgacccttgaccggtcagagtacacctccctgatcccgaatctgagaaacgtggtggcactggacaccgaggtcgcctcgaacagaatctactggtcggatctgtcgcaacgcatgatctgctcgactcagctggaccgcgcacatggagtgtcttcctacgacactgtgatctcccgcgacatccaagccccggatggactggcggtggactggatccacagcaacatctactggacggattcggtgctcgggactgtatcggtggctgacaccaagggtgtgaaacggaagaccctgttccgcgaaaacgggagcaaaccgcgcgccatcgtcgtggaccctgtgcatggattcatgtactggactgattgggggacgccagcgaaaatcaaaaaggggggtcttaacggagtcgatatctacagcctcgtgaccgagaacatccaatggcctaatggaatcaccctcgacctgctctccggaagactttactgggtggactcgaagctgcattccattagttcaattgacgtgaacggcggcaataggaaaactatactcgaggacgagaaacggctggcacacccattcagtctcgccgtgttcgaagataaagtcttctggactgatatcatcaacgaagctatcttcagcgcgaatcggctgacgggatccgacgtcaacttgctggccgaaaacctgctgtcgccggaggacatggtgctgtttcacaaccttactcagccgcgcggcgtcaactggtgcgagcgcaccacgctttccaatggcggctgccaatacttgtgcctgcccgccccgcaaattaacccgcattcgcctaagttcacttgcgcgtgccccgacggaatgctgctggctcgagacatgcggtcctgcctcaccgaggcagaggcagcggtggctacccaggagacttccactgtgagactgaaggtgtccagcaccgcagtgcgcactcagcatactactactcgccccgtgccggacacctccaggctgccgggtgcaacgccgggcctgaccaccgtcgaaatagtgactatgtcgcatcaggccttgggtgatgtcgcaggccgggggaatgagaagaagccgtcctcggtccgagccctgtcaatagtgctcccaatcgtcctcctcgtgttcctctgtctgggagtgttcctcctgtggaagaattggagactcaagaatatcaactcaatcaactttgataatcccgtgtaccagaagactacggaagacgaagtgcacatctgccacaatcaggatggctactcctacccttcccggcagatggtgtccctggaagacgatgtggcc

SEQ ID NO: 16136 - DNA, 2580 bp, synthetic construct
  misc_feature 1..2580: note = source = /note="Description of Artificial Sequence: Synthetic coding sequence"
  source 1..2580: mol_type = other DNA
atgggcccatgggggtggaaacttaggtggaccgttgcgctgctgctcgcagccgctggcactgctgttggtgatcgatgcgaacggaatgagtttcagtgtcaggatggtaagtgcatctcatacaagtgggtgtgtgacggttcagccgagtgccaggacggaagcgacgagtcccaggagacttgcttgtcggtgacttgcaaatcgggagacttcagctgcggaggacgagtcaaccgctgtatcccacagttttggagatgtgacggtcaagtcgattgcgacaatggatcggacgaacagggatgtccaccgaaaacctgttcccaggacgagttccggtgtcatgacggaaaatgcattagccggcagttcgtctgcgattccgatcgggactgtctcgacggatcggacgaggcctcatgtccagtgcttacctgcggacccgcgagcttccagtgcaactcgtcgacctgcatcccccagttgtgggcctgtgataacgacccggattgcgaagatggttcagacgaatggccgcaacgctgccgcggtctgtacgtgtttcagggagattcgtccccgtgctcggcgttcgaattccactgcctgtcgggagaatgtatccacagctcttggaggtgcgatggaggtccagattgcaaagacaagtccgacgaagaaaactgcgccgtcgcaacctgccgcccggacgaatttcagtgttccgacggcaactgcatccatggaagcaggcagtgcgaccgcgaatacgattgcaaggatatgtctgatgaggtcggctgtgtgaacgtgactctgtgcgaagggcccaataagttcaaatgtcactccggagagtgtattacgctggacaaggtgtgtaatatggctcgcgactgcagagattggtcggacgaaccaatcaaagaatgcggcaccgccgagtgccttgacaacaacggtggatgctcgcacgtgtgcaatgatctgaaaatcggctacgaatgcctttgccctgacggttttcaactggtcgcccagcgcaggtgtgaagatatcgacgaatgccaagatccggacacttgctcgcaactctgcgtgaacctggaggggggatacaagtgccagtgcgaagagggattccaacttgacccgcacaccaaggcttgtaaggccgtgggatccatcgcgtacctcttctttacgaataggcatgaggtcagaaaaatgaccttggatcggtccgagtacacctcgctgatcccgaaccttcgcaacgtcgtggccttggacaccgaagtcgcatcgaaccggatctactggtccgatctgagccagaggatgatctgctcgactcaactcgaccgcgcccacggagtgtcgagctacgacaccgtgatttcacgcgacatccaggcccctgacggactcgccgtcgactggatccactctaacatttactggaccgattcggtgctggggactgtgtcagtggctgacactaaaggtgtgaagagaaagacgctgttcagagaaaacggaagcaagcctagagccattgtggtggaccctgttcatggattcatgtactggactgactggggcactccggccaagattaagaaaggaggcttgaacggagtggatatctactcgctggtcaccgagaacattcaatggcctaatggaatcaccctggacctcctttccggccgcctgtactgggtcgactccaagctgcactccatctctagcatcgacgtgaacggaggcaacagaaagaccatcctggaagatgagaaacgcctcgcccatcccttttcgctggcggtgttcgaagataaagtcttttggaccgacatcatcaacgaagcgatcttttccgcgaacagacttaccggcagcgacgtgaatctgctcgccgagaatctgctgtctccggaagatatggtcctgttccacaatctgactcagccacgcggagtgaactggtgcgaaagaactaccctctcaaacggaggctgccaatacctctgtttgccagccccacaaatcaatccgcactcgccgaagttcacctgcgcctgtcctgacggcatgctcttggcccgcgacatgcggtcttgcctgaccgaagctgaggcagccgtcgcgactcaagaaacgtccactgtgaggttgaaggtgtcctccaccgctgtcagaactcagcataccaccactcggcctgtcccggacactagccgcctgccgggcgctaccccgggcttgaccaccgtggagatcgtgacgatgtcacatcaggccctgggagatgtggccggccggggaaatgagaagaagccatcatcggtccgcgccctgtcgatcgtgctgccgattgtcctgctggttttcttgtgcctcggagtgttcctcctctggaaaaactggaggctgaagaacattaactcgatcaatttcgataatcctgtgtaccagaaaacgaccgaagatgaagtgcatatctgccataaccaggatgggtacagctacccgtcgcgccaaatggtgtcgcttgaagatgacgtggct

SEQ ID NO: 16137 - DNA, 2580 bp, synthetic construct
  misc_feature 1..2580: note = source = /note="Description of Artificial Sequence: Synthetic coding sequence"
  source 1..2580: mol_type = other DNA
atgggtccgtggggttggaaactacgatggacggtagcgctattattagcggcggcgggtacggcggtaggtgatcgatgtgaacgaaatgaatttcaatgtcaagatggtaaatgtatatcgtataaatgggtatgtgatggttcggcggaatgtcaagatggttcggatgaatcgcaagaaacgtgtttatcggttacgtgtaaatcgggtgatttttcgtgtggtggtcgtgttaatcgatgtataccgcaattttggcgatgtgatggtcaagttgattgtgataatggttcggatgaacaaggttgtccgccgaaaacgtgttcgcaagatgaatttcgatgtcatgatggtaaatgtatatcgcgacaatttgtatgtgattcggatcgtgattgtctagatggttcggatgaagcgtcgtgtccggttctaacgtgtggtccggcgtcgtttcaatgtaattcgtcgacgtgtataccgcaactatgggcgtgtgataatgatccggattgtgaagatggttcggatgaatggccgcaacgatgtcgtggtttatatgtttttcaaggtgattcgtcgccgtgttcggcgtttgaatttcattgtttatcgggtgaatgtatacattcgtcgtggcgttgtgatggtggtccggattgtaaagataaatcggatgaagaaaattgtgcggtagcgacgtgtcgtccggatgaatttcaatgttcggatggtaattgtatacatggttcgcgacaatgtgatcgtgaatatgattgtaaagatatgtcggatgaagtaggttgtgtaaatgttacgctatgtgaaggtccgaataaatttaaatgtcattcgggtgaatgtataacgctagataaagtatgtaatatggcgcgagattgtcgagattggtcggatgaaccgataaaagaatgtggtacggcggaatgtctagataataatggtggttgttcgcatgtttgtaatgatttaaaaataggttatgaatgtctatgtccggatggttttcaactagttgcgcaacgacgttgtgaagatatagatgaatgtcaagatccggatacgtgttcgcaattatgtgtaaatttagaaggtggttataaatgtcaatgtgaagaaggttttcaattagatccgcatacgaaagcgtgtaaagcggtaggttcgatagcgtatttattttttacgaatcgtcatgaagttcgaaaaatgacgctagatcgatcggaatatacgtcgttaataccgaatttacgtaatgtagttgcgttagatacggaagtagcgtcgaatcgtatatattggtcggatttatcgcaacgtatgatatgttcgacgcaactagatcgagcgcatggtgtatcgtcgtatgatacggttatatcgcgagatatacaagcgccggatggtctagcggttgattggatacattcgaatatatattggacggattcggttttaggtacggtttcggtagcggatacgaaaggtgtaaaacgaaaaacgttatttcgagaaaatggttcgaaaccgcgagcgatagtagttgatccggttcatggttttatgtattggacggattggggtacgccggcgaaaataaaaaaaggtggtttaaatggtgttgatatatattcgctagtaacggaaaatatacaatggccgaatggtataacgttagatctactatcgggtcgtctatattgggtagattcgaaattacattcgatatcgtcgatagatgtaaatggtggtaatcgtaaaacgatattagaagatgaaaaacgtttagcgcatccgttttcgttagcggtttttgaagataaagttttttggacggatataataaatgaagcgatattttcggcgaatcgtctaacgggttcggatgtaaatctactagcggaaaatctattatcgccggaagatatggttctatttcataatctaacgcaaccgcgtggtgtaaattggtgtgaacgaacgacgttatcgaatggtggttgtcaatatttatgtttaccggcgccgcaaataaatccgcattcgccgaaatttacgtgtgcgtgtccggatggtatgttattagcgcgagatatgcgatcgtgtttaacggaagcggaagcggcggttgcgacgcaagaaacgtcgacggttcgactaaaagtttcgtcgacggcggtacgaacgcaacatacgacgacgcgtccggtaccggatacgtcgcgtctaccgggtgcgacgccgggtttaacgacggtagaaatagtaacgatgtcgcatcaagcgttaggtgatgtagcgggtcgtggtaatgaaaaaaaaccgtcgtcggttcgagcgttatcgatagttttaccgatagttctactagtttttttatgtctaggtgtatttctattatggaaaaattggcgtttaaaaaatataaattcgataaattttgataatccggtatatcaaaaaacgacggaagatgaagtacatatatgtcataatcaagatggttattcgtatccgtcgcgtcaaatggtatcgttagaagatgatgtagcg

SEQ ID NO: 16138 - DNA, 2580 bp, synthetic construct
  misc_feature 1..2580: note = source = /note="Description of Artificial Sequence: Synthetic coding sequence"
  source 1..2580: mol_type = other DNA
atgggaccatggggctggaaactgaggtggacagtggctttgctgcttgccgccgctggtactgctgtgggagaccgctgtgagcgtaacgagtttcagtgccaagacggaaagtgtatttcatacaagtgggtgtgtgacggctcagcagagtgtcaggatggaagtgacgaaagccaagaaacctgtcttagcgtaacatgtaaatccggagacttttcctgcggtggtcgcgtgaatcgctgtattcctcaattttggcgctgtgatggacaggtggattgcgacaacggatccgatgagcaaggttgtccccctaaaacctgttcacaagacgagtttaggtgtcacgatggaaagtgtatctcacgtcagttcgtgtgcgacagtgatcgtgattgtttggacggatcagatgaggcctcatgtccagtcctgacctgcggaccagcctcatttcagtgtaattcatccacttgtatcccccagctctgggcatgcgacaatgaccctgactgcgaggatggctccgacgagtggccacagagatgtaggggactctatgtttttcagggagattcctccccttgctctgctttcgaattccactgtctcagtggtgagtgtattcatagttcctggagatgcgacggcggccccgattgcaaggacaagagcgatgaggagaactgtgctgttgctacatgccgccctgacgagttccagtgctctgatggtaactgcattcacggcagccgtcaatgtgaccgtgaatatgactgcaaggatatgtccgacgaagtgggctgcgttaatgtgaccctgtgcgaaggaccaaataagtttaagtgccactcaggcgagtgtattactctggacaaggtgtgtaatatggctcgcgactgtagggattggagcgacgagcccattaaggaatgcggaactgctgagtgcctggataacaatggtggctgtagtcatgtgtgcaacgacctcaagataggctacgagtgcctttgccctgatggtttccagctggtagcccagagacgttgcgaagacattgacgagtgccaggatcccgacacatgctcacagctctgcgtgaacctcgaaggcggctacaagtgccaatgcgaagaaggttttcagctggacccacacaccaaagcatgcaaagcagtaggatctattgcatacttgttcttcacaaatagacacgaagttcgcaagatgaccctggataggtccgagtacacttcacttatacctaatctgcgcaatgttgttgcactcgacactgaggtagcctcaaacagaatttactggtccgatctttctcagcgcatgatttgctctacacaactcgaccgcgcccacggtgtaagtagttacgatactgttatctcccgcgatatccaagcccctgacggactggccgtagactggattcactccaacatctattggaccgatagtgtgctcggtaccgtaagcgttgctgacacaaaaggagtgaaacgcaaaaccctcttccgcgagaacggttccaagcccagggctatagtcgtcgacccagtacatggattcatgtattggacagactggggaacaccagctaagatcaagaagggcggcttgaacggcgtagatatttactcacttgtgaccgagaatatccaatggcccaacggtataactctcgacctcctgagcggacgtttgtactgggttgatagcaagcttcactctatctcctcaatcgacgttaacggtggtaacagaaagactatcctggaggatgagaagcgtcttgcccacccattctctctggccgtattcgaggacaaggtcttttggactgatattatcaacgaagcaattttttctgctaatagactcactggatcagacgtgaaccttctggccgaaaacctgctctcacctgaagacatggtgctgtttcacaacctgacccagcctcgtggcgtcaactggtgcgagcgcactactctgagtaacggaggatgccagtacctgtgtttgcccgccccacagataaaccctcatagccctaaattcacatgtgcatgcccagatggtatgctcctggcccgcgatatgcgttcttgtctgaccgaagccgaagctgccgttgccacccaagagaccagcactgttagactcaaggtgtcttccactgctgtgcgtactcagcacactacaaccaggccagtacccgacaccagccgtctgcccggagccacacctggactgactactgtagagatcgtgacaatgtctcaccaagccctgggtgacgtggccggccgtggcaacgagaaaaagccttctagcgttcgcgctctgtctattgttcttccaatcgtactgctggttttcctttgtctcggagtattcctcctctggaagaactggagactcaagaacatcaactcaattaattttgacaatcctgtttaccagaaaacaacagaggatgaagtgcacatctgtcacaatcaggacggctattcatacccctcacgtcagatggtgtcccttgaggatgacgtggcc

SEQ ID NO: 16139 - DNA, 2580 bp, synthetic construct
  misc_feature 1..2580: note = source = /note="Description of Artificial Sequence: Synthetic coding sequence"
  source 1..2580: mol_type = other DNA
atgggtccttggggttggaaacttagatggactgtggcactccttctggcagcagcaggtacggccgtgggcgaccgctgcgagagaaacgagtttcaatgtcaggacgggaagtgcatcagctacaaatgggtgtgcgacggatcggcagagtgtcaggacggaagcgatgaatcccaagaaacctgtctttcggtcacctgcaagtccggtgacttttcctgtggaggacgcgtgaataggtgcatccctcagttttggcgctgtgatgggcaggtggactgtgataacggatcagacgagcaaggttgcccacctaaaacctgttcgcaggatgagttccgctgtcatgatggaaagtgtattagccgacagtttgtctgcgattcggacagagattgcctggatggctccgatgaagcctcctgccctgtgcttacctgtggaccggccagctttcagtgtaacagctccacgtgcattccacaactttgggcctgcgacaacgacccagattgtgaagatggtagcgatgaatggcctcaacgttgtagaggactctacgtgtttcaaggtgactcttcaccctgtagcgcattcgaatttcattgtctttccggagaatgcatacactcatcgtggcgttgtgatggcggtccggattgtaaagacaagtccgatgaggagaactgtgcagtggccacttgtcgccctgatgagtttcagtgctcggatgggaattgtattcacggatcccgacaatgtgatcgcgagtacgactgtaaagacatgtcggacgaggtgggatgtgtgaatgtgaccctgtgcgaaggtcccaacaagttcaaatgccacagcggggaatgtatcactctggacaaggtctgcaacatggccagagactgtagggattggtccgacgaaccaattaaggaatgcggaactgcagaatgtcttgataacaacggcggatgttcccacgtgtgcaacgatctcaaaattggatatgagtgtctgtgccctgatggctttcagcttgttgcacagagacggtgtgaagatattgacgaatgccaagatccagatacttgttcacaactctgtgttaatctggaggggggctacaaatgtcagtgcgaggaagggtttcaactggaccctcataccaaggcctgtaaggcggtcggttcaatcgcataccttttcttcactaaccggcacgaagttaggaagatgactctcgataggtcagaatacacctccctcattcccaatcttcgtaacgtggtggcactggatactgaagtggccagcaatagaatctactggtcagatctctcgcaacggatgatttgctcgacccaactggatagagcacatggagtgagcagctatgataccgtcatctcgcgggacatccaagcaccggacggtctggcggtggattggatacattcgaacatctactggacggactcggtccttggcaccgtgtccgtggcagatactaagggcgtgaagagaaagacgctgtttcgggaaaacggatcgaagccacgggctattgtcgttgaccctgtgcacggttttatgtactggaccgattggggaacccctgcgaagattaagaagggtggccttaacggtgtggacatatactctctggtgaccgaaaacattcagtggccaaacggaattaccctggacctcctttccggacggctgtactgggtcgattccaagctccatagcattagctcaattgatgtaaacggaggaaatcgcaagaccatcctcgaagatgaaaagcggctcgcccatcctttttcgctcgcagtgtttgaggataaagtattctggaccgacataatcaacgaggccatattctctgctaaccgtcttacgggttccgacgtgaacctccttgcggagaatcttctgtcccccgaggacatggtccttttccacaacctgacccagccgaggggcgtgaactggtgtgaaagaaccaccctctccaacggaggatgccaatacctgtgtttgcctgcacctcagataaacccacatagccctaaattcacttgcgcgtgccccgatggcatgctgctcgcacgggatatgagatcgtgcctcaccgaagccgaagcggctgtggcgacccaggagacttcaactgttcgcctcaaggtcagctccaccgcagtgcgcacccaacataccactacgcgccctgtgccagacactagtaggttgcctggggccactccaggcctgactactgtcgaaatcgtcaccatgagtcatcaagcacttggtgacgtcgccggtcggggtaacgagaagaagccctccagcgtgcgggcactttctattgtgttgcccattgtgctgcttgtctttctttgtcttggagtgtttctgctgtggaaaaactggagactcaagaacatcaactcaataaacttcgacaatccagtgtatcaaaaaaccaccgaggacgaggtgcatatttgccataatcaagatggttacagctacccttcgcgccagatggtttccctggaggacgatgtggca

SEQ ID NO: 16140 - DNA, 2580 bp, synthetic construct
  misc_feature 1..2580: note = source = /note="Description of Artificial Sequence: Synthetic coding sequence"
  source 1..2580: mol_type = other DNA
atgggtccttggggttggaagctgcgctggacggtggcactgctgttagcggccgcaggcactgccgtcggcgaccggtgcgaacgcaatgagtttcagtgccaggacggcaaatgcatctcttacaaatgggtgtgcgatggttccgctgaatgccaagatggcagcgatgagagccaggaaacctgcctcagcgtcacctgtaagtctggtgacttttcttgtggcggcagggtcaaccgctgcatccctcagttctggcggtgcgacgggcaagtggattgcgataacggatcggacgaacaaggttgcccgccaaaaacctgcagccaggacgagttccgttgtcacgacggtaagtgcatcagccgtcaatttgtgtgcgattcggaccgagactgtctggacgggagcgacgaagcgagctgccctgtcctgacttgtggtcctgcttcgttccagtgtaactcatccacttgcattccacagctttgggcttgcgacaacgacccagactgtgaggatggaagcgacgagtggccccagcggtgtcgcggcctttacgtgttccagggagattccagcccttgcagcgcattcgaatttcattgcctgagcggcgagtgtatccacagcagctggcgttgcgatggtggcccggattgcaaggataaaagcgatgaagaaaactgcgcagtggccacgtgtcgccccgacgagttccagtgctccgacggcaactgtatccacgggtcccgccagtgcgatcgcgaatacgattgcaaggacatgtccgatgaggtgggttgtgtcaacgtcactctgtgtgaaggtcctaacaaatttaaatgtcatagcggcgaatgcatcaccctggacaaggtatgcaatatggcgcgtgattgtcgtgactggtctgatgagcctatcaaggaatgtggtacggcagagtgcctggataataatggagggtgtagccatgtgtgtaacgacctgaagatcggttatgagtgtttgtgtccagatggcttccagttggtggcccagcgcagatgcgaggatatcgatgagtgtcaggatcctgatacttgcagccaactgtgtgtcaacctggaaggcggttacaagtgccagtgcgaggaaggattccagctggaccctcataccaaggcctgcaaggctgtcggtagcattgcctatctgttctttaccaatcgtcatgaggttcgcaaaatgacgctggatcgaagcgagtacacgagcttgattccgaatttgcgcaacgtggtggcgctggacaccgaagtggccagcaaccgaatttactggagcgacttgtcccagcgcatgatttgctcaacgcagctggaccgcgcacatggcgtttcatcttacgacacagttatttcacgcgacattcaagcaccggacggattggcagtggactggatccactctaatatctattggacggatagtgttctgggcactgttagcgtcgcggatactaaaggtgtaaaacgaaagaccctattccgcgaaaacgggtctaaaccgcgcgcgattgtggtggaccctgtacatggctttatgtattggaccgattggggtaccccggccaagatcaagaaggggggtctgaatggcgttgatatctacagcttggtgactgagaatatccagtggcctaacggcataacgctggatttgctgagcggacgactgtattgggtggattccaagctacactcgatctcttcaattgacgttaatggtggcaatcggaagactattttggaagacgaaaagcgcctggcccatccatttagcctagccgtttttgaggataaggttttttggacggatatcatcaatgaggccattttctccgctaaccgcttgacaggttcggatgtgaacctgctggccgagaatctgttgagcccagaagatatggtcctgttccacaacctgactcagcctcgcggtgtcaattggtgtgaacgtaccactctgtcaaatggtggctgccagtatctctgcctaccggccccgcagatcaacccgcatagccccaagttcacctgtgcatgcccagacggtatgcttctcgcgcgtgacatgcgcagctgcttgacggaggccgaggcagccgtggccacccaagaaacttctactgtgcgcctgaaggtctcctcaactgccgtaaggacgcagcatacgacgacccgtcctgttccggatacgtcacgcctgcctggggccacgccgggtcttaccaccgtggaaattgtgactatgtcgcatcaagcccttggtgacgtggctggtcggggcaacgagaaaaagccttcttcagttcgagccctgagcattgtactgccaatcgtcctgctggtgtttctgtgcctgggtgtctttttactgtggaagaactggcgtttaaaaaacataaactctattaactttgacaaccctgtttaccaaaaaacaacggaagatgaggtgcacatatgtcacaatcaggacggttattcctacccaagccgccagatggtttctttagaagacgatgtggcg

SEQ ID NO: 16141 - DNA, 2580 bp, synthetic construct
  misc_feature 1..2580: note = source = /note="Description of Artificial Sequence: Synthetic coding sequence"
  source 1..2580: mol_type = other DNA
atgggtccttggggctggaaactgaggtggactgtggcattgctactagctgcggctggaactgcagtaggagatcgttgcgaacgaaatgaattccaatgtcaagatggaaaatgtatctcgtataaatgggtatgtgatggatccgcagagtgccaagatggatccgatgaaagtcaagagacttgtttatctgttacatgtaagtcaggagatttctcatgtgggggtcgtgttaatcgatgtattcctcagttttggcgctgtgacggtcaagtagattgcgacaatggttcagacgagcagggatgtccaccaaagacatgttctcaagatgagttcagatgccatgatggaaagtgcatatcccgacagtttgtctgtgatagtgaccgtgactgcctcgatggatccgatgaagcttcatgcccggtgctcacatgcggcccagcctcattccaatgtaacagtagcacttgtatccctcaactttgggcttgcgataatgatccagattgcgaagatggatccgatgagtggccacaacgttgcagaggattgtatgttttccagggagatagttctccttgttcagcatttgagtttcactgcttgagcggagagtgcatccattctagttggagatgtgatggcggaccagactgcaaagataaaagcgacgaagaaaactgtgctgtagctacatgtcgtcctgacgaattccagtgctccgatggaaactgtattcacggtagtcgacagtgtgatagagagtacgattgtaaagacatgtcagatgaagttggatgtgtgaacgtaacactttgtgagggacctaacaagttcaagtgtcattcaggagaatgtatcacgttggataaggtctgcaatatggcaagagactgcagggactggtctgatgaaccaattaaggagtgtggaactgcagaatgccttgacaataatggaggatgttcacatgtttgtaatgatctgaaaattggttacgaatgcttgtgcccagatggattccaacttgttgcacaacgaagatgcgaggacatcgatgaatgtcaggatccggacacatgttctcaactttgtgtgaatttagagggaggctacaaatgtcaatgtgaagagggatttcaactcgatccacatacaaaagcatgcaaggcagttggatcaattgcatatctcttctttacaaaccgccacgaggttcgcaagatgactcttgatcgatctgaatatacctcacttataccgaacctgcgtaacgtagtagcattggacacggaggttgcttcgaatcgaatttactggtctgatttgtctcaacggatgatctgcagcactcagcttgacagggcacatggtgttagctcctacgataccgtcatttctcgggatatccaagctccagacgggttagctgtggattggatacattctaacatttattggacagattccgttctcggtaccgttagcgttgctgatacaaagggagtgaagcgaaaaactttgttcagagaaaatggctcaaagccacgagctatcgttgttgatccagtccatggattcatgtactggactgactggggaaccccggcaaagatcaagaaaggaggacttaacggagtcgacatatatagtttggtaactgagaatattcagtggccgaacggcataacacttgatcttctgtcaggtcggctgtattgggtcgactctaaactccactctatctcttccattgacgtgaacggaggaaaccgtaaaactatattggaggatgaaaaaagactggcccatccgttctcgctcgctgttttcgaggacaaggtgttttggacagatattatcaacgaagctattttttcagcaaaccggttaactggaagtgatgtgaatctcctcgcagagaatctgttaagtccggaagatatggttcttttccacaacttgacacaaccaagaggcgttaattggtgtgaacgaaccacattatcaaatggaggatgccagtacttgtgcttaccagcaccacagatcaatcctcacagccccaaattcacatgcgcttgcccagatgggatgcttttagcaagggatatgcgttcatgcttaaccgaagctgaggctgcggtggctacacaagaaacgtcgacagtccgtctcaaagtttcatctacagctgttcgtacccaacatacgacgacacgaccagtcccggatacttcgagacttccgggtgctacacccggtcttacgaccgtagagatcgttaccatgtctcaccaggcattgggtgatgttgctggacgaggaaatgagaagaaaccaagttcggtgcgagcattgtcaattgttctacctattgtgttattagttttcctctgccttggcgtgttcttactgtggaagaactggcggctcaaaaacatcaattccatcaatttcgataatccagtgtatcagaaaacaacagaagacgaagtgcatatctgccacaatcaagacggatactcatacccatcacggcagatggtttcgctggaagacgacgtggct

SEQ ID NO: 16142 - DNA, 2580 bp, synthetic construct
  misc_feature 1..2580: note = source = /note="Description of Artificial Sequence: Synthetic coding sequence"
  source 1..2580: mol_type = other DNA
atgggtccttgggggtggaagctgcggtggactgtcgctttgttactagccgccgcggggaccgccgtgggagaccggtgcgagcgcaatgagtttcagtgtcaggacggcaaatgcatatcatataagtgggtgtgcgacgggtcggcggaatgccaggacggaagtgacgagtctcaggagacatgtctgagcgtaacttgcaagtctggcgacttttcctgtggtggacgtgtgaacaggtgtatcccacagttctggcggtgtgacgggcaggtagactgtgataacgggagtgacgaacagggatgcccacctaaaacctgctcacaggacgagttccgatgtcacgacgggaaatgcatcagccggcagtttgtctgtgactccgaccgagactgtctggacgggagcgacgaggcctcttgccccgtgttgacatgcggccccgcaagctttcagtgtaactccagcacctgtataccacagctgtgggcttgtgacaacgacccggactgtgaggacgggagtgatgaatggccccaaaggtgccggggcctgtacgttttccagggagacagtagcccctgtagcgcgtttgaatttcattgcctgagtggggagtgcatccatagctcttggcgctgtgacgggggacctgattgcaaggataagagtgatgaagaaaattgcgccgttgcaacttgccgtccggatgagtttcagtgcagtgacggaaattgcattcatgggagtcgccaatgcgaccgggaatatgattgcaaagatatgtctgacgaggtcggatgtgttaacgtgacgctttgtgaagggcctaataagttcaagtgccactcaggcgagtgtatcactctggacaaggtctgcaatatggcaagagactgtcgcgattggagcgacgagccgatcaaggagtgtgggactgccgaatgtcttgataataacgggggttgttctcacgtatgcaatgatctgaagatcggttacgagtgtctgtgtccggatggtttccagctagtggcacagcgcagatgcgaagacattgacgagtgccaggacccagatacatgttcccagttgtgtgtaaacctggaaggcggatataaatgccagtgcgaggagggtttccagctggatccccatacgaaggcgtgtaaggctgttgggagcattgcgtacctgttcttcactaatcggcacgaggtgcgaaagatgaccctcgatcggtccgaatacacgagtctaatcccgaacctgaggaacgtggtggcactcgatactgaggtcgcctcaaaccgaatttattggtcagatctcagtcagagaatgatctgctctacccagctggaccgagcccatggcgtgtccagttatgacacagttatctccagggacatacaggctcctgatggcctggccgtcgattggattcatagtaacatatattggactgattcagtgttaggcacggtaagcgtcgccgatacaaaaggcgtaaaacggaagactctgttccgggagaatggcagcaagccgcgggccattgtggtggaccctgttcacgggtttatgtattggaccgactgggggacacccgcaaaaatcaaaaaggggggactcaacggagttgatatctatagccttgtaactgaaaatatacagtggcccaacgggattacgctagacctcttgtcaggccgtctgtactgggtggactccaagcttcatagtatctcctccatcgacgttaacgggggcaacagaaagacaattttggaagatgaaaaacggctggctcatccgttttccctcgcggttttcgaagataaagtgttttggacagacattattaatgaagccatattctccgcaaacagactaaccggaagcgacgtcaatcttctggccgaaaacttactgtcccctgaagacatggtgctctttcataatctgacgcagccccgaggcgtgaactggtgtgagcgcacaaccctgtctaacggcgggtgccaatacctttgcctccccgccccgcagatcaatccccactcaccaaagtttacgtgtgcttgtcccgatgggatgctgctggcgcgggatatgcgaagctgtcttacagaagctgaagcagccgtggctactcaggagacctccaccgtcaggctgaaggtcagtagtactgccgtgcggacacagcatacaacgacaagacctgttcctgacacatcacgcttgcccggcgcaactccgggcctgacaacggtggaaatcgttacaatgtcacaccaggccctcggggatgtggctgggagggggaatgagaagaaaccctcaagcgtgcgggccttgagtatcgtgctgcccattgtcctgctcgtgtttctctgtttgggggtgttcttgctatggaaaaattggagattgaaaaatatcaacagtattaattttgacaaccctgtctaccaaaagacgacagaagacgaagtccacatctgccataatcaagatggctactcctatccgtccaggcaaatggtgagtctggaggacgacgtggca

SEQ ID NO: 16143 - DNA, 2580 bp, synthetic construct
  misc_feature 1..2580: note = source = /note="Description of Artificial Sequence: Synthetic coding sequence"
  source 1..2580: mol_type = other DNA
atgggcccctggggatggaaactgaggtggacggtcgcactcctcctagccgccgccggaacggccgtaggggacaggtgtgaaagaaatgagttccaatgtcaggacggtaaatgcatatcctataagtgggtgtgtgacgggtctgcagagtgccaagacgggagcgacgagtctcaagagacctgtcttagcgtcacctgtaagtcaggtgacttttcctgcggaggaagggtaaacagatgcatcccacagttctggcgatgcgacggacaagtggactgtgataatggcagtgatgagcagggctgtccaccaaaaacatgcagtcaagatgagtttaggtgccacgacggaaagtgcattagtcgtcagtttgtgtgtgactcagatcgtgactgcttggatggctcggacgaggcttcttgcccagtgctcacctgtggtcccgcctcctttcaatgcaatagctctacgtgtataccccagctctgggcctgtgataatgacccggattgtgaggacgggagcgatgaatggccacagcgttgtaggggtctctacgtttttcagggagatagctctccctgtagtgcattcgaattccattgcctgtccggcgagtgcattcactcctcttggcgatgcgatggaggccccgattgtaaggataaaagcgatgaagaaaattgtgctgtggcaacctgtaggcccgatgagtttcagtgctccgacgggaattgcatccatgggtcaaggcagtgtgaccgagagtacgactgcaaggatatgagtgacgaagtgggatgcgtgaatgttacgctgtgtgaagggcctaacaagtttaagtgtcattccggcgaatgtattactttagacaaggtgtgtaatatggctagagattgtagggattggtctgacgagccaatcaaagagtgtggaaccgcagagtgcctggataataacggcgggtgctctcacgtctgcaacgatctgaagattggttacgaatgtctctgccccgacggcttccagttggttgctcagaggcggtgtgaggacattgatgaatgccaggatccggatacttgctctcaactgtgcgtgaaccttgaggggggctataaatgccagtgcgaggaaggattccagctggatccacatactaaagcgtgtaaagcagtggggtcaatcgcttatctgttcttcaccaatcgtcacgaggtgcggaaaatgacgctcgatcgatcagagtacacctctttgatccctaatctgagaaatgttgtcgcactggatactgaggtggcaagtaatcgaatctactggagcgatctgtcccagaggatgatttgtagtactcagctagatcgagcccacggagtctcctcctatgacaccgtcatttcacgagatattcaggccccagacggccttgctgtggattggattcactcaaatatctattggacggattcggtccttggtacagtttccgttgcagacacaaagggtgtgaagaggaagaccctctttagggaaaacggctcgaagcctagagctatcgttgtggaccctgtgcatggattcatgtactggacagactgggggactcctgcgaaaattaagaaggggggactgaatggcgtggatatttattccttagttacagagaatatccagtggcccaacgggatcactctggaccttctctctggtagattatactgggttgattctaaacttcattcaatcagtagcatcgacgtgaatggtggcaacaggaagacaattttggaagatgagaagagactggcccaccctttttccttggccgtctttgaggacaaggtgttctggacagatataataaacgaggccatcttcagtgccaacagattgaccggatccgacgttaatcttctggccgagaacctgctgagtcctgaagacatggtcctctttcataacctaacccagcctagaggggtcaattggtgcgaaagaactacgctctctaatggcggctgccagtacctttgtctacccgcgccacagatcaacccacattcaccgaagtttacttgcgcatgccctgacgggatgcttcttgctagggacatgagaagctgtctgactgaggccgaagccgccgtggctacccaagaaacaagcacggtgaggttgaaggtaagcagcaccgcggtgcggacccagcatactacaacgagacccgtgcccgacacatccaggcttccaggggctactccaggcctgacgacagtcgaaatagtgaccatgagccaccaggcccttggtgacgtggccggcagaggtaatgagaagaagccgagtagtgtgcgagcgctttccatagtgctgccgattgtgttgcttgtgttcctctgtttgggagtttttctgctgtggaagaactggaggctcaagaatataaacagtattaactttgacaatccagtgtaccagaagaccaccgaagacgaagtccatatttgccacaatcaggacggctattcatatccaagtaggcagatggtaagcctggaagatgatgtggcc

SEQ ID NO: 16144 - DNA, 2580 bp, synthetic construct
  misc_feature 1..2580: note = source = /note="Description of Artificial Sequence: Synthetic coding sequence"
  source 1..2580: mol_type = other DNA
atgggcccttggggatggaaactccgatggaccgttgctctcctgctcgcagcagcaggcaccgctgtcggagataggtgcgaaagaaacgagttccagtgtcaggacgggaagtgcatctcatacaaatgggtctgcgatgggagcgcagaatgccaagacggaagcgatgagtcacaagagacatgtctgtccgtgacctgcaagagcggagacttcagctgtgggggaagggtgaacaggtgtatcccccagttctggcgatgtgacggccaagtggactgcgacaacggaagtgacgaacaaggatgtccacctaaaacttgcagtcaagacgagtttcgctgccacgatggcaaatgtatcagccggcaattcgtgtgcgactcggaccgggactgccttgatggctctgatgaggcttcttgccccgtcctcacatgtggacccgctagcttccagtgtaacagttcaacatgtattccccagctgtgggcatgcgataacgatcccgactgcgaagatgggagcgacgagtggcctcagagatgccgcggactctacgtgtttcaaggcgacagtagcccctgttcagctttcgagttccattgcctctctggcgagtgcatccatagctcttggagatgcgacggggggcctgactgcaaggataagtccgatgaggaaaactgtgcagttgcaacatgcaggcccgatgagttccagtgtagcgatggaaactgcattcatggcagccgccaatgcgaccgcgaatacgattgcaaagacatgagcgacgaagtcgggtgtgtgaacgttactctgtgcgagggcccaaacaagtttaagtgccattccggggagtgcataacgctggacaaagtctgcaatatggccagggattgtcgggactggagcgacgaaccaattaaagaatgtggaacagccgagtgtctggataacaacggaggatgcagccacgtgtgcaatgaccttaaaattggttacgagtgcctgtgccccgacgggtttcagctggtcgcacaaaggagatgtgaagacatagatgaatgccaagatccagacacctgttcccagctctgcgtgaacctggagggcggttataagtgccaatgcgaagagggattccagttagatccccacactaaggcctgtaaggctgttggcagcatcgcttacctgtttttcaccaacaggcatgaagtcaggaaaatgactctggataggagcgagtacacctcactgatccccaatctccgcaacgtggtggcccttgacacagaggttgcttctaataggatctactggagtgacctgagtcagcgtatgatatgctctactcaactggatcgggcacacggcgtgtcaagctatgataccgtgatcagtcgggatatccaagcgccagatggcttggctgttgattggatacatagcaatatttactggaccgacagcgtacttggtacggtgagcgtggctgacaccaagggcgtgaaaaggaaaacattattccgcgaaaacggaagcaagccacgcgcaatcgtggtggaccctgtgcatggatttatgtattggactgattggggaaccccagctaagatcaagaagggtggactgaacggagtggacatctactctcttgtgaccgagaatattcagtggccgaacggcattaccctggatctccttagtggcaggctgtattgggtcgattctaagttgcattccatcagctccatagacgtgaacgggggaaacaggaagaccatccttgaagatgaaaagagactggcccacccatttagtctggctgtatttgaagataaagtgttttggaccgacatcatcaacgaggcgattttttccgctaatcgtctaactggcagtgatgtgaacttgctggccgagaacctgctttcacctgaagacatggtgctgttccacaacttaacccagccgaggggagtcaattggtgtgagcgcaccacactgtcgaacggcggatgccagtacctttgcctgcctgctccacaaatcaacccacattccccgaagtttacgtgcgcctgcccagatggcatgctgttggccagagacatgcgcagctgtcttacagaggcagaagctgccgttgccactcaggagaccagtactgttaggcttaaagtgagtagcaccgctgtaagaacccagcacacaacaacacggcccgtgccagacacctctagattgcctggagccacccccggtcttaccactgtggaaatagttacaatgtcccaccaggcactcggtgatgtggccggaagaggcaacgagaagaagccaagcagcgtgagagctctgtcaatcgtgttgcctatcgtgctcctggtgtttctgtgtctgggcgtctttttgttgtggaagaactggcgcctgaaaaacatcaactcgattaacttcgacaaccccgtttatcagaaaacaacagaagacgaggttcacatatgtcataaccaagacggatatagttatccctcaaggcaaatggtctccctcgaggatgatgtagca

SEQ ID NO: 16145 - DNA, 2580 bp, synthetic construct
  misc_feature 1..2580: note = source = /note="Description of Artificial Sequence: Synthetic coding sequence"
  source 1..2580: mol_type = other DNA
atgggtccttgggggtggaaattgaggtggacagttgcgttgctgctggcggctgccggcactgccgtcggagataggtgtgaacggaatgagttccagtgtcaagacggcaaatgtatctcttataagtgggtgtgcgatggcagcgccgagtgtcaggacggttctgacgagagtcaagaaacttgtctcagtgtgacctgtaagagtggggatttctcttgtggagggcgcgttaatcggtgcatcccccagttctggagatgtgacggccaggttgattgcgacaatggcagtgatgagcaaggctgtccaccaaagacttgctcccaggatgagttccggtgtcacgacggaaaatgtatcagccggcagtttgtgtgcgattccgatagggattgcctggacgggtccgacgaggcttcatgccctgtgttgacttgcggtccagcctcgtttcagtgcaatagttcaacctgcatccctcagctgtgggcatgtgataacgatccggactgcgaggatggatctgacgaatggcctcagagatgccggggattatatgtattccaaggcgattcctccccttgcagcgccttcgaattccattgtctgtccggggagtgtattcactcctcgtggcgctgtgacgggggcccagattgtaaggataagtccgacgaagaaaactgcgcagtggctacttgcagaccggacgaatttcagtgttcagacggtaattgcatccacggcagccgccaatgcgacagagaatacgactgcaaggatatgtctgatgaggtcgggtgcgttaacgtgaccctgtgtgaaggccccaacaagtttaagtgtcattcgggcgagtgtatcacactggataaagtgtgcaacatggccagagattgtcgagactggtcagatgagccaatcaaagagtgtgggaccgcagaatgcctcgataacaacggtgggtgctcacatgtgtgcaacgatttaaagatcggctacgagtgtctgtgcccagacgggttccagttagtcgcccaacggagatgtgaagatattgatgagtgtcaggaccctgatacttgctcacagctctgcgtgaacttggagggaggctataagtgccagtgcgaagaagggtttcagctcgatccccacacgaaggcttgcaaagcagtcggctccatagcatatctgttcttcaccaaccgtcatgaggtcaggaagatgacccttgacagatccgagtacacatctctgattcccaacctgagaaatgtggtcgctcttgatactgaggtggcatctaaccgcatttattggtctgacctgtctcagcgtatgatatgtagtacacagttagatcgcgctcacggggtttccagttacgataccgtcatcagtcgagatattcaggcaccagatgggctggccgtggactggatacattccaatatttactggaccgattcagtactggggaccgtgtcggtcgccgataccaaaggtgtgaaacgtaagacactgtttcgggagaacggcagcaagccacgggctatagtggtggatcccgtgcatgggttcatgtactggactgattggggcacaccggccaagattaagaaaggggggttgaatggagttgacatatactccctggtcaccgaaaacattcaatggccaaacgggataaccctcgacctgctgtctggacgtctgtactgggttgactccaaactgcattccatttctagcatcgacgtcaacggcggcaatcgaaaaaccattctggaagacgaaaaaagacttgctcatccattcagcctagccgttttcgaggataaggtgttctggaccgatattattaacgaggcgattttcagcgcaaaccgcctaacaggatctgacgtcaaccttctcgctgagaacttactatcaccagaggacatggtcctgttccataacttaacccagccaagaggcgtgaactggtgcgaacgaaccactctcagtaacggaggctgccagtacctatgcctcccggcccctcagatcaacccacactcaccaaagttcacgtgtgcctgtcccgatggtatgctccttgccagagatatgcgaagctgtttgactgaggccgaggcggcagtcgcgacacaggagacttccacggtcagactgaaggtgtcgtctaccgcggtgaggacacagcacacaacaactcgcccagtcccggatacatcacggctgcccggcgctaccccgggcctcaccacagtagagattgtgactatgtctcatcaggctctcggggatgtcgccggcagaggaaatgaaaaaaaaccgtctagtgtgcgtgcgcttagcatagtcctgccaattgtactgctcgtctttctttgtcttggggtgtttctgctgtggaaaaattggcggctgaagaacatcaacagtattaatttcgataatcccgtgtaccaaaaaacaaccgaggatgaggttcatatttgtcacaatcaggatggttactcatacccctcgcgccaaatggtctcactggaagacgacgtggct

SEQ ID NO: 16146 - DNA, 2580 bp, synthetic construct
  misc_feature 1..2580: note = source = /note="Description of Artificial Sequence: Synthetic coding sequence"
  source 1..2580: mol_type = other DNA
atgggcccttggggatggaagctgcgctggaccgtggcgctgctgctggcagccgcggggactgccgtcggtgacagatgcgagagaaatgaattccaatgccaggacggtaagtgcatctcctacaagtgggtgtgcgatggaagcgccgagtgccaagacggtagcgacgaaagccaggaaacgtgtctgtcggtgacctgtaaaagcggagacttctcctgcggaggccgggtcaacagatgtatcccgcagttttggaggtgcgacgggcaggtggattgcgataacggatcagatgagcagggatgcccacctaagacttgctctcaggacgagttcagatgccacgacggaaaatgcatctcgagacaattcgtttgcgattctgaccgggactgcctggacggatctgacgaagcgtcctgcccggtgttgacttgtggcccggcgtcgtttcagtgcaactcgagcacctgcatccctcagctgtgggcatgcgacaatgatccggactgcgaagatgggtccgacgaatggccacagcgctgccggggtctgtacgtctttcagggagattcctcgccgtgctcggccttcgaattccactgcttgagcggagagtgtatccacagttcatggcgctgtgatggagggcctgattgcaaggacaagagcgacgaagaaaactgtgctgtggctacctgccgcccggacgaattccagtgttcagacggaaactgcatccacggatcgcggcaatgcgatcgcgaatacgactgtaaggatatgtccgatgaagtgggatgtgtgaacgtgactctgtgcgagggcccaaataagttcaagtgccactcgggcgagtgcatcaccctggacaaggtgtgcaacatggcacgagattgccgggattggtcggatgaacccatcaaggagtgcggaactgctgaatgccttgacaataatggaggatgcagccatgtgtgtaatgacctgaagatcggctacgaatgcctgtgtccagatggtttccagcttgtggcgcagcggcgctgcgaggacatcgacgagtgccaggatcccgacacttgcagccagctgtgcgtgaacctggaaggaggttacaagtgccagtgtgaggaaggattccagttggaccctcataccaaggcctgtaaggccgtcggatcgatcgcctatctcttctttaccaatcggcacgaggtgcgcaagatgactcttgaccgctccgaatacacctcgctgattcctaacctccggaacgttgtcgctctggatacggaggtggcgtccaatcggatctactggtccgacctgagccaacgtatgatctgctcgacgcaactggatcgcgcacatggcgtgtcatcatacgacaccgtgatctcaagagacatccaggccccagatggcctcgctgtcgactggatccactcaaacatttactggaccgacagcgtgctcggaaccgtgtccgtggccgacactaagggagtgaaacgcaagactctcttcagagaaaacggatcgaaaccacgcgcgatcgtggtggatcccgtccacggtttcatgtactggactgactggggcaccccggcaaaaatcaaaaagggtggcctgaacggagtggatatctattccctggtgactgagaacatacaatggccaaatgggatcactctcgacctcctgtccgggcgcctctactgggtcgactcaaaactccattccatctcgtccatcgacgtcaatggaggcaaccgcaaaactattttggaggatgaaaaacggctcgcgcacccattctcattggccgtgttcgaggacaaagtgttctggacggacattatcaatgaggcgatctttagcgccaacagactgaccggcagcgatgtcaatctcctcgctgaaaacctgctctccccagaggatatggtgctctttcataacctgactcagccgcgaggcgtcaattggtgtgaacgcaccaccctgtccaacggagggtgtcaatacctgtgcctgccggcgccgcaaattaacccccattccccgaagttcacctgcgcttgccctgatggaatgcttctcgcccgggacatgcggtcgtgcctgactgaggccgaagcagccgtggccacccaagaaaccagcaccgtccggctgaaggtatcgtcgaccgcagtgaggactcagcatacgaccactaggcctgtgccagatacctcgcgactgccgggagcaactccgggactcaccaccgtggaaattgtcacgatgtcacaccaagcccttggcgacgtggccggtaggggcaacgaaaagaaaccctccagcgtcagggcactttcgatcgtccttccgatcgtgctcttggtctttttgtgtctgggggttttcctcctgtggaagaactggaggctgaagaatatcaactcaatcaacttcgacaatccggtgtaccaaaagactactgaggatgaggtccatatttgtcacaaccaggatgggtactcatacccgtcaagacaaatggtgagtttggaggacgacgttgcg

SEQ ID NO: 16147 - DNA, 2580 bp, synthetic construct
  misc_feature 1..2580: note = source = /note="Description of Artificial Sequence: Synthetic coding sequence"
  source 1..2580: mol_type = other DNA
atgggaccatgggggtggaagttgcgttggactgtggcactgttgctggcagccgccggcaccgcagtgggcgaccgctgtgagaggaatgaatttcaatgtcaggacgggaaatgtatttcttacaaatgggtctgtgatggatctgccgagtgccaagacggatctgatgagtcccaggaaacctgcctgtcagtgacctgcaagtctggcgattttagttgcggtggtagagttaaccgctgcattccccaattttggagatgcgatggccaggtggactgtgataatggctccgacgagcagggttgtcctccaaaaacgtgctcccaagacgagtttcgttgccacgatgggaagtgcatatcacgccagttcgtctgcgactctgatcgcgactgtcttgacggatctgatgaagcatcatgcccagtcctgacctgtggaccagcctcatttcagtgtaacagttccacatgcattccccaactctgggcgtgcgacaatgatcccgactgcgaggacggaagtgacgaatggcctcagcgctgtcgtgggctgtatgtctttcagggggacagttcaccctgctctgcatttgagttccactgtttaagcggagagtgcattcattccagttggcgttgcgacggagggcctgattgcaaagataaatccgacgaagagaactgcgcagtagctacttgcagacccgatgagttccagtgttccgacggaaattgtattcatggaagccgccagtgcgacagggagtacgactgtaaggacatgagcgatgaagtggggtgcgttaacgtgactctttgcgagggcccaaacaagtttaagtgtcacagtggggaatgtattacactggataaagtctgcaatatggcccgcgactgcagagattggtcagacgagcccattaaagagtgcgggacagcagaatgtctggacaataacggaggatgcagtcacgtatgcaatgatctaaagatcggctacgagtgcttgtgccctgatggatttcagcttgtagcacagcgccgctgtgaagacatcgacgagtgccaggaccctgatacatgtagccagctgtgcgtcaacttagagggaggatataaatgccagtgtgaggaaggtttccaactagatccccatactaaggcctgcaaagcggtggggtctattgcctacctcttcttcacaaatcgccatgaggtcagaaaaatgactctcgatagatccgagtacactagccttatccctaatctcagaaatgtggtcgccctcgatacagaagtggcaagtaatcggatttactggtccgaccttagccaaagaatgatttgttccacccagcttgacagagctcacggggtcagcagctacgataccgtaataagccgcgacatacaggcccccgatggtttagcagttgactggatacactcaaacatttactggaccgactccgtgctaggtaccgtgtcagtcgccgacacaaagggtgtgaaacgcaagaccctctttagagaaaacgggagcaaaccacgagccatcgttgtggatccagtgcacggtttcatgtattggacagactggggtactccagctaaaataaagaaagggggtctaaatggtgtggatatttactctttggtgacagaaaacatccagtggcctaatggcatcacactggaccttctgtccggtagattgtactgggtggactccaaactgcattcaattagctctatagatgtgaatggggggaatcgaaagacaattctggaggatgagaaaagactggcccacccttttagtctggccgtctttgaggataaggtcttttggacagatatcatcaacgaggcaatattctcagcgaatcggctgacgggctctgatgtgaacctccttgccgagaatctcctgtctccagaggacatggtgctcttccataatcttacacagcctaggggcgtcaattggtgtgaacgaacgacgctgtcaaatggcggctgccaatacctgtgtctccccgccccacagataaatccgcactcccccaaattcacttgcgcctgcccggacggtatgttactcgcccgggatatgagatcgtgtctgaccgaggcagaggctgccgtggccacacaagaaactagcacagtacggctaaaggtatcctctacggcggtgcgaacgcagcacaccactacccgtccagtaccagacacatcgcggctgcccggggctaccccaggactgacgactgtcgagatagtgactatgtcccatcaggctcttggggacgtagcgggaagggggaatgagaaaaagccctcgtctgtcagagccctgtctattgtcttgcctattgtgttactggtcttcctgtgcctgggcgtgttcttattatggaagaattggcgccttaaaaatatcaactctatcaacttcgataaccccgtctatcagaagacgactgaggacgaggtacatatttgccataatcaagacggatattcatatccgtccaggcagatggtttccctagaagatgatgtagca

SEQ ID NO: 16148 - DNA, 2580 bp, synthetic construct
  misc_feature 1..2580: note = source = /note="Description of Artificial Sequence: Synthetic coding sequence"
  source 1..2580: mol_type = other DNA
atgggaccttggggttggaagttgagatggacagttgctttactattggctgccgccggaacagcagtaggcgatcgctgtgaaaggaacgaatttcaatgccaggatgggaagtgtatcagctataaatgggtctgtgatggaagcgccgagtgtcaggacggaagtgacgagtctcaggagacatgcttgagcgtgacatgcaagtccggggatttttcctgtgggggtcgggtgaatcgctgtattccacagttctggcgctgtgacggtcaggtggactgtgataatgggtcagatgagcagggatgtcctccaaagacgtgttcccaggatgaatttcgctgtcatgatggcaaatgtattagccgccagttcgtttgtgattctgaccgagattgccttgacggatccgacgaggcatcgtgcccggtgctgacttgtggccctgcaagttttcagtgtaacagttccacgtgtatacctcagttgtgggcatgcgacaacgaccccgactgcgaagatggttccgatgagtggccgcaacggtgcagaggactttatgtgttccagggtgacagttcaccttgttccgcctttgaatttcactgtctgtcaggcgagtgcatccactcatcgtggaggtgtgacggcggccccgactgcaaagataagtccgatgaggaaaattgcgcagtcgctacctgtcggcctgatgagttccagtgcagcgacggcaattgcattcatggcagtcgacagtgcgacagagagtatgactgcaaagatatgagtgacgaggtaggatgtgtcaacgttactctgtgcgagggccccaacaagttcaaatgtcactcgggcgaatgtattacactggataaggtctgcaacatggctcgtgactgcagagactggagtgacgagcctatcaaggaatgcggaacggcggaatgtctggacaataatggggggtgctcacacgtgtgcaacgacctaaagatcgggtatgaatgtctgtgccccgacggcttccagttggtggctcagcggcggtgtgaagatattgacgagtgtcaggaccccgatacctgctcacagttatgcgtgaatctggagggcggctacaaatgccagtgcgaggaggggttccagttggacccccatactaaggcttgtaaggctgtgggttcaatcgcctatttgttttttaccaacagacatgaggtacgcaagatgacattggatagatccgagtacacatcactgatccccaatctgagaaacgttgtggcgctggatacagaggtggccagtaatagaatttactggtcagatctctctcaacggatgatatgctccactcagttggaccgagctcatggtgtgtctagctatgacacggtgatatccagggatatccaggctcctgacggtctcgccgtggactggatacattccaatatctactggacagattcagtcctagggacagtaagcgttgcagatactaaaggcgtcaaacggaaaaccttatttcgagaaaatggctctaaacctcgtgctatcgtcgtggaccctgtgcacggatttatgtattggactgactggggcacccctgctaaaatcaagaagggcggattaaatggcgtagatatatacagcttggtaaccgagaacatccagtggcccaatggcattactctagacttactgtctggccggctctactgggtggacagtaagcttcactcaatctccagcatcgatgtaaacggcggcaaccgcaaaacaattttggaggacgagaagcgactggctcatcccttctccttggcagtcttcgaagacaaggtgttctggactgatatcataaacgaagccatattttccgctaaccggctgacaggcagcgacgttaacctccttgccgaaaatctcctgtcccccgaggacatggtcctgtttcacaatttaacccagcctagaggggtgaattggtgtgaacgaactactctgagtaacggtggctgccagtacctgtgtctgccagctccacagatcaatccacactcacctaagtttacttgtgcgtgtccagatggcatgctattggctcgagacatgcgcagctgcctcactgaggctgaagccgccgtcgccactcaagaaacatctaccgtacgccttaaggtgtctagcacagctgtgcgcactcagcacaccaccacccgacccgtaccagacacatcccggctgccgggagcaacgccggggctcaccactgtggagatcgtgacgatgtcccaccaagccctgggtgatgtggccggtcgtggcaacgagaagaaaccctcctccgtgcgggcgctctccattgtcctgcccatcgtactgctcgtatttctatgcctgggtgtctttctgctgtggaaaaactggcggttgaagaacatcaacagcattaattttgataacccagtgtaccaaaaaaccacagaggacgaggtgcatatttgtcacaaccaggacgggtattcttatccctccagacagatggttagtctggaagatgacgttgct

SEQ ID NO: 16149 - DNA, 2580 bp, synthetic construct
  misc_feature 1..2580: note = source = /note="Description of Artificial Sequence: Synthetic coding sequence"
  source 1..2580: mol_type = other DNA
atgggaccttggggatggaaactgcgttggaccgtggccctgcttctggctgcggccgggactgctgtgggggatcggtgtgagcgcaacgagttccaatgtcaggacggaaagtgtatatcgtacaagtgggtctgcgatgggtcggctgaatgtcaagatgggtccgatgaaagccaagaaacttgtctgtcggttacctgtaagagtggggacttttcctgtggaggtagagtaaaccgctgtattccacaattttggcgctgcgacggacaggtcgattgcgacaacggatcagacgagcaaggatgtcccccgaaaacgtgtagccaagatgagtttaggtgccatgatgggaagtgtattagcaggcagttcgtgtgcgacagcgacagggattgtcttgatggatcggatgaagcatcatgtcctgttctgacttgtggtcccgcatcctttcagtgcaactcgagcacttgtatcccccaactttgggcgtgtgataatgaccctgattgcgaggacggatcagatgaatggcctcagcgctgccgtgggctttacgtgtttcaaggcgatagctccccatgctctgcattcgaatttcattgtctctctggcgagtgcattcactcatcctggagatgtgacggtggaccggattgtaaagataagtccgacgaagaaaactgtgcagtcgcaacctgtagacctgatgaatttcagtgtagcgatggtaactgtatacatggatcgagacaatgtgaccgcgagtacgattgtaaggatatgtccgatgaggtgggatgcgtcaatgtgacgctttgcgaaggtcctaataagttcaagtgtcattcaggagaatgtataactctcgacaaagtgtgcaatatggccagagattgtcgggattggtcggacgagccaatcaaggagtgtggcacggcagaatgcctggacaacaacggtgggtgctcccatgtctgcaatgacctgaagataggatacgaatgcctttgcccggatgggttccaactggtggcacagaggcgttgtgaggacattgatgaatgccaggatcccgacacttgctcgcaactttgtgtaaatctggaaggaggttacaagtgtcaatgcgaggaaggatttcagctggacccacacaccaaggcttgcaaggccgttggttcgattgcatacctctttttcacgaacagacacgaagtgcggaagatgacgctggatcggagcgaatacacctcactgatccctaacctccgtaacgttgtggcactcgatactgaagttgcctcgaatcggatctactggtctgacctgtcgcagaggatgatctgttctacccaactggaccgcgcacatggagtgtcgagctacgataccgtgatcagtagagatattcaggcaccagacggtctggccgtggactggatccattcaaatatctactggaccgattcagtgcttggaaccgtcagcgtggcagacactaaaggtgtgaaacgcaaaaccctctttagagagaatggttctaagccaagggcgattgtggtggatcctgtgcacggcttcatgtattggactgactgggggacccctgctaagattaagaaggggggactcaacggcgtggatatctactcgttggttaccgaaaacattcaatggcctaacggtattactcttgatcttctgtccggccgactttattgggtcgattcgaagctccactccatctcttcaattgatgtgaacggagggaatcgaaaaactattttggaggacgagaagagactcgcacacccgttttcactggcagtgttcgaagataaagtgttttggacggacatcattaatgaagccattttcagcgccaaccgcctcactgggtcggatgtcaatcttctggcagaaaacctcctgagcccagaagatatggtgctctttcacaacttgacccaaccgcgcggtgtgaactggtgcgaacgcaccactctgtcaaatggtggctgccaatacctgtgccttccggccccacagataaacccgcatagccctaagttcacgtgtgcatgtcccgatggaatgctcttggccagagacatgaggtcctgtctgaccgaggcagaagcggcagtcgcgactcaggagacttccaccgtcagacttaaggtgtcctccactgcggtccggacccaacataccactacccgcccagtccctgatacctcccggcttccgggtgcaactcccggtcttacgaccgttgagatcgtgaccatgtcacatcaagcgctgggcgatgtcgcgggaagaggaaatgaaaagaagcccagctcggtgcgagcactttcaattgtgttgcccattgtgctgttggtatttctttgccttggcgtgtttctgttgtggaaaaactggcgactgaagaacataaactctatcaattttgataaccccgtctaccaaaagactactgaagatgaggtgcatatttgtcataaccaggatgggtactcgtacccttcgagacagatggtgagcctggaagatgatgtggca

SEQ ID NO: 16150 - DNA, 2580 bp, synthetic construct
  misc_feature 1..2580: note = source = /note="Description of Artificial Sequence: Synthetic coding sequence"
  source 1..2580: mol_type = other DNA
atggggccgtggggatggaagctgagatggaccgtggcactgcttctcgcagctgctggaacggccgtgggagatcgttgtgagcgcaacgagttccaatgtcaggacggaaagtgcatttcgtacaagtgggtttgtgacggaagcgctgaatgtcaagacggatcggacgagagccaagaaacgtgcctttccgttacctgtaagtcaggtgatttctcctgcggtggaagggtgaaccgttgtattcctcagttttggaggtgtgacggacaagtggactgcgataacggctctgatgaacagggttgtccacctaaaacttgttctcaagacgagtttagatgtcatgacggaaagtgtatctcgagacaattcgtgtgcgattcggacagagattgtcttgatggatcggatgaagcctcgtgcccagtgctgacttgtgggcccgcctcgtttcaatgtaattcgtcaacgtgtattcctcaactctgggcatgtgacaacgaccctgactgtgaggatggtagcgatgagtggccgcaacggtgtcgaggcctgtacgtctttcaaggagatagctcaccttgctcagcgtttgagttccactgtctctcgggtgaatgcatacattcgtcgtggagatgcgacggcggaccggactgtaaagataaatcagacgaagagaattgcgccgtggcaacgtgtaggccagatgaatttcagtgttcagatggaaattgtattcatggttcgcgacagtgtgatcgggagtacgactgtaaagacatgagcgatgaggtggggtgtgttaacgtcactctttgtgaaggcccaaacaaattcaaatgccattcgggagagtgtatcaccctcgataaggtttgtaacatggccagagattgtagggattggagcgatgagcctataaaggaatgcggaactgccgagtgtcttgacaacaacggaggctgttcacacgtgtgtaacgacctcaagattggctacgaatgcctgtgtcctgacggattccagctggtcgcacagcgacgctgtgaagatattgatgagtgccaagatcctgacacttgcagccagctgtgtgtgaatctggagggtggatacaaatgtcagtgtgaagaaggatttcagctcgacccacatacgaaggcatgcaaggccgtgggttcaattgcataccttttcttcaccaacagacatgaggtccggaagatgacccttgacaggtccgaatacacttccctgatccctaatctgaggaacgtggtggcactggatactgaagtcgcctccaacagaatttactggtccgatctttcgcaaagaatgatctgcagcactcagttggatcgcgcccatggcgtgagctcctacgataccgtgatttcgagagacatacaagcacccgacggtcttgcagtcgattggattcactccaacatttactggaccgatagcgtcctgggcactgtgtccgtcgccgataccaagggagtgaagcggaaaactttgttccgcgaaaacggttcgaagcctcgagccattgtggtggaccctgtgcacggttttatgtactggaccgactggggaactccagcaaagattaagaaggggggacttaacggggtcgacatttactcacttgtcactgaaaacatccaatggccaaacggtatcactcttgaccttttgagcggtaggctctactgggtggattccaagctccatagtattagcagtatcgacgtgaacggaggaaacagaaagaccatccttgaagatgaaaagcggctggcacatccgttttcactcgccgtgtttgaagataaagtgttttggactgacatcattaatgaagccatattctcagctaaccggctgactggctcggacgtgaacttgcttgctgagaacctgctgtcgcctgaggacatggtgctttttcataaccttacccagcccagaggcgtgaactggtgtgaacgcactactctcagcaatggtgggtgccagtacctctgtctccctgcacctcagatcaaccctcatagccccaagttcacgtgcgcatgtccggatggaatgctcttggcaagggatatgcgctcctgtcttactgaggcagaagcagcagtggccacccaggaaacttcgaccgtacgccttaaagtctcatcaaccgccgtgcggacccaacacactacgaccagacctgtgcccgatacctcccgcctccctggagcaactcccggactgactaccgtcgaaatcgtgaccatgtctcatcaagccctgggagatgtggcgggccgtggtaacgagaaaaaacctagctcggtgagagccctgtcaatcgtccttccaattgttctcctggtgtttctgtgtctcggtgtgttcctgctctggaagaattggcgtctgaagaacatcaactcgattaacttcgacaatcctgtctaccaaaagactactgaggacgaagtccatatctgtcacaatcaggatgggtacagctacccttcgcggcaaatggtgtcactggaggacgatgtcgca

SEQ ID NO: 16151 - DNA, 2580 bp, synthetic construct
  misc_feature 1..2580: note = source = /note="Description of Artificial Sequence: Synthetic coding sequence"
  source 1..2580: mol_type = other DNA
atgggaccatggggatggaagctccggtggacagtggccctgctgctagccgccgccgggacagctgtgggggatcggtgtgaaaggaacgagttccaatgccaggatggcaaatgtatctcgtataagtgggtctgcgatggatctgccgagtgccaggacggctccgatgagagccaggaaacttgcctatccgtgacctgcaagtccggtgacttctcgtgtggcggaagggtcaacagatgtataccccagttttggcgctgtgatggccaggttgattgcgacaatggatcagatgagcaggggtgtccacctaagacatgttcccaggatgaatttcgctgccatgacggtaagtgtatctcacgtcagttcgtctgtgacagcgatagagattgcttagacggaagtgacgaggcaagttgccctgttcttacttgcggcccagctagtttccagtgcaactcctcaacctgcatacctcagctctgggcctgtgataatgacccggactgcgaggatggatccgacgagtggccacagagatgcaggggtctgtatgtgtttcagggggactcctctccttgctccgccttcgagtttcactgcctttctggcgaatgcatccatagtagctggcgctgcgatggcggtccagactgtaaagataagagcgacgaagagaactgcgccgtagcaacttgtcggcctgacgagtttcagtgcagtgacggcaactgcatacatgggtctaggcagtgtgacagggagtacgactgtaaggacatgagcgacgaggtcggatgtgttaatgtgactctgtgcgagggcccaaataagttcaaatgccactcaggcgagtgcatcacgctcgacaaggtgtgcaacatggccagggattgtcgggactggtccgatgagcctatcaaggagtgcggtaccgcggagtgtttggacaacaacggcggctgctcacacgtgtgcaatgacctcaagattgggtacgaatgcttgtgtccagatggctttcaattggtggctcagcggcgttgcgaggacatcgacgagtgtcaggacccggacacgtgtagtcagctttgtgttaaccttgaagggggctataaatgtcagtgtgaggaaggcttccaactggatccacataccaaggcgtgcaaggctgtaggatctatagcctatttgtttttcactaacaggcacgaagtgaggaaaatgaccctggacaggtccgagtatacttcactcattcctaacctgcgtaacgtcgtcgcactcgacactgaggtggcctctaaccgcatttactggtcggatttgagccagagaatgatctgctcaacacagttggacagggcacacggagtttcgtcatatgatacagtcattagccgggacatccaagcccctgacggtctcgcagttgactggatacactctaatatatactggacagattcagtgcttgggaccgtgagcgtagcagacacgaaaggcgtgaagcggaagacgctgtttcgtgagaacggttcaaaaccccgcgcaatcgtcgtggaccccgtccatgggtttatgtactggaccgactggggtacccccgctaagattaaaaagggtggactcaacggggttgacatttattcccttgtgaccgaaaatatccaatggcctaacgggataacacttgatctattgtctggaagactgtactgggtggactcaaagctccactccatcagctccattgatgttaacggcggaaataggaagaccattctcgaggacgaaaaaagactggcccacccgttctctcttgcagtgttcgaagacaaggttttttggacagacattatcaatgaggctatattttcagctaacaggctaacaggcagcgacgtgaacttactcgcggaaaatctgctgtcccccgaggacatggtactgtttcataatctcacacagcccaggggtgtcaactggtgcgaacgcacaacactatcaaacggcgggtgccagtacctgtgcctaccggctccccagatcaatcctcacagccctaaattcacgtgcgcttgcccagacggtatgctgttggctagagacatgcggagttgtttgactgaggccgaagccgcagtggccacccaggagactagtaccgtccgcctaaaagtaagctccactgccgtccggacgcaacatacaacgacacgacctgtacccgatacatcccgtctccccggtgcaaccccgggactgacaaccgtcgagatcgtgaccatgagtcatcaggcactgggagacgtcgcaggtagaggcaacgaaaagaaaccttcctccgttcgtgcgttgtcgattgtgctgccaatcgtcctccttgtgttcctgtgtctgggtgtgttccttctctggaagaattggcgactgaagaacataaactccataaatttcgataatcctgtatatcaaaaaactacagaagatgaagtacacatctgccataaccaggacggctacagctacccatcccgacagatggtgtcgcttgaagacgacgtggca

SEQ ID NO: 16152 - DNA, 2580 bp, synthetic construct
  misc_feature 1..2580: note = source = /note="Description of Artificial Sequence: Synthetic coding sequence"
  source 1..2580: mol_type = other DNA
atgggcccctgggggtggaagctgcgctggacagtggccttgctcctggcggcagccggcactgccgttggtgaccgctgtgaaagaaacgaattccagtgtcaggatggaaagtgtatctcttataaatgggtatgtgacggctctgccgaatgtcaggacgggtcagatgagtcgcaggaaacctgtcttagcgtcacttgtaagagcggtgacttttcttgcggcggcagagtcaaccgatgcatccctcagttctggcgctgtgacggccaggttgactgcgacaatggctcagacgagcagggttgccccccgaagacgtgcagtcaggacgagtttcgatgccacgacggtaagtgtatctcaaggcagttcgtttgcgattcagatcgcgattgtctggacggctcagacgaagccagctgtcccgtgctgacatgtggaccagccagttttcaatgcaatagctctacgtgcatcccccagctgtgggcctgtgacaatgatccagattgtgaggatggttctgacgagtggcctcaacgatgtcgtgggttgtacgtcttccagggggactcgtcaccctgcagcgctttcgagtttcattgcctctctggggagtgcattcactcatcatggcgttgcgacgggggacctgactgtaaagacaagagcgatgaagagaactgtgctgtcgccacatgcaggccggatgaatttcagtgctccgatggcaactgtattcatggctctcggcagtgtgatcgcgaatacgattgcaaggatatgtccgatgaggtcggctgtgtgaacgtcacactgtgcgaaggaccgaataagttcaaatgccattccggggaatgtattacactcgacaaggtgtgcaatatggcaagggattgccgcgattggagcgacgaaccaattaaagagtgcggcacagccgaatgcctcgataacaacggcggctgctctcatgtgtgcaacgatcttaagattggatacgaatgtctatgccctgatggttttcagctggtggctcaacggcgatgtgaggacatcgatgaatgccaggacccggatacatgttcccaactctgcgtgaatctggaaggcggctacaagtgccagtgtgaagagggttttcagctcgatccacacacaaaggcatgtaaggcagtgggaagcattgcttatctcttttttactaatagacacgaggtacggaagatgaccttggaccgaagtgagtatacctcactcatccccaatctcagaaacgtcgtcgctcttgatacggaggttgcaagcaacaggatttattggtctgaccttagtcagcgcatgatatgttctacccagctggatcgcgcgcacggcgtctcttcctacgatacggtgatttctcgggacatccaggctccagacggattggcggtggactggattcactcaaatatttattggaccgactctgtgctgggtactgtctcagtcgccgatacaaagggtgtgaaacgcaagaccctcttccgtgagaatgggtctaagccccgggctatcgtcgtggaccccgtacacgggttcatgtactggaccgactggggaacacccgccaaaatcaagaagggcggcctgaatggcgtagacatctacagcctggtgaccgagaatatccagtggcctaacgggatcaccctggacctgctttcgggccgactctactgggtggattctaaactgcattccattagtagcatcgatgttaatggaggcaataggaaaacgatcctagaggacgagaagagactcgcccacccctttagtctggctgtgttcgaagacaaggtgttctggacagacatcatcaatgaggccattttctctgctaaccggctgacagggagcgacgtgaacctattggccgagaacttgctgtcccctgaagacatggttctgtttcacaatctgacccagccgagaggcgtgaattggtgcgagagaacaacactatctaacggcgggtgccagtatctatgtctgccagcccctcaaataaacccccactctccaaagttcacgtgcgcctgccccgacgggatgttgttggctagggacatgaggagttgcctcactgaggctgaggctgccgtcgccacccaggaaacttccaccgttcggttaaaggtcagcagtaccgccgtccgcacccagcacaccactacgagacccgtcccagacaccagtcgactccccggcgccactcccggcctgactaccgtggaaatcgttacgatgagtcaccaagccctgggcgacgtggccggaagagggaatgagaagaaaccctccagcgtgcgggctttgtccattgtcttgcctatagttctgctagtgttcctgtgtctcggtgttttccttctgtggaagaactggagactcaagaacattaacagtatcaattttgataaccccgtctatcagaagaccactgaggacgaagtgcacatttgtcacaatcaagatgggtatagttatccgtcgagacagatggtgtcgctggaagacgacgtcgca

SEQ ID NO: 16153 - DNA, 2580 bp, synthetic construct
  misc_feature 1..2580: note = source = /note="Description of Artificial Sequence: Synthetic coding sequence"
  source 1..2580: mol_type = other DNA
atgggaccgtggggttggaaactgcgctggaccgtggcgcttctcttggccgccgctggtaccgctgtgggcgatcgatgcgagcgcaacgaattccagtgtcaggacggcaagtgtataagctacaagtgggtgtgcgacggaagcgctgagtgccaagatggctccgatgagtcgcaggagacctgtctctccgtcacgtgcaagtcaggagacttcagttgtggaggtagagtaaataggtgtatcccgcagttctggcgttgcgatgggcaggtggactgtgataacggcagcgatgaacagggctgccccccaaagacatgctcgcaagacgagtttaggtgtcatgatgggaagtgcatctcccggcagtttgtctgcgactccgatcgagactgtctggacggctccgacgaagccagttgtcctgtgttgacatgcggtcccgcttctttccagtgtaatagttcgacatgcattccacagctgtgggcatgcgataatgaccctgactgcgaggatgggagtgacgaatggccccagcgatgtcgaggcctgtatgtgttccagggcgactcatctccgtgctcagcttttgagttccattgcctgtccggtgagtgtattcattcctcttggcgctgcgatggcggccctgactgcaaggataagagcgatgaggaaaactgtgctgtggctacttgcagacctgacgaatttcagtgttcagatggtaactgtatccacgggtctagacaatgtgatagggaatacgactgcaaggatatgagcgacgaggtgggatgtgtcaacgtgactttgtgtgaagggcctaacaaatttaaatgtcactcaggtgaatgtatcactctagacaaggtctgcaatatggcacgtgactgcagggactggtcagatgaacccatcaaagaatgtggtactgcggagtgcctggataacaatggcggatgttcacacgtctgtaacgacctaaagatagggtatgagtgcttatgtcccgatggcttccaactggtggcccaacgtcgttgcgaggacatcgatgaatgtcaagatccagacacctgctcacagctctgcgtgaatttggagggcggctataagtgtcaatgcgaagagggtttccagctggacccacatactaaggcctgtaaggccgtgggttccatagcgtacctcttttttacaaatagacacgaggttaggaaaatgactctggacaggagtgagtacacgtctctgattccaaatctgcggaacgtcgtagccttggataccgaggttgcatccaaccgcatctattggtctgaccttagtcagaggatgatctgctctacccagctcgacagagcgcacggtgtgagcagctatgatacagtgatttcccgggacatccaagccccagacgggctggccgtagactggattcactctaacatctactggacagattcagtgctcgggaccgtttccgtggcagacactaagggcgtcaagagaaagaccctcttccgagagaatggatctaagccccgagctatcgtcgtcgatcccgtgcacggattcatgtactggacggactggggcacacctgcaaagatcaagaagggcggactgaacggcgtggacatctactcactcgtgacagaaaatatccagtggccgaacggcataactctcgaccttctgtccggccggttatactgggtcgactctaaactgcacagtatctcatccatcgatgttaacggtggcaaccgtaaaaccattttagaggacgaaaaacggctggcacaccccttcagtctcgcagtttttgaagataaggtgttttggaccgacatcatcaatgaggccattttctctgcaaataggctgacaggatctgacgtgaacctgctggccgagaatctgctgtcacctgaggacatggtgttgtttcacaacctgactcaacccaggggcgtcaactggtgtgaacgcaccaccttatctaacggcggctgtcaatacctgtgcttgccagccccacaaataaacccccactcaccgaaatttacatgcgcctgccccgatggaatgctgcttgcccgtgacatgcgaagctgcttgacagaagcagaagcggccgtggcgacacaagaaaccagcaccgtgaggctcaaggtgagctcaacagccgttcgaacacagcacacgacaacccgccctgtgccagacacttctagactgcccggcgccactcctggactaacaaccgtggaaatagtgaccatgtcacaccaggcccttggagacgtggccggacggggaaacgagaagaagccctcctccgtgcgagcactctccattgtgctcccaattgtgctgcttgtttttctgtgtctgggtgtgttcttgctctggaagaattggcggctcaaaaacataaactccataaacttcgataacccagtctatcagaagactacagaggacgaagtacacatctgccataaccaagatggatactcttacccaagcagacaaatggtcagtttagaggacgacgtagcc

SEQ ID NO: 16154 - DNA, 2580 bp, synthetic construct
  misc_feature 1..2580: note = source = /note="Description of Artificial Sequence: Synthetic coding sequence"
  source 1..2580: mol_type = other DNA
atgggcccatggggctggaagctaagatggacagtagccctcctcctggcggcagccggtacagcagtaggagacagatgcgaaaggaacgagttccagtgccaggacggaaaatgtatctcatacaagtgggtttgtgacggcagtgccgagtgccaggacggctccgatgaatcccaggaaacctgcttgtctgtgacctgtaaatctggggatttttcatgcggtggacgtgtgaatagatgcattccccagttttggaggtgtgacggccaggtcgactgtgataatggatccgatgaacagggctgccccccaaagacgtgctcccaggatgagtttagatgtcatgatgggaagtgcatctctcggcagttcgtttgcgacagcgaccgggactgtcttgacggttcagatgaggcctcctgtcctgtgcttacgtgcggcccagccagtttccagtgtaatagttccacctgtatcccccagctgtgggcttgcgataatgacccggattgtgaagatggctctgatgaatggccccagagatgtcgcggattatatgtattccagggagattcctctccctgctccgcatttgaatttcactgtctgtccggtgaatgtattcattcaagctggaggtgtgacggaggcccagattgcaaggacaaatctgacgaggagaattgcgcagtagctacgtgccgacccgacgaattccagtgctccgatggaaattgtattcacggctctcggcaatgcgatcgggaatatgattgtaaggacatgtctgatgaggtgggttgcgtgaatgtaaccctgtgcgaaggccctaacaaatttaaatgccatagcggggagtgtatcacactggataaagtatgtaacatggcccgggactgtagggattggtcggacgagccaattaaagagtgcggtacagccgagtgtttagacaataacggcggctgttctcacgtatgcaacgatctgaagataggctatgaatgcctatgcccagacgggtttcagttggtggctcagaggcggtgcgaggacatcgacgaatgtcaggaccctgacacctgttcgcagttatgtgtgaacctggaaggtgggtataagtgccagtgcgaggaaggattccagctggaccctcataccaaggcctgtaaggccgtaggcagcatagcatacctcttcttcacaaatcggcacgaagtgcggaaaatgaccctcgataggagcgaatacactagcttgatccccaacctccgtaatgtcgtcgcactggacactgaagttgcctcgaaccgaatttactggtccgatctttcacagagaatgatatgcagtacccagcttgacagagcccacggggtctcctcctacgacacagtcatcagtcgcgatattcaagctccagacgggctggccgtggactggatccacagcaacatatattggacagactcggtcctcggtactgtatctgtggctgacaccaaaggtgtgaagcgcaagacactgttccgtgaaaacggctctaagcctcgcgctatagtggttgaccctgtacacggcttcatgtactggaccgattgggggacccccgcaaagattaagaagggcggactaaacggcgttgacatctattcactggttaccgagaatatccaatggcctaatgggattactcttgacctgttgtcaggtcggctgtactgggtggattccaagctgcattctatttcctccatcgacgtcaacggtggaaacagaaaaacgatcctagaagatgagaaacggctagcgcaccctttctctctggcagtgttcgaggataaggttttctggactgatattattaatgaagcgattttcagcgccaatcggcttacgggctccgacgtaaaccttctggccgaaaatctcctctctccggaagatatggtgctgttccacaacttaactcagcctcggggtgttaattggtgtgaaagaaccacgctgagcaatggagggtgtcagtacttgtgcctgccagcgccacaaatcaatcctcacagcccaaaatttacatgtgcttgccccgacgggatgctcctggccagagacatgcgctcatgtctgacagaggcggaagctgctgtggctacacaagaaacctctaccgtccggctgaaagtgtctagcacggccgtgaggacccagcatacaacaacccgcccagtacccgacactagcagattgccaggggccacaccaggactcactaccgtcgagatcgttacgatgtcacatcaagcgttgggagatgtcgctgggaggggcaacgaaaaaaagccaagctctgtaagggccttaagtattgtgctcccaatcgtccttctagtgttcctgtgcctgggcgtgtttctgctgtggaaaaattggaggttgaaaaacatcaattctatcaacttcgacaatccagtctaccagaaaacgaccgaagacgaggtgcacatttgccacaaccaggatggctattcttatccttccagacagatggtgtcccttgaagacgacgtggca

SEQ ID NO: 16155 - DNA, 2580 bp, synthetic construct
  misc_feature 1..2580: note = source = /note="Description of Artificial Sequence: Synthetic coding sequence"
  source 1..2580: mol_type = other DNA
atgggaccctggggctggaagttgcgctggaccgtggcgctcctcttggctgccgcggggaccgcggtgggagatcgttgcgagaggaacgagttccagtgccaggacggcaagtgcatcagctacaagtgggtgtgcgacggctccgccgaatgccaagacggctcagatgaatcccaggaaacttgtctctcagttacttgcaagagcggagactttagctgtggaggtcgagtgaaccggtgcattccgcagttctggagatgcgacggacaggtggactgcgataacgggtcggacgagcaggggtgtccaccgaaaacttgttcacaagacgaattccggtgtcatgacggaaagtgtatcagcagacaattcgtctgcgattcggaccgcgattgcctcgacgggtcggatgaggcatcgtgccccgtgctcacttgcggaccagcctccttccagtgcaattcaagcacctgtataccccagctgtgggcctgcgacaacgacccggactgcgaggatggttccgacgaatggccgcagcgctgccggggactttacgtgttccagggagactcctcaccttgtagcgctttcgagttccactgtctgagcggagaatgcattcactcaagctggcgctgcgacggcgggcctgactgcaaagacaagtcagacgaggaaaattgtgccgtggcgacctgccgcccggatgaattccagtgctctgacggcaactgtatccacggctcgcgccagtgcgaccgggagtacgactgcaaggatatgagcgacgaagtgggatgcgtgaacgtcaccctctgcgagggacctaacaagttcaagtgccactccggagagtgcatcaccctcgacaaagtgtgcaacatggcgcgggattgccgcgactggagcgacgagccgatcaaagagtgcggaacggcggaatgtctggataacaatggaggatgttcacacgtctgcaatgacctcaagatcgggtatgagtgcctctgcccggacgggttccaacttgtcgcgcagcggcgctgcgaggatattgatgagtgccaagaccccgacacctgctcgcaactgtgtgtcaaccttgaggggggatacaagtgtcaatgcgaggaaggattccagctggacccgcatactaaggcgtgtaaagcagtcggatcgatcgcctacctgttcttcaccaaccggcacgaagtccgcaagatgaccttggatcgctcggaatatacctcactcatcccaaacttgagaaatgtggtggccttggataccgaggtggcctccaaccggatctactggtcggacctgtcccaaagaatgatctgctcgacccaactggatcgggcgcatggcgtctcgagctacgacactgtcatctcccgggacatccaggcgccggacggcctcgcagtggattggatccactcgaatatctactggactgattcagttctgggaactgtgtccgtggccgacactaagggagtcaaaagaaagactctctttcgggaaaatggatccaagccacgggccatcgtggtcgatccggtgcatggattcatgtattggaccgactggggtacccctgctaagatcaagaagggaggcctgaacggcgtcgacatctactctctggtgacggagaacatccaatggcccaacggtatcaccctggacctgctgtcaggccgactgtattgggtggacagcaagctgcacagcatctcctcgatcgatgtgaacggtggaaaccgcaagaccattctggaagatgaaaagcgcctggctcacccgttcagcctcgctgtgttcgaggacaaggtgttctggaccgatatcatcaacgaagccatcttttcggcaaaccggctgaccggctccgatgtgaatctgctcgctgagaacttgctgtcaccggaagatatggtcctgttccataacttgactcagcctcgcggcgtcaactggtgcgagcgcaccactctgtcgaacggcggctgccagtacctctgcctccctgcaccacagatcaatccacactcgcccaagttcacctgcgcttgcccggatgggatgttgttggcacgcgatatgcggtcctgtctcaccgaagccgaagccgcagtggcaacccaggagacttccactgtcaggctgaaggtgagctcgacggcagtgagaacccagcacactactacgcgccctgtgccggacacttctaggctgcccggcgcgactcccggactgaccaccgtggaaattgtgaccatgtcacaccaggcccttggtgatgtggcgggtagaggtaacgaaaagaaaccatccagcgtcagggccctgtcaatcgttctcccgatcgtcctgctggtctttctctgcctcggggtgttcctgctgtggaagaattggagactgaagaacatcaattcgatcaatttcgataatcccgtgtaccagaaaactactgaagatgaggtgcatatctgtcacaatcaggacggatactcgtacccatcaagacagatggtttcgttggaggatgacgtggcc

SEQ ID NO: 16156 - DNA, 2580 bp, synthetic construct
  misc_feature 1..2580: note = source = /note="Description of Artificial Sequence: Synthetic coding sequence"
  source 1..2580: mol_type = other DNA
atgggtccgtggggttggaaactgcggtggaccgtcgccctcctgctggctgcggcaggaaccgccgtgggggacagatgcgaacggaatgaatttcagtgtcaggatggcaaatgtatcagctacaagtgggtgtgcgatggttcagcggaatgtcaggacggcagcgacgaatcacaggaaacttgcctcagcgtgacttgcaaatcgggagacttctcgtgcggaggaagggtgaatcgctgtatcccccaattttggcgctgtgacggccaggtggactgtgataacgggtcggacgaacaaggctgtccgcccaagacctgctcacaggatgagtttcggtgccacgacggaaaatgtatcagtcgccaatttgtctgcgactcggacagagactgcctggacggatccgatgaagcctcctgcccggtgttgacctgcggcccagcctcgtttcaatgtaactcaagcacctgtataccgcagctttgggcgtgcgataatgacccggactgcgaggacgggtcagatgagtggccgcaacggtgccggggtctgtacgtgttccaaggagattcctctccttgttcagcattcgaattccattgcctttccggtgaatgcatccattcttcgtggaggtgcgatggaggcccggactgcaaagacaagagcgacgaagaaaactgtgccgtggctacttgccggccggatgagttccaatgcagcgatggtaattgcatccacgggtcccgccagtgcgacagagagtacgattgtaaggatatgagcgatgaagtgggttgtgttaacgtgactctgtgcgaaggaccgaacaagttcaagtgccattccggggaatgtatcactcttgacaaggtctgcaatatggcacgggattgccgcgattggtcagatgagccgatcaaggaatgcggcaccgccgagtgcttggacaataatggcgggtgttcccatgtgtgcaacgacctgaagatcgggtacgaatgcttgtgtccagatggatttcagctcgtggcccagagacggtgcgaggacatcgatgaatgccaggacccggacacgtgttctcagctctgtgtcaatctcgagggaggatacaaatgccagtgtgaggagggcttccagttggacccccataccaaggcgtgtaaggccgtcgggtcaatcgcatatctgttcttcaccaaccggcatgaagtgagaaagatgactctggaccgctcggagtacacttcgctcatcccaaacctccggaacgtggtcgccttggacactgaagtcgcatccaatcgcatctactggtcagacctttcccagcgcatgatctgctcaactcaactggatcgcgctcacggcgtcagctcgtacgacaccgtgatctcacgggacatccaggcaccagacgggctcgcggtggattggatccactcgaatatctactggaccgactcggtgctgggaactgtttcggtcgcagacactaagggggtgaaacgaaagacccttttccgggagaatggttctaagccgcgcgccattgttgtggacccggtgcatggtttcatgtactggactgattggggtactccagccaagatcaagaagggagggctcaacggcgtggacatctactcacttgtgaccgagaacatccaatggccgaatggaatcaccctggacctgttgtcgggtagactgtactgggtcgactcgaaattgcattcgatctcgtcaatcgatgtcaatgggggaaatcggaaaacgatcctggaggacgaaaaacggttggcccacccctttagcttggccgtgttcgaggacaaggtgttttggactgacatcataaatgaggccatcttctccgccaatcgcctgactggcagcgacgtgaacctgctcgcagaaaacctcctgagcccggaagatatggtccttttccacaatcttacgcagcctagaggtgtgaactggtgcgagcgcactaccctgtccaacggaggatgccagtatctgtgcctcccagcgccacaaatcaacccccattcgcccaaattcacctgcgcgtgccctgacggtatgctcctggctagagacatgcggtcatgcctcactgaagcagaggcggccgtggccactcaggagacttccacggtgaggctcaaggtgagctcgactgcagtgaggactcaacacaccactacgaggccagtgcccgatacttcccgcctgccgggcgctactccgggactgactaccgtggagatcgtcaccatgtcgcatcaggctctgggggatgtggcgggtcggggcaacgaaaagaagccgtcatccgttcgcgccctctccattgtgctgccaatcgtgctgctggtgttcctctgtctgggagtctttctgctgtggaagaactggcgactgaaaaacatcaactcgatcaacttcgacaaccctgtgtaccagaaaacgaccgaggacgaagtccacatctgtcataatcaagacggctactcgtatcccagcaggcagatggtgtcgctggaggatgatgtggct

SEQ ID NO: 16157 - DNA, 2580 bp, synthetic construct
  misc_feature 1..2580: note = source = /note="Description of Artificial Sequence: Synthetic coding sequence"
  source 1..2580: mol_type = other DNA
atgggaccatggggctggaagcttcgatggaccgtggcgctactcctcgctgcagcagggactgcagtcggggatagatgtgaacgtaacgaatttcagtgtcaagacgggaaatgcatttcatacaagtgggtgtgtgatgggtcagcagagtgccaggacggatccgatgagagccaggagacgtgcctcagcgttacctgcaagtcaggtgacttctcttgcggaggacgggtgaacaggtgcatcccccaattttggagatgcgatggtcaagtggattgcgacaatggcagtgatgagcagggatgcccgcccaagacctgttcacaagatgaattcagatgccacgatggtaagtgcatatcccgccagttcgtgtgtgattctgatagggactgcttagacggttctgatgaggcgagctgtcctgtactgacttgtgggcccgcctctttccaatgtaacagctccacgtgtatcccccagttgtgggcatgtgataacgacccagattgtgaggatggtagtgacgaatggccccagaggtgcagaggcttatatgtgttccagggagactcatcaccctgttctgccttcgaattccactgtctgagcggcgagtgtatccactctagctggcggtgcgacggcggtccagactgcaaggataagtcagacgaggagaactgcgcagtcgccacctgtagacctgatgagttccagtgctcggatggcaactgtatacacgggagccgccagtgcgatcgagaatacgactgtaaagatatgtcggatgaagtaggatgtgtcaatgtgacactttgcgagggacctaataagtttaagtgtcactccggtgagtgcataacattggacaaggtgtgtaatatggccagagactgtagagactggagcgatgagccgatcaaggagtgcggaaccgctgaatgtctagacaacaatggcgggtgtagccacgtgtgcaacgatctgaaaattgggtacgagtgtctctgcccagatggctttcagctcgtcgcccaaaggcgctgtgaggatatagatgaatgtcaggaccccgatacatgctcgcagttatgtgtgaatctggagggcggctacaagtgtcagtgtgaggaggggttccagctcgatccgcatacaaaagcttgtaaggccgtgggctccattgcctacctcttctttaccaacagacatgaggttcggaagatgaccttggaccggtctgagtacacctctctgatcccaaacttgaggaatgtagtggcactggataccgaggtggcttccaataggatctactggtcggacctctcacagcgcatgatttgctcaacccagctggatcgcgcccacggcgtctctagctacgacactgtgatctccagagatattcaggctcctgacggacttgccgtcgattggatccactctaacatatactggaccgattccgttctcgggaccgtcagcgtggctgataccaagggagtgaaacggaaaaccttattccgcgagaacggatccaaacctcgggccatcgtggtggacccggtgcatggattcatgtactggaccgattgggggactccagccaagattaaaaagggtgggctcaacggggtcgacatttactccctcgttaccgagaacatccagtggccgaacggaattacacttgatcttctgtcaggaaggttatattgggtggactctaaactccatagcattagcagtattgacgtcaatggcgggaaccgaaagaccatcctagaggatgaaaagagactcgcacatccattttctctggccgtgtttgaggataaggtcttttggacagacattataaatgaagcaatatttagtgcaaatcgcctgactggcagcgacgtgaacctgctagcggaaaatctgctgtcaccagaagatatggtcctcttccataatctgacccagccccgtggagtgaattggtgcgagcgcacgactctctcaaatggcgggtgtcaatacttgtgcctgcctgccccacaaattaacccccactctccaaaattcacatgcgcctgtccagatggaatgctcctcgcgagggacatgcgttcttgtttaactgaagccgaagctgcagtagccacccaggaaactagcaccgtccgattaaaagtaagttccactgctgttcgcactcagcatactacaacgaggccagtccctgatacgagcaggcttccaggtgctactccaggccttactacagtcgaaatcgtgactatgtcccaccaggccctcggcgacgtggctgggaggggaaacgaaaagaagcctagtagtgtgagagccttaagcatagtcctgcctattgttcttttggtgtttctatgcttgggggttttcttgctgtggaagaactggagactgaagaatatcaactccatcaacttcgataatcccgtgtaccagaagaccacggaagacgaggtgcacatctgccacaatcaggacgggtattcttatccgagccgtcagatggtgtctcttgaagacgatgtggcc

SEQ ID NO: 16158 - DNA, 2580 bp, synthetic construct
  misc_feature 1..2580: note = source = /note="Description of Artificial Sequence: Synthetic coding sequence"
  source 1..2580: mol_type = other DNA
atgggcccttgggggtggaagctgcggtggacagtggctctcctcctggctgctgccggaactgccgtgggcgatcgatgcgagcgcaacgagtttcagtgccaggatggtaaatgtatctcttacaaatgggtctgtgacgggagcgctgaatgccaggacggatccgatgagtcacaagaaacatgcctctccgtgacctgtaaatctggagactttagttgcggggggcgcgtgaatagatgcatcccacagttttggcggtgtgacggtcaggtggactgcgataatggcagcgatgagcagggttgcccccccaaaacatgcagtcaggatgagttcaggtgccacgatgggaagtgcatatctagacagttcgtgtgcgatagcgatcgcgattgcctggacggttctgacgaagcctcatgccccgtgctgacatgcggccctgcgtccttccagtgtaactcaagtacgtgcatcccacaactgtgggcctgcgacaacgatccagactgcgaggacggaagcgatgaatggccacagagatgtcgcggcctctacgtgttccagggggactcttccccttgtagtgcattcgagttccattgtctcagcggcgagtgtatccactccagctggcgctgcgacgggggacccgattgtaaagacaaatccgacgaggagaactgtgccgttgcaacatgtagaccagacgagttccagtgttccgacggtaactgcatccacggttcccgccagtgtgacagagaatacgactgcaaagacatgtcagatgaggtgggatgtgtcaacgtgacactgtgtgaaggccctaataaattcaaatgccacagcggcgagtgcataactctggataaggtatgtaatatggcccgcgactgtagggactggtctgacgagcctattaaggagtgcggcacagctgagtgcctcgataacaacggcggctgctctcacgtttgtaacgaccttaaaatcggctatgagtgcctttgccccgacggtttccaactggttgcacagcgccgctgtgaagacattgatgaatgtcaggatccagatacgtgcagtcagctgtgtgttaacctcgagggagggtacaaatgtcaatgtgaagaaggattccagctggatccacataccaaggcttgcaaggcagttggctccatagcctatctcttcttcaccaataggcacgaggtacgcaaaatgacgctcgatcggagtgaatatacgtctctgattcccaatctgcgcaatgttgtcgcactggatacagaagtggcttcaaaccggatttattggtctgaccttagccagcgcatgatctgctccactcagcttgacagggcccatggcgtatcatcatatgacactgtgatttcacgggacatccaggcgcccgatggcctggccgttgactggatccacagcaatatctattggacagatagcgtactgggtaccgtgtctgtagccgatacaaagggagtgaagaggaagaccctgtttcgagaaaacgggtctaagcctagggctatcgtagtcgaccctgtccacggttttatgtactggactgactggggcactcccgcaaagatcaaaaagggcgggttgaatggcgttgacatatatagcctggtgaccgagaacatccaatggcctaatggaataacacttgacttgctgagcggcagactgtactgggttgactctaagctgcacagtatttcttctatcgatgttaacggcgggaaccggaagacaatactggaggacgagaaaagattggcccatcctttctctcttgctgtgtttgaggataaagttttttggaccgatattattaacgaagccattttctcagcaaatagactgactggttccgacgtcaacctgctggccgagaacctgttgtctccagaagatatggtcctgtttcacaacctgacacaaccaagaggagtcaactggtgtgagaggacgactctctccaacggcggctgtcagtacctgtgcctgcctgcaccacagatcaaccctcattcccccaagttcacttgtgcctgccccgacggaatgcttttggctcgggatatgcgaagttgccttacagaggcagaggccgcggtcgcaacgcaagaaacatcaacagttcgactgaaggtatctagcaccgccgtccggacacagcacactacaaccagacccgtcccagacaccagtagacttccaggcgctacacccggcttgactacggtggagattgtcaccatgtctcatcaggcccttggagatgttgcgggacgaggcaacgaaaaaaaaccctcttccgtgcgagccctcagcattgtacttccaatcgtgcttctggtgtttctgtgcctgggcgttttcctcctgtggaagaattggcgcctgaaaaatattaactcaattaatttcgacaaccccgtgtaccagaaaacaacagaggacgaggtccatatatgtcacaaccaagatggctattcatacccaagtcgacaaatggtctccttggaggacgatgtggcg

SEQ ID NO: 16159 - DNA, 2580 bp, synthetic construct
  misc_feature 1..2580: note = source = /note="Description of Artificial Sequence: Synthetic coding sequence"
  source 1..2580: mol_type = other DNA
atgggtccgtggggttggaagctgcggtggacggtggccctgctactggcagcagccggcaccgccgtgggtgaccgctgcgagcgcaatgagttccaatgccaggatggcaaatgcatcagctacaagtgggtgtgcgacggctcggcggaatgccaagatggctccgacgagagccaggagacgtgtctgtcggtgacctgcaaaagcggagatttcagctgcggcggccgagttaatcgctgcattccccagttttggaggtgcgatggacaggtggactgcgataatggctccgacgagcaggggtgcccgccaaagacctgttctcaggatgaattccgttgtcatgatggcaagtgtatctctcgccagtttgtctgtgatagcgatagagactgcttggatggcagcgacgaggcaagttgcccagtgctgacgtgtggaccagcttccttccagtgtaattcgagtacgtgcatcccccagctatgggcgtgtgataacgatccagattgcgaggacggcagcgatgaatggcctcagcggtgccgcggactgtatgtctttcaaggcgacagctcgccatgctcggcgtttgagttccattgcctgtccggcgagtgcatacacagctcctggcgttgtgacggcggacccgactgcaaggataagtcggacgaggagaattgtgctgtggcaacgtgccgcccagacgagttccagtgctcagatggcaattgcatccatggctcccggcaatgcgatagagagtacgattgcaaagacatgagtgatgaggtcggctgcgtgaacgttaccctatgtgagggccccaataagtttaagtgccacagcggcgagtgcattaccctcgataaggtctgcaacatggctcgtgactgtagggattggtcggatgagcccatcaaagagtgcggcactgccgagtgcctggataataacggcggctgttcccacgtgtgtaatgatctgaaaataggctatgagtgcctctgcccagacggctttcagttggtggcacagcggcgctgcgaggacatcgatgagtgccaggaccctgacacttgctcccagctctgcgtgaatcttgagggtggctacaagtgccaatgcgaggagggcttccagttggacccccacaccaaagcctgcaaggctgtcggctcgatagcctacctgttcttcacaaaccgacatgaggtccgcaagatgaccctggacagaagcgaatacacatcgctaatccccaacctacgaaacgtggtggcacttgacacagaggttgcatcgaatcgtatatactggagcgacctgagccaaaggatgatttgctccacccagcttgaccgcgcgcatggcgtcagtagctatgacacagtgatcagccgtgacattcaagcccccgacggactggctgtcgattggatccattcgaatatctattggactgattctgtgttgggaactgtaagcgtcgctgataccaagggagtcaagcgcaagacgctatttcgagagaacggcagtaagccacgcgccatcgtggtggacccggtgcacggcttcatgtattggacagactggggaacgcccgccaagattaaaaaaggcggactgaatggcgtcgatatctactctctagttaccgaaaatatccagtggccaaatggtattaccctagatctgctgagtggacgcctgtattgggtggatagtaagctgcactctatctcatctatagatgtgaacggtggcaatcggaaaacaatcttggaggacgagaagcgcttggcccaccccttttccttggcggtattcgaggataaagttttctggaccgatatcataaatgaggcaattttcagtgccaaccgtctgacaggttccgatgttaatctattggctgaaaacctgctgtctccggaagatatggtcctattccacaatttgactcaaccacgtggcgtcaactggtgtgagcgaactactttaagtaacggcggctgccaatacctttgcttaccggcacctcaaatcaacccacatagtccgaagttcacgtgcgcttgccccgacggtatgctgctcgcacgtgatatgcgcagctgtctaactgaagccgaggcggccgtagcgacgcaggagacctccaccgtgcgcttaaaggtctcctctacggcggttcgcacacagcatactaccaccaggccagtacccgacacgtcgaggctgcctggagccaccccgggcttgacgactgtggagattgttacgatgagccaccaggctcttggtgacgtcgcaggtcggggcaacgagaagaagccaagctcggtgcgcgctctgtccatcgttttgcctattgtcctactggtattcttgtgccttggggtatttctcctctggaaaaattggcgcctaaagaacataaattcgatcaatttcgataatcctgtgtatcagaagaccacagaggatgaggtgcacatatgccataaccaggatggctacagctacccctcgcgacagatggtatcactggaggacgatgtggcg

SEQ ID NO: 16160 - DNA, 2580 bp, synthetic construct
  misc_feature 1..2580: note = source = /note="Description of Artificial Sequence: Synthetic coding sequence"
  source 1..2580: mol_type = other DNA
atgggcccttggggttggaaactgcgctggacggtcgccctcttgctggccgctgctgggactgcggtgggcgatcgctgcgagagaaacgaattccagtgtcaggatggaaagtgtatttcctacaagtgggtctgtgatggctcggccgaatgccaggatggctccgatgagagccaggaaacctgcctgagtgtgacctgtaagtctggagacttctcctgcggcgggcgtgtgaatcgctgtattcctcagttctggcggtgtgatggccaagtcgactgtgataatggcagtgacgagcagggttgcccaccaaaaacatgttcccaggatgagttccgatgccacgatggcaaatgtataagccgccaatttgtttgtgattctgacagagattgtctggatggatctgacgaagcaagctgccccgttctgacctgcggcccagcttcttttcagtgcaacagctcaacatgtatcccacaactgtgggcctgcgataatgatcctgactgtgaagatggctccgacgaatggcctcagcgctgccgtggcctgtacgttttccaaggtgattcctcaccgtgctccgcattcgagttccattgtctcagtggtgagtgcatccactcctcttggcgatgcgacggggggccagattgtaaggacaaatctgacgaagagaactgtgcagtggccacatgtcgcccggatgagttccagtgcagtgatggcaattgtatacacgggagccggcaatgtgacagagagtacgactgcaaagacatgagtgatgaggtcggctgtgttaatgtgactctgtgcgagggtcctaataaattcaagtgccactccggcgagtgcattactctcgataaggtttgcaatatggctagagactgccgcgactggagcgatgaaccgataaaggagtgtgggacagcagaatgtctggacaacaatggggggtgttcacatgtgtgtaatgatctaaaaatcgggtatgagtgtctgtgcccggatgggtttcaactggtggcccagaggcgctgcgaggatatagatgaatgccaggaccccgacacatgttcccagctgtgtgttaatctggagggcggttataagtgccagtgcgaagagggttttcaacttgatcctcacaccaaggcctgcaaagccgtgggttcaattgcatacctattttttactaaccggcacgaggtgcgtaaaatgacattggatcgcagtgagtacacatctctaattccaaacctccggaacgtcgtggcacttgacacagaagtagcgtcgaaccggatttattggagtgacctctctcagagaatgatatgctccacacaactggaccgggctcatggcgtgtcatcttatgacactgttatctcacgagatattcaggcccccgacggactagccgtggactggatccattccaatatttactggacagattccgtgctcgggaccgtttcggtggccgatacaaagggcgtgaagcgcaaaacccttttcagagagaatggatcaaagcctagggcaattgtcgtggatcccgtgcacggatttatgtattggacagattggggcactcctgctaagattaagaagggtggcctgaatggcgtggacatttatagccttgtcacagagaacatccagtggcctaacgggatcaccctggacctgctttcagggaggctatattgggtcgactcaaagctgcactccataagctcgatagacgtgaatggggggaaccgtaagacaatattggaagacgagaaacggttggcacacccctttagtctcgccgtgttcgaggataaagtgttctggactgacattataaacgaggcaattttttctgctaaccggctgaccggtagtgatgtgaacttgctggccgaaaacctcttaagtcctgaagacatggttctgttccataacctgacacagcccagaggagtgaattggtgcgagcggaccactctctctaacgggggctgccagtacctgtgtctgccagcaccgcagatcaatccccatagtcctaaatttacgtgcgcttgtcccgatgggatgcttctcgcccgagacatgaggagttgcctcactgaggcagaggctgcagtggccacccaggaaacatccaccgtgcggctgaaagtgtctagcaccgcggttaggacccagcacaccactacacgacctgtgccagatactagccgattaccaggggcgacccccggtctgaccactgtggaaatcgtaactatgagtcaccaggccttgggagacgtggctggccgaggaaacgagaaaaagccctcgagcgttagagccctgtcgatagtcctgccaattgtgctcctggtctttttgtgcctgggtgtttttctcctctggaagaattggcgactaaagaatattaattcgattaacttcgacaatccggtgtatcaaaagactacggaggacgaagtacacatttgtcataatcaggacgggtactcttatccttcccggcagatggttagcctggaagatgatgtggcc

SEQ ID NO: 16161 - DNA, 2580 bp, synthetic construct
  misc_feature 1..2580: note = source = /note="Description of Artificial Sequence: Synthetic coding sequence"
  source 1..2580: mol_type = other DNA
atggggccctggggctggaaacttcggtggaccgtcgcgcttttgctggctgccgcaggtactgcagtgggagatcggtgtgaacgaaatgaattccaatgtcaagacggcaagtgtatttcctacaaatgggtgtgcgatggatcggcagaatgccaggatggttccgatgagtcgcaagagacttgtttgagcgttacgtgtaaatccggcgatttttcatgtggaggacgtgtgaaccgctgtattccgcagttttggaggtgcgacggtcaggtggattgtgacaacggatccgatgagcaagggtgtcctccaaagacctgctcgcaagatgagttccgatgccacgatgggaagtgcatctcacgtcagtttgtgtgtgattcagatcgcgactgtctcgatggaagcgacgaagccagctgtccggttcttacttgcgggccagcatcctttcaatgtaactcttcgacttgtattccccagctgtgggcatgtgataatgatccggattgtgaggatggatcagatgaatggcctcagcgctgtcggggactgtacgtgttccagggtgattcctccccgtgttcagcctttgaatttcactgtcttagcggagagtgcattcacagctcgtggagatgtgatggaggtcctgactgcaaggacaagagcgatgaagagaattgtgcagtggcaacttgccgcccagatgaatttcaatgttcagatggaaactgcattcacggatccagacagtgtgacagagagtacgattgtaaggatatgtcagatgaagttggatgtgtgaacgtgactctttgcgaaggaccgaacaaattcaagtgtcattcaggagaatgtattacgctggataaggtgtgcaatatggcgcgggattgtagagattggtccgatgagcccatcaaggaatgtggtaccgccgaatgtcttgacaacaatggtggttgttcgcacgtctgtaatgacctgaaaattggttacgaatgtctgtgtccagacggctttcaacttgtggcacagcgccgctgtgaagatattgatgagtgtcaagatcccgacacttgtagccagctttgtgtgaatctcgaaggcgggtacaagtgccagtgcgaggagggattccagctggatcctcatacgaaggcatgcaaggcggtgggatcaattgcatatctctttttcaccaaccgccacgaagtccgaaagatgaccctggaccgctcggagtacacttcccttattccaaacctgagaaatgtggtcgcactggacaccgaggtggcatcgaacagaatttactggagcgatctgtcccagaggatgatttgttcgactcagctcgatcgcgctcatggtgtgtcgtcctacgataccgtcatctcgcgcgatattcaagcacctgatggcctggcagtggattggattcactccaacatttactggactgactccgtccttggaactgtctcagtggcagatacgaaaggagtgaagcgcaaaacgctgtttcgtgaaaacggcagcaaaccacgggcaatcgtggtcgaccccgtgcatggatttatgtattggaccgactggggaacccctgcgaaaatcaaaaaggggggactcaatggggttgacatttactcattggtgactgagaacatccaatggcccaacggaattactcttgacctgctgtcgggccggctttactgggtcgattcaaagctccattccatatcgtcgattgacgtgaatggaggtaacaggaaaactattttggaggatgaaaagagacttgcacatcccttttcgctggcagtgttcgaggataaagtgttctggactgatatcatcaatgaagccatcttctcggcaaacagacttaccgggtccgatgtgaaccttctcgccgaaaatctgcttagccccgaggatatggtgctctttcataaccttacgcagcctcggggagtgaactggtgcgaacgtactaccctttcgaatgggggctgtcagtacctttgtctgccagcccctcagatcaacccacattcgcccaagtttacctgcgcctgtcctgacggtatgttgctggccagagacatgcgaagctgtctcaccgaggcagaagcagcagtggctacgcaggaaaccagcactgtccgtcttaaagtgtcgtctactgctgtgagaacccaacacaccactacccggccagtccctgacacttcacgactgcccggagccactccgggacttactactgtcgaaatcgtcacgatgtcccatcaggcactgggggacgttgccggtcgcggaaatgaaaagaagccttcaagcgttagagcactgtcgatcgtgttgccaattgtgctgctcgtattcctgtgcctgggcgtgtttctcctttggaagaattggcgtcttaagaacatcaatagcataaactttgataaccccgtctatcagaaaaccactgaagatgaagtgcacatatgccataatcaagatggttactcgtacccgtccagacagatggtgtccctcgaagatgatgtggca

SEQ ID NO: 16162 - DNA, 2580 bp, synthetic construct
  misc_feature 1..2580: note = source = /note="Description of Artificial Sequence: Synthetic coding sequence"
  source 1..2580: mol_type = other DNA
atgggcccttggggatggaaactgcggtggacagtggcattgttactcgctgccgcagggacagccgttggtgatcgctgtgagcgcaatgaattccagtgccaggatgggaaatgtatttcttacaagtgggtctgcgacgggtcagcagaatgccaagacggttcagatgaaagtcaggagacctgcctgagtgttacatgtaagtctggtgatttctcgtgtggcggtcgggttaatcggtgtatcccacagttctggaggtgcgatggacaggtggactgcgataatgggtccgacgaacagggatgtcctcccaagacttgctctcaggatgagttcagatgtcacgatgggaaatgcatttctaggcagttcgtgtgtgactcagaccgagattgccttgacggctctgacgaagcttcctgccctgtgttgacttgcgggcccgcgtcttttcaatgtaactcaagcacttgtatcccccagctgtgggcctgcgacaatgacccggactgcgaagacggcagtgacgagtggcctcagcggtgtagagggctgtatgtgtttcagggggactcatctccttgctctgcttttgaattccactgcctgagtggggagtgcatccacagttcttggaggtgtgacgggggccctgattgtaaggacaagtctgacgaagagaactgtgctgtggccacgtgcaggccggacgaatttcagtgtagtgacggaaattgcatccacggaagtcgtcagtgcgatcgagaatacgactgcaaagacatgtccgatgaagtgggctgtgttaatgtcaccctctgtgagggtcctaataaattcaagtgccattccggcgagtgcatcacgctcgataaagtgtgtaatatggccagagattgtcgcgattggtccgacgagccgattaaggagtgcggaacagctgagtgcctcgataacaacgggggctgttctcacgtgtgcaatgacttgaagattggatatgagtgtctgtgtcccgatggttttcaattggtggcacagaggcggtgcgaggacatcgatgaatgccaagatcccgatacatgtagtcagctctgtgtgaacctggagggcggttataagtgccagtgcgaagaggggttccaattagaccctcacacaaaggcttgtaaggcggtgggttctatcgcctacctatttttcactaacagacatgaagtgcggaagatgacgctagatcggtccgaatacacctctctcatcccaaatttgcgtaatgtggtggctctcgatactgaagtagccagcaacagaatttattggtctgacctctcccaacgcatgatctgctctacacagttggacagggcacacggtgtgagctcttatgataccgtcatctcacgcgacatccaggcacctgatggtctcgcagtggactggattcattcaaacatctactggacggactccgtgttgggaaccgtgtctgtagctgatacgaagggggtgaaacgaaagacactgtttagagagaacggctccaaaccgcgggctatcgtcgttgatccagtgcatgggtttatgtactggacagactggggaacacctgccaaaattaaaaaaggcggactgaatggcgttgatatctattccttggttactgagaatatccagtggcccaatggcatcaccctggatttattgagcgggagactctactgggtggactctaaattgcattctatctcttccatcgacgtgaatggcggcaaccgcaagactatcctggaagacgagaagcgccttgctcatccgttctcactggcagtattcgaggataaagtgttctggacagacatcatcaacgaggcaatcttctccgctaacaggctcacgggcagcgatgttaatcttctcgctgagaacctgctctctcctgaggatatggtgcttttccacaacctgacccagccccgtggagtgaactggtgcgagcgtacgacgctgtctaacggcggatgtcagtacctttgcctgcccgcccctcagattaacccacactcccccaagtttacgtgtgcgtgtccagatggaatgctcctggctcgtgacatgcgcagttgccttaccgaggcagaggccgccgtggctactcaggagacatcgactgtccgtctgaaagtgtcatcaacggcagtgcggacgcagcacaccactactaggccagtccctgacacaagtcgcctacccggggcgaccccaggactgacaacggttgagattgtcaccatgtcacatcaggccttaggagacgtcgcaggtcgaggcaacgagaaaaaaccgagctcagttagggccctaagcatcgtcctacctatagtcttgcttgtcttcctttgtcttggggtgtttcttctctggaaaaactggagactcaaaaacattaactccataaatttcgacaacccagtgtaccaaaagactaccgaggacgaagtgcacatttgtcataatcaggatggttactcctacccttctaggcagatggtgagcctggaggatgatgtcgcc

SEQ ID NO: 16163 - DNA, 2580 bp, synthetic construct; identical to SEQ ID NO: 16157
  misc_feature 1..2580: note = source = /note="Description of Artificial Sequence: Synthetic coding sequence"
  source 1..2580: mol_type = other DNA

SEQ ID NO: 16164 - DNA, 2580 bp, synthetic construct
  misc_feature 1..2580: note = source = /note="Description of Artificial Sequence: Synthetic coding sequence"
  source 1..2580: mol_type = other DNA
atgggtccatggggatggaagttgagatggaccgtggcactgctcctggccgccgctggtactgccgtcggggatcgctgcgaacgcaatgagttccagtgccaggatggaaagtgcatctcgtacaaatgggtgtgtgacggatcggctgagtgccaggacgggagcgatgaatcgcaagagacttgcctgtcagtcacttgcaaatcgggggacttctcgtgcggaggccgtgtgaacagatgcatcccgcaattctggcggtgcgacgggcaggtggactgcgataacggtagcgacgagcaaggatgcccgccaaagacttgctcacaagatgaattccggtgccacgacgggaaatgcatctcccggcaattcgtgtgcgattcggaccgagactgcctggacggttccgacgaggcatcctgtcccgtgcttacttgtggccccgcctcctttcaatgtaactcatcgacttgcatcccgcagctgtgggcttgcgacaacgaccctgactgtgaggacggatccgacgagtggcctcagcgttgtcgcggactctacgtgtttcagggcgactcaagcccatgcagcgccttcgagtttcactgcctgtctggagaatgcattcattcatcatggcgctgcgacgggggacccgattgtaaggacaagtcagatgaagagaactgcgccgtcgcaacctgccgcccagacgaattccaatgctccgacggcaactgcatccatgggagccgccagtgcgacagggaatacgattgcaaagatatgagcgatgaagtggggtgcgtgaacgtgactctgtgcgaaggacctaacaagttcaaatgccactccggagagtgcatcactctggataaagtatgcaacatggctcgagattgccgcgactggtccgatgagccgatcaaagaatgtgggactgcagagtgcctggacaacaacgggggatgttcccatgtctgcaacgacctcaagatcgggtacgagtgcctctgccctgacggcttccagctcgtggcgcagaggagatgtgaggacattgatgaatgccaagatccagacacctgttcgcagctgtgcgtgaacctggaaggaggttacaagtgccagtgcgaagaaggtttccagctcgacccgcacaccaaggcatgcaaggcggtgggaagcattgcataccttttctttactaatcggcacgaagtccggaagatgacgctggaccgctcggaatacacgtcgttgattcctaatctcagaaatgtggtcgccctggatactgaagtggcgtccaacagaatctactggtcagatctgtcacaacggatgatctgcagcacgcagcttgatagagctcacggagtgagctcctacgacaccgtgatcagcagagacatccaagcaccggacgggttggccgtcgattggatccacagtaacatttactggaccgacagcgtgctcggaactgtgagcgtggcggacactaagggagtgaaacgcaagactttgttccgggagaacgggagcaagccacgggccatcgtggtggacccagtccacggattcatgtactggactgattggggaacgccggcgaagatcaagaagggaggccttaacggtgtggacatctacagccttgtcaccgaaaacatccagtggccaaacggaatcacgctggatctgctgtcgggtagactgtactgggtcgactcgaagttgcatagcatatcctcgatcgatgtcaatgggggtaatcgcaagactatcttggaggatgaaaagcggctcgcgcatcctttttcattggcggtgttcgaagataaggtgttctggaccgacatcatcaacgaagcaatctttagcgcaaaccgcctgacggggtcagacgtgaacttgctggcggaaaatcttctttcacctgaagatatggtcctgttccacaacctgacccagccgcggggcgtgaactggtgtgaacgcaccactctgtccaacggaggctgtcagtacctctgcctgccggccccacaaatcaacccgcactcgccaaaattcacttgcgcatgtccggacggaatgctgcttgcccgcgacatgagatcgtgcctcaccgaggcggaagccgctgtcgccacccaggaaacctccactgtcagacttaaggtgagctcgactgccgtgcgcacccagcacaccactacccgcccggtccctgataccagccgcctcccgggtgccactccgggccttaccaccgtggaaatcgtgaccatgtcgcaccaagccctcggagacgtggccggacggggaaacgagaagaagccaagctccgtgagggcactctccattgtcctgccgatcgtcctgctggtgttcctgtgcctcggggtgtttctcctgtggaaaaactggcggctcaagaacatcaattcaatcaacttcgacaatccagtgtaccaaaagactactgaggatgaagtccatatctgccataaccaggacggatactcctatcccagcagacagatggtgagcctcgaggacgacgtggcg

SEQ ID NO: 16165 - DNA, 2580 bp, synthetic construct
  misc_feature 1..2580: note = source = /note="Description of Artificial Sequence: Synthetic coding sequence"
  source 1..2580: mol_type = other DNA
atggggccatgggggtggaagctcaggtggaccgttgcgttgctcttggccgccgccgggacagccgttggggatcggtgtgagcgcaacgagtttcagtgccaggatgggaagtgcattagctataaatgggtatgtgacggcagcgccgaatgtcaggatggatccgatgagtcacaggagacttgcctgtctgtcacatgcaagtcgggagatttcagttgcgggggccgcgtgaataggtgtatccctcagttttggcggtgcgacgggcaggtcgattgtgacaatggctccgatgagcaggggtgccctcctaagacctgctcccaggacgaatttcgatgccacgacgggaaatgcattagccggcagtttgtgtgcgacagcgatcgggactgccttgatggtagcgatgaagcctcgtgccccgtgctgacctgtggccccgcctcttttcagtgcaattccagcacctgcatcccacagctttgggcatgcgacaacgatccagactgtgaggatggatcggacgaatggcctcaaaggtgtcggggcctctatgtgttccagggagattcttcaccctgtagtgcgttcgaattccattgcctgtctggcgagtgtatccactcatcgtggcggtgcgatggaggtcccgattgtaaggacaaatccgatgaagaaaattgtgctgtggccacttgtaggcccgatgagtttcagtgcagtgatggaaattgcatacacggttcacgtcagtgtgatcgcgagtacgattgcaaagacatgagcgacgaagtgggatgtgtgaacgtcacattgtgcgaaggaccgaataagtttaaatgtcattccggagagtgcataaccctggataaagtgtgtaacatggcaagggactgccgcgactggagcgacgagcctataaaggagtgtggcactgccgagtgcctggataataatggcggttgctcgcatgtgtgtaacgatctgaaaatcggatatgaatgtttatgccctgacgggtttcaactcgtagcccagcggaggtgcgaagacatcgatgagtgtcaggatcccgatacatgttctcagctatgtgttaatcttgagggtggatataagtgtcaatgcgaggagggctttcagctggacccccatacaaaagcatgcaaggctgttggcagtattgcttacctgttcttcacaaacaggcacgaggtccgtaagatgaccctcgaccggtcagaatacacttcacttattccaaatctgagaaatgtggttgccctggatacggaagttgcgtcaaataggatttattggtccgatttatctcagagaatgatttgttcaacacaactagacagggcccatggcgtgtcttcatatgataccgtgatcagccgcgacatccaggcacccgatggccttgctgttgactggattcactctaatatttactggacagactccgtgctcggaacagtaagtgtggccgatactaagggagtaaagcgcaaaactctgttccgggaaaacggctccaaaccccgggctatagtcgtagacccagttcatggtttcatgtattggacagactggggtacacctgcgaagatcaaaaaggggggcctaaatggagttgatatctactctctggtgacggagaacatacaatggcccaatgggattactctggatctactgtccggcaggctgtactgggtagactcaaagctccattctatcagctctatcgatgtcaatggcgggaatcggaagaccatcctggaagacgaaaaacgtcttgcacatcctttttcattggcagtgtttgaggacaaagtattttggacagacattatcaatgaggctatcttttcagctaatagactgaccggttctgatgtgaacctcctcgccgagaacctccttagtccggaagatatggtgctcttccacaatctcactcagccccggggggtcaattggtgtgaacgcaccacgctttccaacgggggctgccagtacctttgccttcctgcccctcagattaatcctcactctccaaagttcacgtgtgcctgcccagacgggatgttgctggcccgcgacatgcgatcgtgccttaccgaagcggaggccgctgtggctacacaggaaacctctactgttagattgaaggtgtcgtccacagccgttaggacacagcatacgaccacccgccccgtcccggacacaagccggctgccaggagcaactccagggctgaccaccgtagagattgtaaccatgagtcaccaggccctcggggacgtggccggaagggggaacgaaaaaaaaccatcgtccgtgcgcgctctgtcgatcgtactacccattgtactgctggttttcctctgcctgggcgtattcctattgtggaagaactggcgactgaagaatataaactccatcaacttcgataatccagtttatcagaaaacaacagaagacgaagtgcacatctgtcacaatcaagatggatatagttaccctagtagacaaatggtaagcctggaggacgatgtagcc

SEQ ID NO: 16166 - DNA, 2580 bp, synthetic construct
  misc_feature 1..2580: note = source = /note="Description of Artificial Sequence: Synthetic coding sequence"
  source 1..2580: mol_type = other DNA
atgggaccatggggctggaaacttcgttggaccgtcgcacttctgcttgccgcagcgggaactgccgtgggtgatcggtgcgaacgaaacgaattccaatgtcaagatggcaagtgcattagctacaaatgggtgtgcgatggttcagcggaatgccaagatggatcggatgagtcgcaagagacttgtcttagcgtgacttgcaagagcggagatttttcctgcggtggaagagtgaataggtgcatcccacagttctggcgttgcgacggacaagtcgattgtgataacggatccgacgaacagggttgccctccaaagacctgctctcaagatgagttcagatgtcatgatggaaagtgtatttcaagacagtttgtgtgtgattccgatcgggactgtcttgatggttccgacgaagcctcttgtcctgtgcttacctgtggtcctgcatcctttcaatgtaacagctcaacttgtattccccagctttgggcatgtgataacgatccagattgcgaagatggaagcgatgagtggccgcaacgctgtcgaggtctgtacgtgtttcaaggagactcctccccatgctcggcatttgaatttcattgtctttccggcgagtgtatccacagctcgtggcgctgtgatggaggccctgattgcaaggacaagagcgacgaagaaaattgtgcagtggccacgtgtagaccggatgagtttcagtgtagcgatggaaactgtattcacggatcgagacaatgtgatcgcgaatacgattgtaaagacatgtcggacgaagtgggttgtgtcaacgtgactctgtgtgaaggccccaataagtttaagtgtcattcgggtgaatgcattacccttgacaaggtctgtaacatggcacgagactgccgagattggtctgacgaaccgatcaaggaatgcggtaccgcggaatgtttggataacaacgggggatgttcgcatgtgtgtaatgatcttaagattggatacgaatgtctctgtcccgatggttttcaactcgtggcccaacgaagatgtgaagatatcgatgaatgtcaagatcctgatacctgttcgcaactgtgcgtgaacctggaaggtggctacaaatgccaatgcgaagaaggatttcagcttgatccgcataccaaggcctgtaaggccgtcggaagcatcgcatacctgttcttcaccaaccggcatgaggtgagaaagatgacccttgatcggagtgaatacacttcactcatacctaaccttagaaacgtggttgcccttgatacggaagtggcaagcaaccgcatctactggagcgatctttcccagagaatgatttgctcgactcaactcgaccgagcgcacggggtttcatcctacgataccgtcatttccagggacattcaggcaccagacggactggcggtcgactggattcattccaatatctactggactgactcggtgctcggtactgtgtcagtggcggacactaagggtgtgaagcgcaagacgttgtttcgagagaatggttcgaagccacgggctatagtcgtcgatcctgtccatgggtttatgtactggactgattggggtactccggcaaagattaagaaggggggactgaatggagtggacatttactcccttgtgaccgaaaacattcagtggcctaacgggattaccctggatctgctgtcaggaaggctgtactgggtggatagcaaacttcattccattagcagcattgatgtgaatggtggaaacagaaagaccatcctggaagatgaaaagaggttggcacatcccttttcgctggccgtgttcgaagataaagtcttttggacggacattatcaatgaagcaatcttttccgcaaacagactgacgggttcggacgtcaacctgcttgccgaaaatctgctctccccggaggacatggtgctctttcacaatctcacccaaccacgcggagtgaattggtgtgagagaactactctctcgaatggagggtgccagtatctctgtctgcccgccccgcagataaacccccattcaccaaagtttacttgtgcatgtcctgatggcatgctcctggctagagatatgcgctcctgccttaccgaagcagaagctgccgtggctacccaagaaacctctaccgtgcggctgaaggtgtcctcaactgcagtgcggacccagcatactaccacccgccctgtgccagatacctcgagactgccgggcgccacgccaggacttaccaccgtggagatcgttaccatgtcgcatcaagcacttggtgacgtcgcaggacgcggaaacgaaaagaagccctcgagcgtgagagcactgtcgattgttctgccaattgtcctgttggtattcttgtgtctcggagtgtttctgctgtggaaaaactggagactcaagaacataaacagcatcaattttgacaatcctgtgtaccaaaagactactgaagatgaagtgcacatttgtcacaatcaagacggttacagctacccgagccggcaaatggtcagcctggaggacgacgtggcc

SEQ ID NO: 16167 - DNA, 2580 bp, synthetic construct
  misc_feature 1..2580: note = source = /note="Description of Artificial Sequence: Synthetic coding sequence"
  source 1..2580: mol_type = other DNA
atgggtccgtggggatggaagctgcgttggactgtcgcgctgctgcttgcagcagcaggcaccgcagttggtgatagatgcgagcgtaacgaatttcagtgtcaagatggaaaatgtatcagctacaagtgggtctgtgatggaagcgcggaatgtcaagacggatcagatgaatcccaggaaacctgtctgtcggtgacttgcaaatcgggtgacttctcgtgtggtgggagagtgaatcgatgcatcccccagttttggcggtgcgacggacaggtggactgcgataatgggtccgatgaacaaggttgtccgcctaaaacctgtagccaggacgagttccgctgtcatgatggcaagtgtattagccgtcaattcgtctgtgactcagacagagactgtcttgacggctcggatgaagcatcctgcccagtgcttacctgcggtccggcatcatttcagtgtaattcctcaacctgcatcccacagctttgggcctgtgataacgatcccgattgcgaagatggaagcgatgagtggccccaaagatgccggggactctacgtgttccaaggagactcgtcaccttgttcagcattcgaatttcactgcctttccggcgagtgtattcactcgtcgtggcgctgcgatggagggccagattgcaaggacaagtccgacgaagagaattgtgcagtcgcgacgtgtagacctgatgagtttcaatgctctgatggaaactgcatacacggttcccggcaatgtgatagagaatacgactgtaaagatatgtccgacgaagttggctgcgtgaacgtgactctttgtgagggcccaaacaagttcaagtgtcattcaggtgaatgtataaccctggacaaggtctgtaatatggcccgtgattgcagagactggtcggacgagcctattaaggagtgtggaaccgcagagtgcctggataacaacgggggatgtagccatgtgtgtaatgacttgaaaatcggctacgaatgtttgtgccctgatgggttccagcttgtggcacagcgacgttgcgaagatattgatgaatgccaggaccccgacacttgtagccaactttgtgtcaatctggaaggtggctacaaatgccaatgtgaggaaggctttcaactcgatcctcatactaaagcgtgtaaagccgtcggcagcatcgcttacttgtttttcaccaacagacatgaggttagaaagatgactttggatagatcggagtacacctcgcttattcctaacctccgcaacgtggtggctcttgacaccgaagtggcctcgaacagaatctactggtccgacctctcacagcgtatgatttgctccacccagctcgatcgggcgcatggagtgtcaagctacgatactgtgatttcgagagatatacaagcacctgacggactggcggtggattggatccattcgaatatctattggacggatagcgtgctcgggactgtgtccgtggcagacactaagggtgtcaagcggaaaacgctgttcagggaaaacgggtcgaagccccgggccattgtggtcgatcctgtgcatggctttatgtactggactgattgggggactccagcaaagataaagaagggagggctgaacggagtcgacatctatagcctggtgaccgagaatatccaatggcctaatggaattacgctcgacctcctgtccggccgactttactgggtcgattctaaacttcactctatctcgtccatagacgtcaacggtggtaatcgtaagaccatcttggaggatgagaagaggcttgcccatcccttttcactggctgtgttcgaagataaggtgttttggactgacattatcaatgaggcaattttctccgccaacagactgaccggttctgacgtgaaccttcttgcagaaaacctcctttcgcccgaagatatggtgctgtttcataatctgactcagccaagaggcgttaactggtgtgaaagaacgaccctgtcgaatggcggctgtcagtacctctgtctcccagcaccgcaaatcaatccgcactcgcctaagttcacctgcgcatgcccagacggaatgctccttgcacgggatatgcggtcgtgtctgactgaagcagaagccgcggtggccacgcaggaaacctcgaccgtgcgccttaaggtcagctccaccgctgtgcgtactcaacacaccactacgcggcccgtcccggacacgagccgtctccccggagccaccccaggcttgaccactgtggagattgtgaccatgtcacaccaagcccttggtgacgtcgcgggaaggggaaacgaaaagaagccatcatccgtgagagctctgtccatcgtcctccctattgtgctgctggtgttcttgtgtcttggggtgttcctgctgtggaaaaactggaggcttaagaacataaacagcattaactttgataaccccgtgtaccaaaaaaccaccgaggatgaagtgcatatatgtcataaccaagacggttacagctacccttcacgccaaatggtttctctggaagatgacgtcgca

SEQ ID NO: 16168 - DNA, 2580 bp, synthetic construct
  misc_feature 1..2580: note = source = /note="Description of Artificial Sequence: Synthetic coding sequence"
  source 1..2580: mol_type = other DNA
atgggaccttggggttggaagctgcggtggaccgtggcactgttactcgccgcagctggcaccgctgtgggtgatcgctgtgagcggaacgagtttcagtgtcaggatggtaaatgcatttcctacaagtgggtatgcgatgggagcgcagaatgccaggatggatctgacgaatctcaggagacctgcctctctgttacctgcaagagtggtgactttagctgtgggggtcgtgtgaatagatgcatcccacagttttggcgctgcgatggccaggttgattgtgacaacgggagcgacgagcagggctgcccaccgaagacctgctcccaggatgaattcagatgtcatgacgggaagtgtatttctcgtcagttcgtgtgtgactcagacagagattgtttagacggatcagacgaagcctcatgcccggtattgacctgcggccccgcctctttccaatgtaactcctccacctgcattccgcagctttgggcatgcgataatgacccggactgcgaagacgggtctgacgagtggccacagcgttgtcgcggcctctacgtgttccagggagactccagtccctgtagcgcctttgagtttcattgtttgtccggagagtgcatccatagctcctggcggtgcgatggaggcccggactgtaaggataagagtgacgaagagaattgtgcagtagcaacatgcagaccggatgagttccagtgctcagatggcaattgtatccacggttccagacaatgcgatagggaatacgactgtaaggatatgtccgatgaggtcggttgcgtcaatgtcaccctgtgcgaaggtccaaacaaatttaaatgtcatagtggagagtgcataaccttagataaggtatgcaacatggccagggactgtagagattggagcgatgagcccattaaggagtgtggcacggcagagtgtttggacaataatggcggctgctcccacgtatgcaatgatctgaaaataggttacgaatgtctttgtcctgatggcttccagctggtcgcccagaggcgttgtgaggacatagacgagtgtcaggaccccgatacttgcagtcaactctgcgtcaatctggagggtgggtacaagtgccagtgtgaggaaggatttcaactcgatccgcacacgaaggcatgcaaggcagtgggaagtattgcctatttgttcttcaccaataggcacgaggtgcggaagatgacgctcgatcggagcgagtatacaagtcttattccaaatttgaggaatgtggtcgcactcgataccgaagtagcctccaatcggatttattggagcgacctctcgcagcggatgatttgctcgacacagttggatcgggcccatggtgtgtcttcttacgacaccgtgatttcccgcgacatccaggctccagatggattggccgtcgattggattcattcgaacatttattggacagattccgttctcggcacagtttcagtcgccgataccaagggtgtaaaacgtaaaactctgtttcgcgagaacgggtccaagcctcgggccatcgtggtggaccccgtgcacggtttcatgtattggactgattgggggacaccagccaaaatcaagaaaggggggctgaatggcgtggatatttactctttagtgacggagaatattcaatggcctaacggcatcaccctggacctgctcagcggacggctgtattgggttgatagtaagctgcacagcatctcatcaattgatgtcaatggtgggaaccgcaagacgatactggaagacgagaagagactggctcaccccttttcattggcagtattcgaggataaggtattctggactgatatcattaatgaggcaatcttttctgccaacaggctcacagggagcgacgtcaatttattagctgagaacctgctgtcacccgaggatatggtccttttccataatctcacccagccccgtggtgtgaattggtgcgagagaaccaccctgtcaaatgggggctgtcagtacttatgtttacccgccccccagattaacccccacagtcccaagtttacttgtgcatgccctgacggcatgctgttggccagagacatgcgcagctgcttgacagaggcagaagcagcggttgctacacaagagactagcacagttcggctgaaggtatctagcactgccgtgcgaacccagcacacaacaacccggcccgtccccgacacctcgaggctgcccggcgctacgcctgggctgacaaccgttgagatcgtcacaatgtcccatcaggctctcggtgatgttgctggccgaggaaatgaaaaaaagccttccagtgtacgggcactgagtatcgtgctaccaatcgtgctcttagtgtttctgtgcctcggggtgttccttttgtggaaaaactggaggctaaagaacattaattctatcaatttcgacaatcccgtgtatcaaaaaacaacagaggacgaagtacacatttgccataatcaagacgggtacagttatcccagtcgccagatggtctctttggaggacgacgtggca

SEQ ID NO: 16169 - DNA, 2580 bp, synthetic construct
  misc_feature 1..2580: note = source = /note="Description of Artificial Sequence: Synthetic coding sequence"
  source 1..2580: mol_type = other DNA
atgggaccatggggatggaaattacgatggacagttgctcttttattagcagcagctggtacagctgttggtgacaggtgtgagcgtaatgaatttcaatgtcaagatggaaagtgtataagttataaatgggtttgtgatggttcagcagaatgtcaagatggatcagatgaaagtcaagaaacttgtcttagcgtgacttgtaaaagtggagacttctcttgtggaggtagagttaatagatgtattccacaattttggagatgtgatgggcaagtagattgtgacaatgggtcagatgagcaaggatgtccacctaaaacatgttctcaagatgaatttagatgtcatgatggaaaatgtattagtagacaatttgtatgtgatagtgatagagattgtttagatggaagtgatgaagctagttgtccagttttaacttgtgggccagcaagtttccaatgtaattcaagtacttgtataccacaactttgggcttgtgataatgatccagattgtgaagatggaagtgacgaatggccacaacgatgtagaggtctttatgtttttcaaggagattcatctccatgttcagcatttgaattccattgtttgtctggagaatgtattcattccagttggagatgtgatggaggtcctgattgtaaggataaatctgatgaagaaaattgtgcagtcgcaacttgtagaccagatgaattccaatgttccgatggaaactgtattcatggaagtagacaatgtgatagagaatatgattgtaaggatatgtcagacgaagtaggatgtgtcaatgttacattatgtgaaggacctaataaatttaaatgtcactcaggagaatgtataacattagataaggtttgtaatatggctagggattgtcgagattggtcagatgaaccaattaaagaatgcggaacagctgaatgtcttgataataacggaggatgtagtcatgtgtgtaacgacttaaaaattggatatgaatgtttatgtccagatggatttcaattagttgcacaaagaagatgtgaagatattgacgaatgtcaagatcctgatacttgttcacaactatgtgttaacttggaaggaggatacaaatgtcaatgtgaagaaggtttccaacttgatccacatactaaagcatgtaaagctgtaggatcaatcgcatatttatttttcacaaacagacatgaagtaagaaaaatgacacttgatagatctgaatatacgagtttaataccaaacttacgaaatgtagttgcacttgataccgaagttgcatcgaacagaatatattggtctgatttatcacaaagaatgatttgttcaactcaattggatagagctcatggagtttcatcttatgatactgttatttcaagagacatacaagctccagatggacttgctgttgattggattcattcaaatatctattggacagactctgtcttaggaacagtatctgttgctgatacgaaaggtgtaaaaaggaaaacattatttagagaaaacggaagtaaaccaagagctattgttgttgatcctgttcatggatttatgtattggaccgattggggaacaccagctaaaataaaaaaaggtggacttaatggagttgatatttattcattagttactgaaaatattcaatggccaaatggaattacattagatttattatcaggaagattatattgggttgattcaaaattacattcaatcagttcaattgatgtaaatggaggtaacagaaagactatattagaagatgaaaaacgattagctcatccatttagtttggcagtttttgaagacaaagtattttggacagatattattaatgaagctatctttagtgcaaatcgtctcactggatcagatgttaatcttttagcagaaaatttattgtcaccagaagatatggtactttttcataatcttactcaacctagaggtgttaattggtgtgaaagaactactttatcaaatggaggttgtcaatatttgtgtcttccagctccacaaataaacccacattcaccaaaattcacatgtgcttgtccagatggaatgttattagctagagatatgagatcatgccttactgaagcagaagcagctgttgctactcaagaaacttcaacagtccgattaaaagtaagttcaacagcagttagaacacaacacacaaccacaagaccagttccagacacatcaagattacctggagcaacacctggattaacaaccgttgaaatagttacaatgtctcatcaagcattaggagatgtagctggtagaggaaatgagaaaaaaccatcttctgttagagctttatcaattgtcttaccaattgttcttttagtttttctttgtcttggagttttcttactttggaaaaattggcgtttaaaaaatattaactcaattaattttgataatcctgtttatcaaaaaacaactgaagatgaggttcatatttgtcataatcaagatggatattcatatccatctcgacaaatggtttcattagaagacgatgtagct

SEQ ID NO: 16170 - DNA, 2580 bp, synthetic construct
  misc_feature 1..2580: note = source = /note="Description of Artificial Sequence: Synthetic coding sequence"
  source 1..2580: mol_type = other DNA
atgggaccttgggggtggaagttgcggtggaccgttgcactgttattggcggctgccggaaccgccgtcggagatcgctgcgaacggaacgagttccagtgccaggacgggaagtgcattagctataagtgggtttgtgacgggagtgcagagtgccaggatgggtccgatgagtcacaggagacatgtctctctgtcacgtgtaaatctggtgacttttcttgcgggggcagggtgaatagatgtatccctcagttttggaggtgcgacggacaggtagactgcgataacggatccgatgagcagggctgcccgcccaaaacttgttcccaagatgaattcaggtgtcacgacggcaaatgcattagtcggcagtttgtgtgcgactctgatcgtgactgcttggacggcagtgacgaggcatcatgcccagtactaacttgtggccctgcatcattccagtgcaattcaagcacatgcatccctcagctatgggcttgtgacaatgaccctgactgcgaggatggctcggatgagtggcctcagcggtgtagagggctctatgtgtttcagggggattcatcgccctgtagcgcattcgagtttcactgcctatcaggcgagtgtatccactctagttggcgctgtgacggcggaccggattgcaaagacaagtctgacgaggagaactgcgccgttgcaacgtgcaggccagatgagtttcagtgctctgacgggaactgcattcatgggtcccgacagtgcgatcgagaatacgactgcaaagatatgagcgacgaggttgggtgtgtgaacgtcaccctctgcgaaggtccaaataagtttaaatgccattccggcgaatgtattactttggacaaggtatgcaacatggcacgcgactgtcgcgactggagcgacgaaccaatcaaggagtgtggaactgccgagtgtttggataataacgggggctgctctcatgtgtgtaacgaccttaaaatcgggtatgagtgtttgtgcccagacggattccagctcgtggctcagcgcagatgcgaggacattgatgagtgtcaagaccccgacacttgctcacagttatgtgtcaaccttgagggaggatacaaatgccaatgtgaggaagggttccagctcgatccacataccaaggcttgcaaggctgtgggttcaattgcttatttgttcttcacaaatcgacacgaagtacggaaaatgaccctggataggagtgagtataccagtctgatcccgaacttaagaaacgtggtggcactcgacacagaagtcgcctcaaaccgcatctactggtccgacttatcccaaagaatgatttgttccacacagttggaccgggcccacggagtttcctcatacgataccgttatcagtcgagatatccaggcccccgacggactggcggttgactggatccatagtaatatttattggactgatagcgtacttggaactgtctcagtcgcagacacaaaaggagttaaacggaaaacactcttcagagagaacgggtctaagccacgggctatcgtcgttgatcccgtacacgggtttatgtattggaccgattggggcaccccagcaaagatcaagaagggtggcctcaatggcgtggatatttacagtctggtcactgaaaatatccagtggcctaacgggattaccctcgacttgttgtcagggaggctctattgggtggatagcaagctgcacagcatcagctcaatcgacgtgaacggcggcaaccggaaaactattttagaggatgagaaacggttggcccacccttttagccttgccgtgttcgaggataaggttttctggacggatatcattaatgaggccattttcagtgctaaccgactgacgggatccgacgtgaacctgctggctgaaaacctgctgtcccccgaggacatggtactgtttcacaatctcacgcagcccagaggtgtgaattggtgcgagcgaactacactctctaatggcggctgtcaatatttgtgcctacctgcaccacagatcaatcctcactcgccaaagtttacgtgcgcctgcccagatggcatgcttctggccagggacatgcgatcctgtttgactgaagccgaagcagctgtagccacacaggagacctccactgtgcgtttgaaggtctcgagtaccgccgtgcgtactcagcatactacgactaggccagtgcctgacacgtcacgtctgcccggcgccacgcctggtctgaccacagtagagatagtgacaatgtcgcaccaggccctcggagacgttgcaggccggggcaatgagaagaaaccgagctctgtcagggctcttagtattgtattgcccatcgtcttacttgtattcctatgcttgggagtctttctcctttggaagaattggaggctgaagaacataaatagcatcaattttgataatccagtataccagaaaacgaccgaggacgaagtgcacatatgccacaatcaggacgggtacagctacccatctcgacagatggtatctctcgaagatgacgtggcc

SEQ ID NO: 16171 - DNA, 2580 bp, synthetic construct
  misc_feature 1..2580: note = source = /note="Description of Artificial Sequence: Synthetic coding sequence"
  source 1..2580: mol_type = other DNA
atgggaccttgggggtggaaattaaggtggacagtggcccttcttcttgccgccgccggaactgcagtgggggatcgctgtgagcgaaatgaatttcaatgtcaggatggaaaatgcattagttacaaatgggtatgcgacggatccgccgaatgccaggatggaagtgatgagagtcaagagacatgcctatctgtcacatgtaaatctggggatttctcctgcggagggcgcgtgaataggtgcatcccacagttctggagatgcgatggacaggtcgattgtgacaatgggtcagacgaacagggatgtccacctaaaacttgctcgcaggacgaatttcggtgtcacgatggaaagtgtatcagtaggcaattcgtgtgtgattcagatagggactgccttgatgggtccgatgaagcttcctgtccagtactcacatgtgggcctgcctctttccagtgtaattcatctacttgcatccctcagttatgggcctgtgataatgatccagattgcgaggatggatccgatgaatggccccagcgttgtaggggactgtatgtctttcagggagattcctcaccatgctctgccttcgaatttcattgcctttcaggagaatgcattcactcttcctggcggtgtgatgggggacctgattgtaaagacaaatctgatgaagaaaactgcgcagtagcaacttgccgcccagatgaatttcagtgctctgacgggaactgtattcatgggtcccgacagtgtgatcgtgaatatgattgcaaggatatgtcagatgaagtagggtgcgtcaatgtgacactatgtgagggaccaaataaatttaaatgccactctggagagtgtatcactctagataaagtgtgtaatatggctcgcgactgccgggattggtccgatgagcccataaaagaatgtggaacagctgagtgtctagataacaacgggggatgcagtcatgtatgtaacgatcttaaaataggatacgagtgtctctgtcctgatgggttccagctcgtagcacagcggcggtgcgaggatatagatgaatgtcaggaccctgatacatgctcccagctgtgtgtcaatctcgaagggggatataaatgtcagtgtgaagaaggattccagttagacccacacacgaaggcttgcaaagcggtggggtctatcgcgtatttattctttacaaatcgccatgaggtgagaaaaatgacgcttgatcgctctgagtatacatctctgatccccaatcttagaaatgttgttgctcttgacacagaagtagcctctaatagaatttactggagtgatttatcgcagagaatgatctgcagtacacagctcgatcgggcacatggagtgagttcctatgatacagtgatatctcgcgatatacaggcccctgatggactcgctgtggattggatacattcaaatatctactggacagattctgtgctcggaactgtgtcggtggctgacactaaaggggtgaaaagaaaaacactcttcagggaaaatggatcaaaaccccgggctatcgtcgttgatcccgttcacggatttatgtattggactgattgggggacacctgctaaaatcaagaaaggaggactcaacggggtggatatttactcactcgtcacagaaaacatccagtggcccaatgggataacactagatcttctttcagggaggctctattgggtggattcaaaacttcattctatctcctctattgatgtgaatggaggaaatcggaaaactattctcgaagatgaaaaaagactagcacaccctttctccctggccgtatttgaggataaggtcttctggacagatataattaatgaggccatctttagtgccaaccgcctgacagggtccgacgtgaatctgctggcagaaaatctgctaagtcctgaagatatggtgctctttcataatctgacacagccaagaggagtgaactggtgtgaaaggacaactctatctaacggagggtgtcagtatctgtgcctgccagccccgcaaatcaacccacattccccaaaatttacttgtgcttgtcctgatgggatgctgctggcccgggacatgcgatcatgtctaactgaggccgaagcagcagtggccactcaggaaacatctacagtcagacttaaagtctcttcgacagctgtcaggactcagcatacaactactcggcccgtccccgacacttcacggcttccaggggcaacaccaggactgacgactgtcgaaatcgttacaatgtctcatcaggccctgggagatgtggccgggagggggaacgaaaaaaaaccttcatctgtgcgagctctttccatcgtcttgccaatcgttctgctggtgttcctgtgcctcggggtgtttctcctgtggaaaaattggcggctcaaaaacataaattctataaattttgacaaccctgtctatcagaaaacaactgaggatgaggtacatatatgtcataatcaggacggatattcttatccttcccgccagatggtatctctggaagatgatgtagca

SEQ ID NO: 16172 - DNA, 2580 bp, synthetic construct
  misc_feature 1..2580: note = source = /note="Description of Artificial Sequence: Synthetic coding sequence"
  source 1..2580: mol_type = other DNA
atgggcccgtgggggtggaaactccgatggacagtcgccttgctgctggcggcggcgggaactgcggtcggggatagatgtgagcgcaacgagtttcaatgtcaggacggcaagtgtatttcatacaaatgggtatgcgatggtagcgcggagtgtcaagacggctcggatgaatctcaggagacatgtctctcggtgacttgtaagagtggtgattttagttgcggtgggcgagtcaatcgttgcattccacagttctggcgctgcgacggacaggttgattgtgataatggcagcgacgagcaaggctgcccgcctaagacgtgctcgcaagatgagtttcggtgtcacgatggtaaatgtatctcacgccagtttgtatgcgattcggaccgggactgtctcgatggttctgacgaagcttcgtgccccgtgctcacctgtggtcccgcttcattccagtgtaattctagcacctgcataccccagttgtgggcatgcgataatgatccagattgtgaagatgggtccgacgaatggccccaacgttgccgaggcttgtacgttttccagggagactcatccccatgctcagcctttgagttccactgcctttcaggcgagtgcatccattcttcttggcgttgcgatggcggacctgattgcaaggacaagagcgatgaggaaaattgcgcagtagccacatgtcgcccagacgaattccagtgttcggatggtaattgtatacatggatctaggcaatgcgatcgagagtatgattgtaaggacatgtcggatgaagtcggctgtgttaacgtcacattgtgtgagggacctaataagttcaagtgtcattcaggagagtgcattactttggataaggtttgcaatatggcccgggattgcagagactggtcggacgagcccatcaaggaatgtggtactgcagagtgcctagataacaacggcggatgctcgcatgtctgtaacgatctcaaaatagggtacgagtgtctctgcccagacggattccagcttgtggctcaacggcgatgcgaggacatagatgaatgccaggatcctgacacctgcagccagctgtgtgtgaacctagagggcggatataagtgtcaatgcgaagagggtttccagctcgatccacacactaaggcctgtaaggcagtcgggtcaatcgcgtacctgttttttacgaaccgtcatgaagtccgtaagatgactttggacaggtcggaatacacctctctgatccctaatttacgcaatgtggtggcgctcgacactgaagtcgcatcgaatagaatctattggtcggacctctcgcagcgcatgatttgctccacgcagctcgatcgtgcacatggcgttagctcatatgatacggttatttctcgagatatccaagcaccagacggacttgccgtggattggatccattccaacatttactggactgattcggttctaggcacagtctccgttgcggatacaaagggggtcaagcggaagaccctgtttcgggagaacgggtccaaaccacgggcaattgttgttgatccagtgcatgggttcatgtactggaccgattggggaacccctgctaagattaaaaagggtggtcttaatggagtcgacatctactctcttgttacggagaacattcaatggccgaatgggattaccttggatctcttatccggtagattgtattgggtagatagtaagctacacagcattagttcgatcgatgttaatggtgggaacaggaaaaccatccttgaggatgagaagagacttgctcatcccttctcgttagccgttttcgaggacaaggtcttctggaccgacatcatcaacgaagcaattttttcagctaataggttgacaggctcagacgttaatctcctcgcggaaaatttgttgtctccagaagatatggtcctattccataacctcacccagccccgaggcgttaactggtgcgagaggaccacactgtcgaacggcggttgtcaatacctctgtctgccagcgccccagattaacccgcatagccccaagttcacgtgcgcttgtcctgatggtatgcttctggctcgtgatatgcgaagctgtctgacagaggctgaggctgcagtcgcgacacaggaaacttcaaccgttaggcttaaggttagttccacagccgtcagaacccagcacacgacaactcgaccggtgcccgacaccagcagacttcctggcgctactcctggattgaccactgttgaaatcgtaacgatgtcacaccaagctctcggcgatgtggcaggacgcggaaatgaaaagaagccaagttcagtgagggcgttgagtattgtgcttcccatcgtcctccttgtttttctatgtttaggcgtcttcctgctgtggaaaaactggcggctaaagaacatcaattccattaacttcgataatcccgtatatcaaaaaaccacggaggacgaggtccacatctgtcacaatcaggacgggtatagctacccttctcgccagatggttagccttgaggacgacgtggcg

SEQ ID NO: 16173 - DNA, 2580 bp, synthetic construct
  misc_feature 1..2580: note = source = /note="Description of Artificial Sequence: Synthetic coding sequence"
  source 1..2580: mol_type = other DNA
atggggccctggggctggaaactgcgttggaccgtcgccctgctcctggccgcggccggcacggccgtgggagaccgttgtgaaagaaacgaattccagtgccaggacggaaaatgtatttcatataaatgggtgtgcgatggtagtgcagaatgccaggacggaagcgatgaaagccaagaaacctgtctgtctgtgacatgtaagagtggtgacttttcctgcggtgggcgagtgaaccggtgcatacctcagttttggcggtgtgatggacaggtcgattgtgacaacggcagcgacgaacagggatgccccccaaagacatgttctcaggatgaatttcgctgtcatgacggaaaatgcatcagccgccaattcgtgtgtgactcggaccgtgactgcttggacggctctgatgaggcatcctgtcctgttctcacttgtgggcccgcctcgttccagtgcaactcctcgacatgcatcccacagttgtgggcctgcgataacgatccagattgcgaggatggatctgacgagtggcctcagcgttgtagaggcctctatgtattccagggcgactcttcgccctgctcagcttttgaattccattgcctctctggcgagtgtatccacagcagttggcgatgtgacggggggccagactgtaaggacaagagtgatgaggagaattgcgcggttgctacctgcaggcccgacgagttccagtgttccgacggcaactgtattcacggttccagacagtgcgatcgagaatacgactgtaaggatatgagcgacgaggtgggatgtgtcaacgtgacgctgtgcgaaggaccaaataaattcaaatgccacagcggagagtgcattaccctggacaaggtgtgtaacatggcccgggactgcagagattggtccgatgaacccattaaggagtgtggcacagcggagtgcttggacaacaacggaggatgctcacatgtgtgtaacgacctcaaaattgggtatgagtgcctgtgccctgacggcttccaactggtcgctcaaaggaggtgtgaggatattgacgaatgtcaggaccctgacacctgttcacagttgtgcgtgaacctcgaagggggctacaagtgtcagtgtgaggagggattccaacttgaccctcacactaaggcctgtaaagctgtggggtccatagcctatctgtttttcacaaatcgccatgaggtgagaaaaatgactttggacagatctgaatatacttccctgatcccaaatctgcggaatgtcgtggccctcgataccgaggttgccagtaatcggatatactggtcagacctgagtcagcgaatgatctgctctactcaattagacagggcccacggcgtttcctcgtacgataccgttatctcaagagatattcaggcccctgacggtttagcagtggactggattcactcaaatatttactggacagattcagtcttgggcacagtgtcagttgcggataccaaaggcgtgaagcgaaagactctattccgagaaaacggctccaagcctcgggcaatcgttgtcgaccctgtgcatgggttcatgtattggactgactggggcacccctgcaaaaataaaaaagggtggcctcaatggggttgatatctattcactggtcaccgagaatatccagtggcccaatgggattacccttgacctgctgagtggacgactttattgggtggactctaagctgcacagcatctcctcaatcgatgtcaacggcggcaaccgaaagacgattttagaagacgaaaaacgcctggcccacccattttctcttgcagtctttgaggacaaggtattttggaccgatatcatcaacgaagctatcttcagcgctaatcgcctgaccgggagtgacgtgaacctcctcgcagagaacctcctctctccagaagacatggtcttattccacaaccttactcagccacgcggggttaactggtgtgaaaggacgaccctgagtaacgggggatgtcaatacctgtgcctgccagcgccacaaattaacccccacagtccaaaattcacatgtgcgtgtcccgatgggatgctgctggctcgggacatgagatcgtgcctcacggaagccgaagccgccgttgctacccaggaaacatctaccgtaagactgaaagtcagttctaccgctgttcgcacacaacacacgacaaccaggccagttcccgacacctcccgccttccaggggcaaccccagggctgaccacagtagagatcgtgactatgagtcaccaggccctgggggacgtggctgggagggggaacgaaaaaaagcctagtagcgtgcgcgccttgtcaattgtgttaccgattgttctgctggtgtttttgtgcctcggcgtgttccttctgtggaaaaactggaggcttaaaaatattaacagcatcaacttcgacaacccggtctatcagaagacaacagaagatgaggttcatatctgtcataatcaggacggatattcctacccctcaagacagatggtgtcgctggaggatgatgtggcg

SEQ ID NO: 16174 - DNA, 2580 bp, synthetic construct
  misc_feature 1..2580: note = source = /note="Description of Artificial Sequence: Synthetic coding sequence"
  source 1..2580: mol_type = other DNA
atggggccctgggggtggaaactcaggtggacagttgccctactgctagccgcagccggaactgcagtaggagataggtgtgaaaggaatgaattccagtgccaggatgggaaatgcatttcctataaatgggtgtgtgatgggagtgctgaatgtcaggacgggagtgatgaatctcaggaaacttgtctgagtgtcacttgcaaatctggagattttagttgtggggggcgtgttaatcggtgcatcccacagttttggcggtgtgacggacaggttgattgcgacaatggatcggatgagcagggatgccctccaaaaacttgttctcaggatgaatttcggtgtcatgatggaaagtgtatatctcgacagttcgtttgtgacagtgatcgagattgtcttgatgggtctgatgaagcatcttgtcctgtgttaacatgtggaccagcctccttccagtgtaacagtagtacatgcataccccagctctgggcctgtgataacgatcccgattgcgaagatggatctgatgaatggcctcagaggtgccggggactttatgtgtttcagggggattcctctccatgctcagcttttgaattccattgcctctcaggggaatgtatccactctagttggcgctgcgatggggggcctgattgtaaagataaatccgatgaagaaaactgcgccgttgccacatgtcgacctgatgaatttcaatgcagtgatggaaactgcatccatggaagtagacagtgtgaccgggaatatgattgcaaagacatgtcagatgaagtgggatgtgttaatgtcacactgtgtgaaggacccaacaaatttaagtgccactcaggggagtgcataacactggataaggtttgcaacatggccagggattgtcgggattggagtgatgaacctataaaagaatgcggaacagcagaatgtcttgataacaacggggggtgcagtcatgtatgcaacgatttaaaaatcgggtatgagtgtctatgcccagacgggttccagcttgtggcccagcggagatgtgaagacatcgatgaatgtcaggaccccgatacatgctcgcagctgtgtgtcaaccttgaaggaggatataaatgccagtgtgaagaaggatttcagcttgatcctcacactaaagcctgtaaggccgtgggatccattgcatacctattcttcacaaaccgccacgaggtgcgcaaaatgactctagatcgatccgaatacacaagtttgatacccaatctcaggaacgttgtggcccttgatacagaagtggcctccaatcgtatatattggtcagacttaagtcagaggatgatttgcagtactcaacttgacagggcacatggagtatcatcctacgatacagtaatatcccgggatatccaggcccccgatggactcgctgtagattggatccactctaatatttattggacagacagtgtgcttggaacagtatccgtcgctgatacaaaaggagttaaacggaaaacactatttagagaaaatgggtcaaagcctcgggccatcgtagtggatcccgttcatggatttatgtattggacagattgggggacacctgccaaaataaaaaaaggaggactgaatggagtggatatctattcgttagtaacagaaaatatccagtggcccaatggaataacactcgatctgctgagtgggcggctttattgggttgatagtaaattgcactctatctcttctatcgatgtgaacgggggaaatcgcaaaactatcttagaagatgaaaaacgcctcgcccatcccttcagtcttgctgtgttcgaagataaagttttctggactgatataataaacgaggccatattttcagctaaccgcctcactgggtcggatgtaaatctgcttgcagagaatcttctatcacctgaagatatggtcctgttccacaaccttacgcagcctagaggggtgaactggtgtgagcgaacaactttatccaatgggggatgtcagtatctctgcctacccgccccccagatcaacccccattcccccaaatttacatgcgcctgccccgatggaatgctccttgctagagatatgcgcagttgtctaacagaagcggaagccgctgtggctacacaggaaactagtacagtgaggctgaaagtgtcatctactgcggtccggacacaacacactactacacgacccgtccccgatacatcacgactccccggggctactccagggctaactactgttgaaatagtgactatgtcacatcaggccctcggagatgtcgccgggcgaggaaatgaaaaaaaaccttcatctgtcagggcgctttcaatcgtgctaccaatagtgctgcttgtcttcctctgtctcggagtattcctgctttggaaaaactggcgcttgaaaaatatcaattctatcaacttcgacaatcccgtgtatcagaaaactacagaagatgaagtgcatatctgtcataaccaagatggatattcatatccttcacggcaaatggtctccctagaagatgatgtggca

SEQ ID NO: 16175 - DNA, 2580 bp, synthetic construct
  misc_feature 1..2580: note = source = /note="Description of Artificial Sequence: Synthetic coding sequence"
  source 1..2580: mol_type = other DNA
atggggccttgggggtggaagttgcgatggaccgtggccctgctgctggcggctgccggaactgctgtgggagatcggtgcgaacgcaacgagtttcagtgtcaggatggaaaatgcattagctacaaatgggtctgcgacgggtcggccgaatgccaggatggttccgatgaatcccaggaaacttgtctgagcgtgacttgcaaatcgggcgatttttcatgcggcggccgggtcaaccggtgcattccacagttttggcggtgcgacggacaggtcgactgcgacaacggatccgatgagcagggctgcccaccaaagacctgttcgcaggatgagttccggtgccacgatgggaagtgcatctcccgccagttcgtgtgcgattcagaccgagattgcctcgacggctccgatgaggcttcgtgtccggtcctgacctgcggaccggcttcatttcagtgtaactcttcaacttgcattccccagctgtgggcctgcgataacgatccggactgcgaggacggttccgatgagtggccacaacgctgccggggactctacgtgttccaaggcgactcgtccccgtgtagcgcctttgaattccattgcctgtcgggcgaatgcatccacagctcgtggagatgcgacggcggtcctgattgcaaggataaaagcgacgaggaaaattgtgctgtggcaacgtgccgcccagacgaatttcagtgttccgacggtaattgtattcacggttcccggcagtgcgatcgcgagtatgactgcaaagacatgtctgacgaggtgggctgcgtgaacgtgaccctttgcgaaggacccaacaagttcaagtgccacagtggggaatgtatcaccctggacaaggtttgtaatatggcgcgagactgccgcgattggtcggatgagccgattaaagagtgcggaacggcagagtgcctcgataacaacggtggatgctcacacgtttgcaacgacctgaaaatcggttacgagtgtctttgcccggatggtttccagctggtggcacagcggagatgtgaggacatcgacgaatgtcaggacccggacacttgttcccagctctgtgtgaacctcgaaggaggatacaaatgccagtgcgaggaaggattccagctggatccccacactaaggcatgcaaggccgttggttcaatcgcgtacctgttcttcaccaatcggcacgaagtccgcaagatgactttggaccggtcagaatacacttcgctcattcccaacctcagaaacgtcgtggcgcttgataccgaggtagccagcaaccgcatctactggtcggacctttcacaacggatgatctgcagcacccaactcgatcgcgcgcatggagtttcgagctacgacacggtcatctcccgggacattcaggcgccagacggactggccgtcgactggatccattcaaacatctactggaccgactcggtgctgggaaccgtctccgtggcggacaccaagggtgtcaaacgcaagactctctttagagaaaacggaagcaagcctagagcgatcgtggtcgacccagtgcatggcttcatgtactggacggactgggggaccccggccaagatcaaaaagggaggactgaatggcgtggacatctattcgctggtgactgagaacatccaatggcctaacggcatcactctcgacctcctgtcggggcgtttgtactgggtggattcaaaactgcatagcatatcctccattgacgtgaatggcggtaaccgcaagaccatccttgaggacgagaagcgccttgcacacccattcagccttgccgtgttcgaggacaaggttttctggaccgacatcattaacgaagccatcttctccgcaaaccgcctgaccggctcggatgtgaacctcctggccgaaaatctgctttccccggaggacatggtgttgtttcataacctgactcaacctcggggagtcaactggtgcgagcgcactactctgtctaacggcggatgtcagtacctgtgtttgccggcaccgcaaatcaatcctcactcgccgaagtttacctgtgcctgcccggacggaatgttgctggcccgagacatgagatcgtgtttgactgaggcggaagcggcggtcgccacccaagaaacttcgactgttaggctgaaagtcagctcgaccgcggtgcgcactcaacacaccaccacgcgtccagtgccggatacttcacgcctgccaggtgcaacgccaggactgacgactgtagaaatcgtcaccatgtcccaccaggcactcggtgatgtggccggacgcggtaatgaaaagaaaccgtcatcggtgcgcgctctcagcatcgtgctgcctatcgttttgctcgtgttcctgtgcctgggagttttccttctctggaagaattggaggctcaagaatatcaattccatcaatttcgacaacccggtgtaccaaaagaccaccgaggacgaagtccacatctgccataatcaagacggctacagctatccaagcagacaaatggtaagcctggaagatgacgttgcc

SEQ ID NO: 16176 - DNA, 2580 bp, synthetic construct
  misc_feature 1..2580: note = source = /note="Description of Artificial Sequence: Synthetic coding sequence"
  source 1..2580: mol_type = other DNA
atggggccgtggggttggaagctgagatggactgtggcactgctgcttgcggcagctggtactgcagtcggtgaccggtgtgagagaaacgaatttcaatgtcaagatggaaagtgtattagctacaagtgggtctgtgacggttcagcagaatgccaggacggcagcgatgaaagtcaagaaacctgtctgtcagtgacgtgtaagtcgggggacttctcctgcggtggcagggtcaaccgctgcattcctcaattttggaggtgcgacggacaagtggattgtgacaacggatcggatgaacaaggctgtcccccaaagacgtgcagccaagacgagttcagatgtcacgatggtaaatgtatctcaaggcaatttgtgtgtgactcggacagagattgtttggacgggagcgatgaagcctcttgtccggtgctcacttgtgggccagcttcctttcagtgtaactccagcacctgtatccctcagctttgggcctgtgataatgaccctgactgtgaggatggatccgatgagtggccacaaaggtgtagaggtttgtacgtgtttcagggtgacagctccccctgctcggcattcgaatttcattgtctttcaggggaatgtattcattcgtcctggagatgtgacgggggacctgactgtaaggataagagtgatgaagagaattgcgccgtggcaacgtgccggcctgatgaatttcagtgttcagatggtaactgcatccatggctcgcgacagtgtgatagagagtacgactgtaaagacatgagcgatgaggtgggttgtgtgaatgtgaccctttgcgaaggacccaacaagttcaagtgtcactcgggcgaatgcattaccttggataaggtttgcaacatggcgagagactgccgtgattggtcagatgaacctatcaaggagtgcgggaccgccgaatgtcttgataacaacggtggttgttcgcatgtgtgcaatgatcttaagattggctacgaatgcctctgccctgatgggtttcaacttgtcgcacaaaggaggtgtgaggatatcgacgagtgtcaggacccagatacttgctcccaactttgtgtgaacctcgaaggtggttacaaatgccagtgtgaagagggcttccaactggatccccataccaaagcatgtaaggcagtgggatcgatcgcctacttgtttttcactaatcgccacgaggtccgaaagatgaccctcgatcgctctgaatacacttcattgatccctaatcttagaaacgtcgtcgcactggataccgaagtcgcatctaatcgaatttactggtcagatttgagccaacgcatgatttgctccactcaacttgatcgtgcacatggcgttagctcgtacgacaccgtcatatcgcgagacatccaagcgccagacggacttgctgtggactggattcattcaaacatctattggaccgacagcgtgctggggacggtgtccgtcgctgatactaaaggggtcaagagaaagactttgttccgagagaacggatcaaagcctagggcgattgtcgtggatccagtgcatgggtttatgtattggacggattggggaacgcctgcaaagattaagaaggggggtcttaatggagtggacatttactcgctggtgactgaaaacatacaatggcctaatgggattacccttgaccttctctccggacgattgtactgggtggattccaagctgcattcgatctcctcgatcgacgtgaatggaggaaaccgaaaaaccattcttgaagatgagaaacgtctggcacatccatttagcctcgccgtgtttgaagataaggtgttttggactgatatcataaacgaagcaatattctccgctaataggctgaccggttcggacgtcaaccttctggcggagaacttgctgagccctgaggatatggtcctctttcacaatctgacccagcctagaggcgtcaactggtgtgaaagaactacgctgtccaacggtgggtgtcagtacctctgccttcccgcaccacagattaatccgcactcgcctaagtttacctgcgcatgccctgatggaatgctcctcgcacgagatatgaggtcgtgtctgaccgaagctgaagccgcagtggcgactcaggaaacctcgactgtgaggcttaaagtgagcagcacggcggtgagaacccagcacaccaccaccagacctgtgccggacacctccaggcttccaggagctaccccaggcctcacgactgtcgagattgtcaccatgtctcaccaagccctgggggacgtggcgggcaggggtaacgaaaagaagccgtcaagcgttcgcgcactcagcattgtgctcccaatagtccttctggtgttcctttgcctgggagtgttccttctgtggaaaaactggcgcttgaaaaacatcaattcgatcaacttcgataacccagtgtaccagaaaactaccgaggacgaggtccacatttgtcataaccaagatggatactcctatccctcccgtcagatggtcagccttgaggacgatgtcgcc

SEQ ID NO: 16177 - DNA, 2580 bp, synthetic construct
  misc_feature 1..2580: note = source = /note="Description of Artificial Sequence: Synthetic coding sequence"
  source 1..2580: mol_type = other DNA
atgggtccttggggatggaagctccgctggacggtcgccctcttgcttgccgccgccggtactgcagtcggtgaccggtgtgagcggaacgaatttcaatgccaagacgggaagtgtatttcatacaagtgggtgtgtgacggatcagccgaatgtcaggatggttcggatgaatcgcaagaaacgtgcctttcagtcacctgtaaatcgggagacttttcgtgtggaggacgcgtgaacagatgtataccgcaattctggcgttgtgacgggcaagtggattgtgataacggcagcgatgaacaaggatgtccccctaagacctgctcccaagatgaatttagatgtcatgatggaaaatgcattagtcgacagtttgtctgtgacagcgatcgtgattgtcttgatggctccgatgaggcatcttgtccagtgctcacgtgtggcccggcttccttccagtgtaacagctcaacttgtataccccaactgtgggcatgcgataacgatccagattgtgaggacggctcggatgagtggccacaaagatgccggggcttgtacgtgtttcaaggagacagctcgccatgttcggccttcgagtttcactgtctttcgggtgagtgcatccattcgtcatggagatgcgacggtgggcctgattgtaaggacaagagcgatgaagagaattgtgcagtcgcaacctgccgcccggatgaatttcagtgctctgacggtaactgtatccatgggagccgccaatgtgatcgtgaatacgattgcaaagacatgtcagatgaagtaggttgcgtgaatgtgacgctttgcgaaggccctaataagtttaagtgtcattccggtgaatgcattaccctggataaagtttgcaatatggcccgagactgtagggattggtccgatgagcctatcaaggagtgcggcaccgcggaatgtctggacaataacggtggttgctcacatgtctgtaatgacttgaagattggatatgaatgtctttgtcctgatggatttcaactggtggcacagcggcgctgcgaggacattgatgaatgtcaagaccccgacacctgctcgcagctgtgcgtcaacctggaaggtggatacaaatgtcagtgtgaagagggattccaacttgatcctcataccaaggcgtgcaaggcagtgggatcaattgcataccttttcttcactaataggcacgaagtgagaaagatgacgctggataggtcggaatacaccagcctgatcccaaaccttagaaacgtggtcgccttggacactgaagtggcgtcaaatcgcatttactggtccgacttgtctcaacggatgatttgctcgactcagctggatagagcacacggtgtcagttcttacgacaccgtgatctccagagacatccaggcccccgatggcctggccgttgattggatccattccaacatttactggaccgattctgtgctcggaactgtgtccgtcgcagatactaagggtgtgaagcgtaagaccctctttagagagaacggttccaaaccgcgagcaatcgtcgtggatccagtgcatggattcatgtactggaccgactgggggactccagccaagatcaaaaaggggggcctgaatggcgtggacatttactcacttgtgaccgaaaacattcagtggcctaatggaattactcttgatctgctctctggtcgcctgtactgggtcgacagcaaactgcattcgataagctccatcgatgtgaacggtgggaaccgaaagactatccttgaagatgaaaagagactggcacaccctttttctctcgcagtgtttgaagataaagtgttttggaccgatatcataaatgaagctatcttttccgcaaatcgtcttaccgggtctgatgtaaacctcctggcggagaatctgctgtcgcccgaggacatggtcctgtttcacaatcttacgcagccccgaggggtcaactggtgtgaacggactactctcagcaacggcggatgccagtacttgtgcctccctgcacctcaaatcaacccccactcgcccaagttcacctgcgcttgcccagacggcatgcttcttgcaagggatatgagatcgtgtctcaccgaagctgaggcggcggtcgccacccaggaaacctcgactgtgagacttaaagtctcatccaccgcagtgaggacgcagcataccaccacccgcccagtgcctgatacctcacgactccccggagcaactccaggactgaccactgtggaaatagtgactatgtcacaccaggcactgggtgatgtcgcaggtaggggcaacgagaaaaagccaagctccgtgagagcgttgtctattgtgcttcctattgtccttctcgtgtttctgtgtctgggagtgttccttctttggaagaactggcggctcaagaacattaactcaataaacttcgataatccagtataccagaaaacgactgaggatgaggtccatatttgtcataaccaagatggatattcctacccttcgcgccagatggtgtcactggaggatgacgtcgca

SEQ ID NO: 16178 - DNA, 2580 bp, synthetic construct
  misc_feature 1..2580: note = source = /note="Description of Artificial Sequence: Synthetic coding sequence"
  source 1..2580: mol_type = other DNA
atgggcccttggggatggaagttgcgatggactgttgccttactgttagccgctgctggtactgcagttggcgacagatgcgagcgaaatgaatttcaatgtcaggatggaaagtgcatctcatacaagtgggtttgcgatggttcggctgaatgtcaggatggaagtgatgagtcacaagaaacctgtctctcagtgacctgcaaatcgggcgatttctcttgtggcggtcgagttaatcgatgcattccacaattctggagatgtgatggtcaagttgattgcgacaacggaagcgatgagcagggctgtccccctaagacttgtagccaggacgaatttaggtgtcacgacgggaaatgcatatctaggcaattcgtctgcgactctgatagagactgcctggacggttcagacgaagctagctgtcccgtgctcacctgtggacccgcttcgtttcaatgtaattccagtacttgtatcccgcaactttgggcatgcgataacgatccggattgtgaagacggttcggatgaatggccccaacgatgccgagggttgtacgtgttccaaggtgactcatctccttgttctgccttcgaatttcactgcctcagtggtgagtgcattcattcatcgtggagatgtgatggaggacctgattgcaaagataagtccgatgaagaaaactgtgctgttgcgacatgtcggcctgatgagtttcagtgtagcgatggaaattgcattcacgggtccagacaatgtgatcgcgaatacgattgtaaggatatgtccgacgaggttggatgcgtcaatgtgaccttgtgcgagggtcccaacaagttcaaatgccactctggtgaatgtataactctggataaagtttgcaacatggctagggactgcagagattggtctgatgagcctattaaggaatgtggaacagccgaatgtttagacaataacggtggctgtagtcatgtatgcaatgatcttaagatcggttatgaatgcttatgtcccgatggctttcaacttgttgcccaaagaagatgcgaagacattgatgagtgtcaggatccagatacttgcagtcagctttgcgttaaccttgagggcggttataaatgccagtgtgaggaaggatttcagctagatcctcataccaaagcttgcaaggccgttggatcgattgcgtatctttttttcaccaatagacatgaagtacggaaaatgacactcgatcgtagcgaatatacatcattaattccaaatctccgtaacgtcgttgctcttgatacagaggtggctagtaataggatctattggtcggatttgagccaaaggatgatctgttctacccagctggatcgagcacacggagtttcctcttatgatacagtgatcagtcgggatattcaagcccccgacggcttggctgttgactggatccattcaaatatatattggacagatagcgtacttggtactgtttctgttgctgatactaaaggagtgaaacgtaagactttgtttagggagaatggatcgaaacccagagcgatagttgtcgatcctgtgcacggtttcatgtactggaccgattggggaactccagctaaaattaaaaaaggagggttgaacggcgttgacatctactcgttagtgactgaaaacattcagtggcctaatggtatcactttagatcttctctcaggaaggttgtactgggtggatagcaagcttcactccatcagctctattgatgtcaacggaggaaatcgaaagactattctagaagacgaaaaacgtcttgctcacccattctctctggccgtgttcgaagataaggttttctggactgacataataaatgaggctattttctctgctaaccgactaacgggatctgacgttaatctcctagctgagaatttgcttagcccggaggacatggtgctcttccataacttgactcagcccaggggcgtcaactggtgcgagcgtacgacgctgtctaatggtggttgccagtacctctgtttgcctgcaccacaaattaatccgcacagcccaaagtttacatgcgcttgtccagatggaatgcttttggcgagggatatgagaagttgtttaaccgaggccgaggctgctgttgcgacacaagaaactagcacggtccgtttgaaagtaagttcaactgccgtccgtacgcagcacaccacgaccagaccagtcccagataccagtcgtctccctggtgccacaccggggctaactacggtggagattgttaccatgtcccatcaagcgttgggtgacgttgcaggccgcggcaatgaaaagaaaccttcatctgttcgagctctctcaatcgttctccctatagttctgttggtgtttctttgcctgggtgtcttcttgctttggaaaaactggcgcttgaagaacattaactctattaattttgacaacccagtttatcagaaaaccaccgaagatgaggtccacatatgccataatcaggatggctattcctatccaagccgtcagatggtgtcattagaggacgacgtagca

SEQ ID NO: 16179 - DNA, 2580 bp, synthetic construct
  misc_feature 1..2580: note = source = /note="Description of Artificial Sequence: Synthetic coding sequence"
  source 1..2580: mol_type = other DNA
atggggccctggggctggaagttgcgctggacagtcgcgttgttactcgctgcagccgggacagcagtgggggaccgttgtgaacggaatgagttccaatgccaggacggaaagtgtatttcatataaatgggtgtgtgatggtagtgctgagtgccaagacggtagcgacgagtcacaagagacttgtctgtctgtgacctgcaaatccggggattttagttgtggcggcagagttaaccggtgtataccacaattctggagatgcgatgggcaagtcgactgcgacaacggttcggatgagcaaggatgcccccctaaaacatgtagccaggatgagtttcggtgtcatgacgggaagtgcatttcgagacagttcgtgtgcgacagcgacagggattgtttggacggctctgatgaagcatcttgcccagtgctgacatgtggtcccgcgagcttccagtgcaactccagtacttgcatccctcaactgtgggcctgtgacaatgatccagactgtgaagacggctctgacgagtggccacagagatgccgcggtctctatgtgttccaaggcgatagttccccctgcagcgcatttgagtttcattgtctcagcggagagtgcatccacagttcgtggcggtgcgatggaggccccgactgcaaggacaagtccgacgaggagaactgtgcagtcgctacatgccggccggatgagtttcagtgcagcgacgggaattgcatccacggatctcggcagtgcgatcgggagtacgattgtaaggatatgagtgatgaggtgggctgtgttaatgtgaccttatgcgagggaccaaacaagtttaaatgccactcaggagaatgcatcacgctggacaaagtctgcaatatggctcgggattgccgagattggagcgacgagcccataaaggagtgtgggacagccgaatgtctcgataacaatggaggctgttcccacgtctgcaatgatctaaagataggctacgaatgcctgtgtcccgacggctttcagctggtagcccagcgccgatgtgaagatatcgatgaatgccaggacccggatacatgcagccagctatgcgtgaacttggagggcggttacaagtgccagtgcgaggaaggttttcaacttgatccccacactaaggcctgtaaagccgtgggcagcatcgcctatctgttcttcaccaaccgtcacgaagtccgaaagatgaccttggacagaagtgagtatacctctctcatccctaacctgcggaatgtcgtggcactggatacagaggtggcctctaaccggatctattggagcgacctgagccagcggatgatctgcagcacacagttggatcgcgctcatggcgtcagcagctatgataccgtgattagccgagacattcaggcccctgatggcctagccgtggattggatccattccaatatctactggaccgattcggtccttggcacagtctctgtggcggacaccaagggggtgaaacgcaaaactctatttcgggagaatggctctaagcccagggccatagtcgtggatcctgtgcatggattcatgtactggacagactggggtactcccgctaagatcaaaaaaggaggtctcaatggcgtggatatttattcactagtgaccgagaacattcagtggccaaacggcattactctagacttgttgagcggtcgactctactgggtggacagcaagctgcattctatctcaagcatcgacgtgaacggagggaatagaaagaccatccttgaagacgaaaaaagattggcacacccttttagcctcgcggtgttcgaggacaaggtgttttggactgacatcatcaacgaagccatttttagtgcaaaccggctgactgggagcgacgtgaatttgttggccgaaaatctcctatccccggaggacatggtgctgtttcacaacctgacccagccaaggggcgtcaattggtgtgagcggactacccttagcaacggcggatgccagtacctgtgcctgccagccccgcagatcaatccacactctcccaaattcacatgcgcatgtcctgatggtatgttacttgccagagacatgaggagctgcctcacagaagcagaggccgccgtggcgactcaggagacatcaactgtacgcttaaaagtatcatctaccgctgtccgcacacagcacacgaccacgcggcccgtgccggacacctctcggctgcccggggccacaccaggcctgaccacagtcgaaatcgtgaccatgtcgcatcaggccctcggagacgtcgccggtcgcggcaacgagaagaagcccagttccgtccgtgccctttcgattgtccttcctatcgttctcctcgtgttcctgtgtctaggcgtgttcctactgtggaagaactggcgactcaaaaacatcaattcgatcaactttgataaccccgtataccagaagacaacagaagacgaggttcacatttgtcacaaccaggatggttacagctacccgtcgcggcagatggttagcctcgaggacgacgtcgct

SEQ ID NO: 16180 - DNA, 2580 bp, synthetic construct
  misc_feature 1..2580: note = source = /note="Description of Artificial Sequence: Synthetic coding sequence"
  source 1..2580: mol_type = other DNA
atggggccctggggctggaaattgcgttggactgttgcattgctgctggcagctgcaggaactgccgttggagaccgctgcgaaagaaacgagtttcagtgccaggatggaaaatgtatttcttacaaatgggtctgcgatggttccgctgagtgccaggatggatcagatgagagccaggaaacctgtctgagcgttacgtgcaagtctggagactttagttgcggaggccgggtcaaccgatgcatccctcagttttggcgatgtgacgggcaagtagactgtgataatgggagcgatgagcaaggttgcccacctaagacgtgcagccaggacgagtttagatgtcacgatgggaagtgtatatctcggcaatttgtgtgtgacagcgatcgggattgcctggacggaagtgatgaggctagttgtccagtgctgacctgtggccctgccagcttccagtgtaattcttctacatgtatcccgcaactgtgggcctgcgacaatgacccggattgtgaggatgggtcagacgagtggccccagcgatgtcgaggactttacgtgttccaaggcgactctagcccctgtagcgcctttgagtttcactgccttagcggagaatgtatacatagctcctggcgatgcgacggcgggcccgattgtaaagataagagcgacgaggagaactgcgccgtcgcaacttgccgacccgacgagtttcagtgctccgacggtaattgtattcacggctcacgccagtgtgatcgcgaatacgactgtaaagacatgtccgatgaggtgggatgtgttaacgtgaccctctgcgaagggccaaacaagttcaaatgccacagcggtgagtgtattacgctcgacaaggtatgcaacatggcgcgggattgtagagattggtccgatgaaccaataaaagagtgtgggactgctgagtgcctcgataataatggcggatgctctcatgtttgcaatgatctgaagataggctacgaatgcctgtgcccggatggattccagcttgtggcacagcggcggtgcgaggacatagacgagtgtcaggaccccgatacgtgtagccaactctgcgtgaatttggaaggaggctataagtgtcagtgcgaagagggcttccaacttgaccctcataccaaagcctgcaaagcagtggggagtattgcttatctgttctttaccaacaggcatgaggtccggaaaatgaccctggaccggtccgagtatacttcactaattccaaacctgaggaatgtcgtcgcccttgacaccgaagttgcctcaaacagaatctactggagcgatctaagccaaaggatgatctgctctactcagctcgaccgggcgcacggagtttcatcctatgatacagtgattagtcgggatatacaggcccccgacggactggccgtggattggatccactcaaatatttactggaccgattctgtgctgggcacagtgtctgttgcggatactaaaggcgtgaagcggaaaaccctttttcgcgagaatggcagcaagccgagagccatagtcgtggacccagtgcacggcttcatgtactggacggactggggcactccagccaagataaaaaagggagggttgaacggtgtggacatctattctcttgtgaccgaaaatatacagtggccaaatgggatcacccttgacttattatctggcagactgtattgggtcgatagtaagttgcactctatttcgtctattgacgtgaatgggggaaatcgcaaaaccattctcgaagatgaaaaacgccttgcccaccccttttcactggcggtcttcgaggataaggttttttggacggacatcatcaatgaggccatttttagtgctaataggttgaccggaagcgacgttaatctgcttgccgaaaacctcctaagtcccgaggacatggttctgtttcacaatctcacccagccccggggggtgaattggtgtgaaaggaccaccttatccaacggggggtgtcagtacctctgtctccctgctccgcagataaatccccattcccctaagtttacgtgtgcgtgcccggatggcatgttactggctagggatatgcgatcatgcttgaccgaagcagaagccgccgtggcgacacaagaaacttcaacggtccgactgaaggtatcgagtacagccgtgcgtacccaacacaccactacccgcccggttcccgacacttcccgcctccccggcgctacacctggcctgacaactgtggagatcgtcacaatgagccatcaggcgttgggggacgtggcgggcagggggaatgaaaaaaaaccatcgtccgttagagcattatccattgtgctgccaatcgtacttcttgtttttctgtgccttggagtgtttcttttgtggaaaaactggcgcttgaaaaatattaattctattaacttcgataatcccgtctaccagaagacaacagaagatgaggtgcacatctgccacaatcaggatggatactcttacccaagccggcaaatggtgtccttggaggatgatgtggcc

SEQ ID NO: 16181 - DNA, 2580 bp, synthetic construct
  misc_feature 1..2580: note = source = /note="Description of Artificial Sequence: Synthetic coding sequence"
  source 1..2580: mol_type = other DNA
atgggaccctgggggtggaagctcagatggaccgttgccctgctgctggccgctgcgggaacggcagtgggagacaggtgtgaacgcaatgagttccaatgccaggatggaaaatgcatcagttacaagtgggtctgtgacggttcggcggaatgccaagacggatcggacgagagtcaggaaacctgtctctccgtgacctgcaaatccggtgatttcagctgcggaggaagagtcaataggtgtatcccgcaattctggcgctgtgatgggcaggtcgactgcgacaatggcagcgacgaacaggggtgtccacccaagacgtgctctcaagacgagttcagatgccatgacggcaaatgcattagtcggcagtttgtctgtgattcggatcgcgattgtctggatggatccgatgaggcctcctgtccggtgctgacttgtggaccggcctcatttcaatgcaactcctcaacctgcatcccgcaactgtgggcctgcgacaacgacccagattgcgaggacggcagcgacgagtggccacagagatgcagaggactctatgtgttccagggagactcctcgccgtgctccgccttcgaattccattgcctgagcggcgaatgcatccacagctcatggcgctgcgacggaggaccagactgcaaggacaagagcgatgaagagaattgcgccgttgctacctgtcggcccgacgagttccagtgctcggatggcaattgtatccacggatcgcgtcagtgcgacagggaatacgactgcaaagacatgtccgatgaagtgggatgcgtcaatgtcaccctgtgcgaagggccgaataagttcaagtgccacagcggcgaatgtataactctggataaggtgtgcaacatggctagagactgtcgggattggtccgacgaaccgatcaaggaatgcgggacggcagaatgcctcgacaataacggaggatgttcacacgtgtgtaacgacctcaagatcgggtacgagtgcttgtgcccagatggcttccaattggtcgcccaacgccgctgcgaggacatcgatgagtgtcaggacccggatacgtgctctcagctctgtgtgaatctcgagggcggttacaaatgtcagtgcgaagaaggcttccaacttgatccacataccaaggcgtgcaaagcggtgggatccatcgcgtacctgtttttcacgaaccgccacgaggtgcggaagatgactctggacagatcagaatacacttcactcatcccaaacctgcggaacgtggtggctcttgacaccgaagtggcctcgaaccgtatttactggtccgacctgagccaacggatgatttgctccactcagctcgaccgggcacatggagtctcttcgtacgacactgtcatctcccgcgacatccaggcccctgacggccttgcagtcgattggatacacagcaatatctactggacggatagtgtcttgggaaccgtttccgtggcggacaccaagggcgtcaaacgcaagaccctgttccgcgaaaatggatccaagccgcgagccatcgtggtagatcccgtccatggatttatgtattggactgattggggcactcctgccaaaatcaagaagggtggcctgaatggtgtggacatttactcgctggtgaccgagaacatccagtggccaaacgggatcaccctggatttgctctcaggccggctctactgggtggattccaagctgcacagcatctcgtccatcgacgtgaacggtggcaaccgcaaaactatactcgaagatgaaaagagactggcgcacccgttcagcctggccgtctttgaggacaaggtgttttggactgatatcatcaacgaggcaatcttcagcgctaacaggctgactggttcggacgtgaaccttctcgcggagaacctgctgtcgcctgaggacatggtcttgttccataacctgacccagccacgcggagtcaactggtgcgaacggaccactctgtcaaacggagggtgccagtacctgtgcctgcccgcgccgcagatcaacccgcactcgcccaaattcacttgcgcatgcccggatgggatgctcctcgcacgagacatgagatcctgcctgaccgaggcggaagcagcggtagccacccaagaaactagcaccgttcggcttaaggtgtcgtcaactgccgtgagaactcagcacactactacccgccctgtgccggatacgagccgcctgccgggggccacccctggacttactacggtggagatcgtaaccatgtcccaccaggctctgggagacgtggccggacgaggaaacgaaaagaaaccttcatcagtgagggcactgtcgatcgttctgccgatcgtgttgttggtgttcttgtgcctgggggtttttcttctctggaagaattggcggctcaagaacattaactctatcaactttgacaatccagtctaccaaaaaactaccgaggacgaagtgcatatctgccacaatcaggacggctactcatacccgtcacggcagatggtgtcgctggaggatgacgtggcg

SEQ ID NO: 16182 - DNA, 2580 bp, synthetic construct
  misc_feature 1..2580: note = source = /note="Description of Artificial Sequence: Synthetic coding sequence"
  source 1..2580: mol_type = other DNA
atgggaccttgggggtggaaactacgctggacagtcgccctgttactagccgcagctgggacagctgttggagaccggtgcgaaagaaacgaattccagtgtcaggatgggaagtgcataagctataagtgggtttgcgatgggtctgctgaatgtcaagacggttccgatgaatctcaggaaacttgtctctcagttacctgtaaatccggtgacttttcatgtggaggtcgggtgaacagatgtataccgcagttttggagatgtgatggccaagttgactgtgataacggctccgacgagcagggctgccctcccaagacctgttcacaggacgagtttcgctgccatgacgggaaatgcataagtcgtcagttcgtgtgtgactccgacagggactgtctggatggcagtgatgaggcatcatgcccggttctgacttgtggtcctgcctcctttcagtgtaactcatctacatgtataccccagctgtgggcatgcgataatgatcccgactgtgaggacgggtccgacgagtggccccagagatgccggggcctgtatgtctttcagggtgacagttctccatgttccgctttcgagttccactgcctgtctggcgaatgtatccactctagctggcggtgtgacggcggccctgactgtaaggacaagagcgatgaagagaattgtgccgtggccacttgcaggcccgatgaatttcagtgctctgatggtaactgcattcacggaagcaggcagtgtgaccgggagtatgactgtaaggatatgtccgacgaggtggggtgcgtgaacgtgactttgtgcgagggtccaaataaattcaagtgccactccggagagtgtatcaccctggataaggtctgcaatatggcccgcgactgccgggactggtctgatgagccaattaaggagtgcggcacagctgagtgcctggataataacggcgggtgtagccacgtgtgcaacgacctgaagataggctacgagtgcctttgcccggacggtttccagctggtggcacagcgacggtgcgaagatatagatgagtgccaagatccagatacttgtagccagctgtgcgtcaatctggaaggagggtacaaatgtcagtgcgaagagggcttccagctagacccacacacaaaggcttgcaaggctgttggcagcatagcatatctttttttcactaaccgtcatgaagttcgaaagatgaccctggaccgaagcgagtacacaagtttaatacccaacctgcgaaatgtggtcgccctggacacagaagttgccagtaacagaatatattggagcgacctgtctcagaggatgatttgctccacccagctcgatcgcgctcacggcgtttcctcctatgacaccgtgattagtcgtgacatacaggcccccgatggcctggctgttgattggatacatagtaacatatactggactgacagtgtcctcggcacagtatccgtggctgacaccaaaggtgtgaagagaaagactctattcagagagaatggcagcaaaccaagagccatagtagttgaccccgtccacggttttatgtactggaccgactggggcactccagctaagattaaaaagggtggtctgaacggcgtggatatctactctctggtgacagagaacatccaatggcccaacgggattacactggaccttctctcaggaaggctttactgggtcgattccaagctgcacagtatctctagcatcgatgtgaatgggggaaataggaaaaccatcttagaagacgaaaaacgattggcacacccattctccctggctgtattcgaagacaaggtcttctggaccgatatcatcaatgaggcaatattctctgctaatcggctgaccggatctgatgtgaacctgctggccgaaaacttgctgagccccgaggacatggttctatttcacaatctaactcaacctcggggcgtgaattggtgcgaacgaaccacccttagcaacggcgggtgtcagtacttatgtctgccagccccacagatcaacccccatagtccaaagtttacctgcgcctgtccagacggtatgttattagcccgggatatgcggtcctgtctcacagaagcagaagccgccgtggctactcaggagaccagcactgtgcgcctaaaagtttcatctactgccgtgcgtacacagcataccacaactcgccccgtcccagatacaagccgactgccaggagccaccccagggttgaccaccgttgagatcgtgaccatgtctcaccaggctctgggagacgtggccggaaggggcaacgaaaagaaaccttccagtgtgcgcgccttgagcatagttttacctattgtgctgctggttttcctgtgtctgggcgtgttcttgttgtggaagaattggagactgaaaaacatcaacagtataaactttgacaaccctgtttatcaaaaaacaacagaagacgaggtccacatctgccataatcaggatggctattcctacccttctcgacagatggtctctctggaggacgacgtggca

SEQ ID NO: 16183 - DNA, 2580 bp, synthetic construct
  misc_feature 1..2580: note = source = /note="Description of Artificial Sequence: Synthetic coding sequence"
  source 1..2580: mol_type = other DNA
atgggaccatggggatggaaactgagatggaccgtggcgctgctgctggctgcggctgggaccgccgtgggagatcgatgtgaacgcaacgagtttcaatgtcaggacggcaagtgtatctcctataagtgggtgtgtgatgggagcgcagagtgccaggatggctccgacgaatcccaagaaacctgtctttccgtcacctgcaagagcggagacttcagctgcgggggacgcgtgaaccgatgcatccctcagttttggcgctgcgacggtcaggtcgactgcgataacggttccgacgagcagggttgcccaccaaagacgtgctcacaggacgaatttaggtgtcatgatggcaaatgcatcagccgccaatttgtgtgcgacagcgatcgcgactgcctcgatgggtcggatgaagcctcctgtccagtgctgacttgcggacctgcgagctttcagtgcaactcctccacttgcattccccaactttgggcctgtgacaacgatccggattgcgaagatggctcggacgaatggccacagcgatgccgaggactttacgtctttcagggagactccagcccgtgttccgcgttcgagtttcattgcctctcgggcgaatgcatccattcctcctggcgttgcgatggtggaccggattgcaaggacaagagcgatgaggagaactgcgctgtcgccacttgcagaccggatgaattccagtgctcagacggtaactgcattcatggctcacgccaatgcgatcgcgagtacgactgcaaggacatgagtgatgaggtcggatgtgtcaacgtcaccctgtgcgaaggcccgaacaagttcaagtgccattcgggggaatgcatcaccctcgataaggtgtgcaacatggcacgcgactgccgggattggtcggatgagccaatcaaggagtgcggaacggccgaatgcctggataacaacgggggttgctcccacgtgtgtaacgacctcaagatcggatacgaatgcctgtgccccgatggcttccaactcgtggcccagagacggtgtgaggacatcgacgagtgccaggacccggacacttgctcacaactgtgtgtcaaccttgagggtggatacaagtgccagtgcgaagagggcttccagctcgacccacacactaaagcatgcaaggcagtgggttcgatcgcgtatcttttcttcacgaatagacacgaggtgcggaagatgacccttgaccggtcagaatacactagcttgatcccaaatctcagaaacgtggtggccctcgacaccgaagtggccagcaatcgcatctactggtcggacttgtcacaacggatgatctgttccactcaactggatagagcccacggggtgtcatcgtacgacaccgtgatctccagagatatccaggccccggacggtctggcggtggattggatccattcaaacatctactggactgactccgtgctcggaaccgtcagcgtcgccgatactaaaggagtgaaaaggaaaactctgttccgggaaaacgggagcaaaccacgggcaatcgtggttgatcccgtgcacggcttcatgtactggacggactggggaactccagccaagataaagaaagggggactgaacggagtggacatatactctctggtgaccgagaacatccagtggccgaatggaatcaccctggatctgctgagcggtcgcctgtactgggtggactctaagttgcactcgatctccagcatcgatgttaatggaggaaatcggaaaaccatcctggaagatgaaaagagattggcccatccgttcagcctggcagtgttcgaagataaagtgttctggacggacatcattaatgaggcgattttctcagccaacagactgaccggaagcgatgtcaacctcttggccgagaatctcttgtcgcctgaagatatggtcctgtttcacaatctgacccagccacggggagtgaactggtgcgaaagaactactctgtctaacggaggctgccagtacctgtgccttccggccccgcaaatcaatcctcactccccaaaattcacctgcgcgtgtccagatgggatgctccttgcgcgggatatgcggtcatgtctcactgaggccgaagctgccgtggctactcaagagacttcaactgttcggctgaaagtctcgtccactgcagtgaggactcagcacacgacgacgcgcccggtgcctgatactagccgactccctggagccacccccggactcactactgtggaaatcgtgactatgtcccaccaggcactcggagacgtggccggccgggggaatgagaaaaagccaagcagcgtccgcgccctgtcgattgtgcttcccatcgtcctcctggtctttctctgtctcggagtattcctgctgtggaagaactggagactgaagaacatcaacagcatcaatttcgacaatcctgtctaccaaaagactaccgaggatgaagtgcatatctgccataatcaggatggatatagctacccttcacggcagatggtgtctttggaggatgacgtggca

SEQ ID NO: 16184 - DNA, 2580 bp, synthetic construct
  misc_feature 1..2580: note = source = /note="Description of Artificial Sequence: Synthetic coding sequence"
  source 1..2580: mol_type = other DNA
atggggccgtgggggtggaagttgcggtggaccgtagccctgctgctggcagcagcaggcactgccgtgggcgacagatgcgagcggaatgaatttcagtgccaggatggcaagtgcatcagttacaagtgggtgtgcgatggtagtgccgaatgccaggatgggtcggacgaatctcaggaaacttgcctctctgtgacatgcaaatcaggagatttcagctgcggcggccgtgtcaatcgttgcatccctcaattctggcgttgcgacggacaggtcgattgcgacaacgggtccgacgaacaggggtgccccccaaagacctgctcgcaggatgagtttcgctgccacgacggcaaatgtatctcaagacagttcgtttgcgatagcgatcgggattgtctggacgggtccgacgaggcttcctgtcctgtcctcacgtgcggccccgcgtctttccagtgcaattccagcacatgcatcccacagctctgggcttgcgacaacgatcccgactgcgaggacgggagcgacgaatggccccagaggtgtaggggtttatacgtgttccagggagattctagtccctgcagcgctttcgagtttcactgtttgagcggagaatgtatccatagctcctggaggtgcgatgggggtcccgactgcaaagacaagtccgacgaggagaactgcgcagtcgcgacttgtaggcccgacgaatttcagtgctcagacgggaactgcattcacggaagcaggcagtgcgatcgcgagtatgattgtaaggacatgtctgatgaggtcgggtgtgtaaatgtcaccctgtgcgaaggtccaaataagttcaagtgtcacagtggggaatgcatcacactggataaggtctgcaatatggctagggactgtcgagactggagcgacgaacctattaaagagtgcggaaccgccgaatgtctggacaataatggagggtgttctcacgtgtgcaacgatctaaagataggctacgaatgcctgtgccctgatggattccaactcgttgcccagcggcgctgcgaagatattgacgagtgccaggatccagatacctgttcccagctgtgcgtcaacttagaggggggttacaaatgtcagtgcgaagagggctttcagctcgatcctcataccaaggcctgcaaagcagtgggctcaattgcttacctcttctttacaaaccggcatgaggtgagaaagatgactcttgataggtctgaatacacctccctgattccgaacttgcgaaacgttgtcgcgctggatactgaggtcgccagtaataggatatattggtcagacctgagtcagaggatgatctgtagcactcagctggaccgggcccatggggttagctcatacgataccgttatctccagagatatccaggcgcccgacggattggcggtcgattggatacactccaatatctactggaccgactcagtgctgggtaccgtctctgtggcggatactaagggtgttaagaggaagaccctctttcgagagaatggatctaaaccaagagcaatagttgttgaccctgtgcatggatttatgtattggactgattggggaacgcccgcaaaaatcaaaaaaggaggattgaacggtgtagacatctatagtctagttacggagaacatccagtggcccaatggaattaccctcgacctcctgtcaggacgcctctattgggtggactccaaactgcatagcattagcagtatcgatgtcaacggagggaacagaaagacaatcttggaggatgagaagaggcttgcccatccattttccttagccgtgtttgaggacaaagtcttttggaccgacattatcaacgaggctatatttagcgcgaataggctcactgggtctgatgttaacctgttggcagagaacttgctaagtcccgaagatatggtcctattccacaatttaacccagccaagaggcgtcaactggtgtgagaggactaccctgtcaaacggagggtgtcagtacctgtgcctgcctgctccccagatcaatccccacagccccaagttcacctgtgcatgccctgacgggatgctcctggcgcgcgacatgcgctcctgtctgaccgaagcagaagcggccgtggcaacccaggaaacaagtactgtcaggcttaaagtctccagcaccgccgtgcgcacgcagcacaccaccacaaggcctgttcccgacacctcccggcttcctggggctacccctggtctgaccacagtcgagatagtgactatgtctcaccaggcactgggcgatgtggctggcagaggcaatgagaagaagccttcctcggtacgagccctatctatagtcctgccaatcgtcctgctcgtgttcctgtgccttggtgtgttcctgctgtggaagaactggcgattaaagaatataaacagcattaactttgataacccagtctaccagaaaacaaccgaggatgaggtgcacatttgtcacaaccaggacgggtactcttaccctagtaggcagatggtgtccctggaagatgacgtcgct

SEQ ID NO: 16185 - DNA, 2580 bp, synthetic construct
  misc_feature 1..2580: note = source = /note="Description of Artificial Sequence: Synthetic coding sequence"
  source 1..2580: mol_type = other DNA
atgggaccttggggatggaaattaaggtggactgttgcgttacttttggcggccgcgggaaccgcggtcggcgaccgctgtgagcgaaatgaatttcaatgccaggatggaaagtgcataagctacaaatgggtttgtgatggatcagcagaatgtcaggatggaagcgacgaatcgcaggagacttgtttgtcagtgacttgcaaaagtggagactttagctgcggaggaagagttaatcgctgtattcctcagttctggaggtgtgatggccaggtggactgcgataacgggtctgatgagcaaggatgcccaccgaaaacgtgttcacaggatgaatttagatgtcatgatggaaagtgcatctctcgccaatttgtctgtgactcggaccgcgattgcctggacggctccgatgaggcaagctgcccggtcctcacgtgtgggcctgcctccttccaatgcaattcatcgacctgcatacctcagttgtgggcctgcgataatgatccagattgtgaggacgggtctgacgagtggcctcagcgttgccgagggctttatgtgttccagggggattcatcaccgtgttcagcgtttgaatttcattgcttatcgggagagtgtatccattcatcatggcgctgcgatggcggaccggattgtaaagataaatcagatgaggagaactgcgcagtcgctacttgcagaccggacgagtttcagtgcagcgacggcaattgtatccacggctcccggcagtgcgacagagaatacgattgtaaagatatgagcgatgaggttggatgcgtcaacgtcacattatgtgagggtcccaacaaatttaaatgccacagtggggagtgcattacacttgataaggtctgcaacatggcgagagactgtcgcgattggagcgatgaaccaattaaagaatgtggtacggcggagtgcctcgacaataatggaggttgttctcatgtatgcaacgatttgaaaatcggttatgaatgtttatgtccggatggctttcaactggtggctcaaagaagatgtgaggatatcgatgaatgccaggatccggatacctgctcgcaattatgtgtcaaccttgaaggggggtataaatgccagtgtgaggagggatttcagcttgatcctcacacgaaggcttgcaaagcagtcggatcaatcgcttaccttttctttacgaatcgccacgaagtacggaaaatgaccttagatcgttctgaatatacgtctcttattccgaatctaagaaatgtggtcgcgctcgatactgaggttgctagtaaccggatatactggtcagatctgtcacagcggatgatctgcagcactcagcttgaccgggcccatggggtttctagctacgatacagtcatcagccgcgatattcaagctccggatggcctcgctgtagattggatccactcgaatatttattggacagattcggtcctgggaacagtctcggtagcagatacaaaaggtgtgaaacgcaagactttgtttcgtgaaaacggctcaaagccacgcgccatcgtggtagatccggtacacggcttcatgtattggacagattggggaacaccggcaaagattaaaaagggtggattgaacggggtggatatttattcccttgtcacggaaaacattcaatggcctaatggaatcacactcgatttacttagtggtcggctttactgggtggattcaaagttgcacagcattagctcaattgacgttaatggcgggaatcggaaaacaatcctagaagacgaaaaaagacttgcgcacccgttttctcttgcggtgtttgaggataaggtattctggacagatatcatcaatgaagctattttctctgccaatcgcttgacgggatccgacgtaaacttgctagcggaaaatttactttctccagaggatatggtactgttccataatctaacacaaccgagaggtgtcaactggtgtgagcggacaacactctcaaatgggggctgccagtatctgtgtttgccggccccgcagataaatcctcatagtccgaagttcacgtgcgcctgtccggatggcatgctcctcgccagagatatgcggagctgtttgacagaggcggaagctgcggttgcgacccaagaaacgagcacggtcagacttaaggtctcttcaacggccgttcggacacagcataccacaacccgcccggttccggatacaagtcgtttgcctggagctacgccggggttaacaactgtcgaaattgttactatgtcccatcaggcattgggcgatgtcgcagggcgagggaatgaaaaaaaaccgtcatctgtccgtgctttaagcattgtgctcccgatagtgttgctggtctttctttgcctcggcgtttttctactctggaagaattggcggcttaaaaacattaactctatcaactttgacaatcctgtgtatcagaagacaacggaagacgaagttcatatatgccataatcaagacggttattcctatccgagcagacaaatggtttctctagaagacgacgttgcc

SEQ ID NO: 16186 - DNA, 2580 bp, synthetic construct
  misc_feature 1..2580: note = source = /note="Description of Artificial Sequence: Synthetic coding sequence"
  source 1..2580: mol_type = other DNA
atggggccctgggggtggaagctccgctggaccgtcgccctgctgctggcggcagccggcaccgctgtgggagatcgctgtgagcgcaatgagttccagtgtcaagatgggaagtgcatttcgtacaaatgggtttgtgacggtagcgcagaatgtcaggacggatccgatgaatcccaggagacatgcttgagcgtgacctgcaagtctggggatttctcttgtggggggcgagttaaccgatgcattcctcagttctggcggtgtgatgggcaggttgactgtgataatggaagtgatgaacagggttgcccacctaagacctgtagccaggacgagttcaggtgccacgacggtaaatgcatatccagacagttcgtctgcgattcagatagggactgtctcgatggtagtgatgaagcctcttgtcccgtgctgacttgcggccccgcatctttccagtgtaacagctcgacttgcatcccacagctgtgggcctgcgataatgatcctgattgtgaagacggcagcgatgaatggccccagcggtgtagggggctctacgtgttccagggcgacagctctccctgcagtgcgtttgagtttcattgtttgagcggggagtgcatccatagtagttggcgctgcgatggaggccccgactgtaaggataagtccgatgaagaaaattgtgcagtcgcaacttgcaggccagatgagtttcaatgctccgacggcaattgtatccacggaagtaggcaatgtgacagggagtatgactgtaaggacatgtcagatgaggtaggttgcgtgaacgttaccctttgtgaaggcccgaacaagtttaagtgtcacagtggcgaatgcataaccctggacaaggtgtgtaatatggcccgtgattgccgcgactggagtgacgaacccattaaagaatgcggcacagcagaatgtttagacaataatgggggatgctctcacgtatgcaacgacctgaaaatcggttatgaatgtctctgtcccgacgggtttcaactggtagctcagcggaggtgcgaggatattgacgagtgccaggaccccgacacatgctcccagttgtgcgtcaatttggaaggaggctataaatgtcagtgcgaggagggatttcagttggacccacacacaaaagcctgcaaggcggtaggcagtattgcatatctgttcttcaccaacagacatgaggttcgaaagatgactttagatcgatccgagtacaccagcctcatccccaacctccggaacgtagttgcactggataccgaggtggcgagtaaccgaatatactggtccgacctgagccagcggatgatatgtagtacccagttagatagggcccacggggtcagttcatatgacactgtaatcagtcgggacatacaggcccccgacgggctggcagtcgactggatacactctaatatctactggaccgattcggtcctgggaacagtatccgtggccgacactaaaggagttaaacgcaagacgctcttcagggagaacggtagcaaaccccgagctattgtggtggaccccgttcacgggttcatgtactggacagattggggaacccccgctaagattaagaaggggggcttgaatggggtcgatatatacagcctggtgactgagaacatccagtggcccaacggtatcactctcgacctgctgagtggccggctctattgggtggattccaaacttcactctattagctcgatcgacgttaatggaggaaatagaaaaaccattctagaggacgaaaagcgtctggcccacccttttagcctggccgtctttgaggataaggtcttctggacagatatcataaacgaagccattttctccgcaaatcgactgacgggaagcgacgtcaatctgttagccgagaatctcctctcccccgaagacatggtcttatttcacaatctgacccagccaaggggggtaaattggtgcgagaggaccaccctgtctaatggaggttgtcaatacctgtgcctgccagctcctcagataaacccacatagtcctaagtttacctgtgcgtgccctgacgggatgctgctggctagagatatgaggtcctgcctgaccgaggcagaggcagccgtggccacacaggagacctcaacggtgcgcctgaaggtctcttccacagctgtgcggactcagcacaccacaactcgcccggttcccgatacttcaaggttgcccggggcgaccccaggtctcaccaccgtggaaattgtcaccatgagccaccaggccctgggggatgtcgccggtcgaggtaacgaaaagaagccttcatctgttcgggctctctcaatagtcttgcccatagtgcttctcgtcttcctctgcttaggcgtattcctcctgtggaagaactggcgactgaaaaacattaacagcattaactttgacaatcccgtctatcagaagacaactgaagatgaggtgcacatctgtcacaatcaagacggttacagctatccttcgcggcaaatggtttcactagaagatgatgtggca

SEQ ID NO: 16187 - DNA, 2580 bp, synthetic construct
  misc_feature 1..2580: note = source = /note="Description of Artificial Sequence: Synthetic coding sequence"
  source 1..2580: mol_type = other DNA
atgggaccgtggggctggaaacttagatggaccgtggcattgctcctcgcggccgccggcactgccgtgggagacagatgcgagcggaacgaattccagtgccaagacggcaaatgcatcagctataagtgggtgtgcgacggctcggccgaatgtcaggacggtagcgacgaatcgcaagaaacgtgcctgtcggtgacctgtaagtcaggcgacttctcatgcggcggacgggtgaatcgctgtattccccaattctggagatgcgacggacaggtcgattgtgacaacggatcagacgagcagggatgcccgccgaaaacgtgttcacaagacgaattccggtgccacgacgggaagtgtatctcacgccagtttgtctgcgattccgatcgggattgcctcgacggcagcgacgaggcttcgtgcccggtcctcacttgcggcccggcttcgttccagtgcaactccagcacctgcattccgcagctgtgggcctgcgacaacgatccagattgcgaggatggctctgacgagtggccacagagatgtcgtggactctacgtgttccagggggacagctcaccttgctcggcgtttgaattccattgcctctccggagaatgcatccacagttcctggcgctgtgacggcggcccagactgcaaagacaagtccgatgaagaaaactgtgccgtcgcgacctgccgacctgacgagttccaatgctcggacggtaactgtatccacggcagccggcagtgcgacagagagtacgattgcaaggacatgagcgatgaggtcggctgcgtaaacgtgactctttgcgaagggccgaataagttcaaatgccactccggggaatgcattactctcgacaaggtgtgtaatatggcccgcgattgccgggactggtcggatgagcctatcaaggaatgtggtaccgcggaatgcctggacaataatggaggttgtagtcatgtgtgcaacgacctgaagatcggatacgagtgtctctgtcccgacggatttcagctcgtggcgcaaagaagatgcgaagatatcgacgagtgccaagacccggacacctgctcccaactctgtgtgaacctcgaggggggatacaagtgccagtgcgaagaagggtttcagctggatccccacaccaaagcctgcaaggcggtgggctccatcgcgtacttgttcttcaccaatcgacacgaggtgaggaaaatgaccctggacaggagcgaatacacttcgctgattccgaacctgcgtaatgtggtcgccctcgatacggaggtcgcatcaaatcgcatttactggtccgatttgtcacagcggatgatctgttctacccaactcgaccgcgcccatggagtctcctcatacgacaccgttataagccgggacatccaggcaccagatggacttgctgttgattggatccactctaacatctactggaccgattcggtgctgggaactgtcagcgtggcggataccaagggcgtcaagagaaagacgctgttccgcgaaaatggatctaagccacgggccattgtggtggatccggtccatggattcatgtactggaccgactggggaacccccgccaagatcaagaagggagggctgaacggggtggatatctacagtctcgtgaccgagaacatccaatggccaaacggaatcaccctcgatctgctgtccggacgcctgtactgggtggactctaagctgcactctatctcatccatcgacgtgaatgggggtaatcgcaaaaccatcctcgaagatgagaaaagactggcgcacccgttctccttggccgtctttgaggacaaggtcttttggacggacatcataaacgaagcgatcttctctgcaaaccgcctgactggatcggatgtcaacctcctggccgagaatttgctgtccccagaagatatggtgctgttccataacctgacccagccgcgtggggtaaactggtgcgaacgcaccaccctgtccaacggcggatgccagtatctgtgcctgccagctccgcaaatcaacccacattcacccaaattcacgtgcgcttgccctgacggcatgctcttggcacgggacatgcgctcatgtctgactgaggctgaggcggccgtcgcgacgcaagaaactagcactgtgcgcttgaaggtgtcatcaaccgccgttcggactcagcatactaccactagacctgtgcctgatacttcgagactgccgggagccactccaggtttgactactgtggaaatcgtcaccatgtcgcatcaggctctgggtgatgtggccgggaggggaaacgaaaagaagccctcctcagtccgggcactctcaattgtgcttcctatagtgctgctggtctttctgtgccttggagtgttcctgctctggaagaattggcgattgaagaacatcaattccatcaatttcgacaatccagtgtaccagaaaactaccgaggatgaggtgcacatctgtcacaaccaggacgggtactcatacccgtcccggcagatggtgagcctggaagatgatgtggct

SEQ ID NO: 16188 - DNA, 2580 bp, synthetic construct
  misc_feature 1..2580: note = source = /note="Description of Artificial Sequence: Synthetic coding sequence"
  source 1..2580: mol_type = other DNA
atggggccgtggggctggaaactgcggtggaccgtcgctctcttgcttgctgccgccggaaccgcggtcggcgacagatgcgaacggaacgagttccagtgccaagatggaaagtgcatctcttacaaatgggtctgtgatgggtcggccgaatgccaagacggatccgacgaaagccaagaaacctgtctgtcagtcacatgcaagtcaggtgatttttcttgtggcgggagggtgaatcgctgtatcccccagttctggcgatgcgatggacaggtggattgtgacaatggtagtgatgagcaggggtgcccgccgaagacgtgttcacaggacgagttccggtgtcatgatggcaagtgcatatcccggcagttcgtctgtgatagtgatcgagattgtctggacggttctgatgaggcaagttgccctgtcttgacttgcggacctgcgagttttcagtgtaactcgagcacgtgcattcctcaactttgggcatgcgacaacgatccggactgcgaggatggcagcgatgagtggccccagcggtgtcggggactctatgtgttccagggcgatagttcaccttgctccgcattcgagtttcactgtctgtcgggcgagtgcatccatagcagctggaggtgcgatggcgggcccgactgcaaggacaagtccgacgaagagaattgtgccgtggccacgtgtaggcccgacgagtttcagtgctctgatggaaattgcatccacggctccagacagtgcgatcgagagtatgattgtaaggatatgagtgacgaagtgggatgtgtgaacgtcacactttgtgaggggcctaataagttcaaatgccacagtggggagtgcatcactctggacaaggtatgcaatatggctagggactgtagggattggagtgacgagcccattaaggaatgtggcactgctgagtgcttagacaacaacggaggatgcagccatgtctgtaacgacttgaagatcgggtatgagtgcctctgtcctgatggattccaactggtggctcagcgcaggtgcgaggatatcgatgagtgtcaggaccccgacacctgttcacagctctgcgtgaatctcgagggaggctacaagtgccagtgtgaggagggcttccagttggacccacataccaaggcatgcaaagccgttggctctatcgcttacctcttctttaccaacaggcacgaggtccgaaagatgacattggatcgttccgaatacacctctttgattccgaaccttaggaatgtggtggccctggacaccgaggtcgctagcaacagaatctactggagcgatctctctcagaggatgatttgttccacccagttggaccgcgcacacggtgtatcaagctatgacaccgtgatcagccgcgacatccaagcacccgatggactagcagtggattggatccactcgaacatctactggactgactcggtgctagggacagtatctgtggcagatacaaagggtgtgaagagaaagactctgtttcgggagaatggcagcaagccgagagcaatcgtggtagatccagtacatgggttcatgtactggaccgactggggcactccagccaagatcaaaaagggcggactgaacggggtggacatttattccctggtgacggagaacattcagtggcccaacggaatcaccctggacttgctatccggtagactgtactgggttgacagcaaactgcatagcatctcatccatcgacgtcaacggcggaaataggaagacaatcctggaagatgagaaaagactcgctcatccgtttagcctagctgtttttgaggacaaagtgttctggaccgatattattaacgaagctattttctcagctaaccggctgaccgggtccgatgtgaatctgctagccgagaatctgttgagccccgaggacatggtcctgttccacaacctgactcaaccccgtggcgtgaattggtgcgaaaggacgacactgagcaatggtggatgccagtacctctgcctgccggcccctcagatcaacccccatagcccaaagttcacgtgtgcctgtccagatggaatgctgctggccagggacatgcgttcgtgcctcaccgaagcagaagccgcagtagctacccaggaaacctctaccgtgaggttaaaagtgtcctctaccgcagttcgcacccagcacacaaccacgcggccggtgcccgatacttctcgactcccaggggctactcccggcctgactactgtggagattgtcaccatgtcgcaccaggctttaggggacgtcgcagggagagggaatgagaaaaaaccttcctcagtgcgagccctctccatcgttctgccgattgtcctgctggtctttctgtgtctcggagtgttcctgctgtggaaaaattggcggctcaagaacatcaactccattaacttcgacaacccagtctatcagaaaaccaccgaggacgaggttcacatctgccataatcaagacgggtactcatatccaagccgccagatggtgtctctggaagacgacgtagct

SEQ ID NO: 16189 - DNA, 2580 bp, synthetic construct
  misc_feature 1..2580: note = source = /note="Description of Artificial Sequence: Synthetic coding sequence"
  source 1..2580: mol_type = other DNA
atgggcccatgggggtggaagttgcgatggaccgtggcactcttgctggccgcagccggtactgcggtcggagacaggtgcgagcgtaatgaattccaatgtcaagatggaaagtgcatttcttacaaatgggtgtgcgatggatcagcggagtgccaggacggttcagatgaatcacaggaaacttgcctgtcggtcacttgcaaatccggggactttagctgcggaggacgcgtcaatagatgtatcccacaattctggcgctgtgacggacaagtggattgcgataacggctccgacgagcaggggtgcccgcctaagacctgctcccaagatgagttcaggtgccatgatggaaaatgcatttcccggcagttcgtatgcgattcagacagagactgcttggatggatccgacgaggcctcctgccctgtactcacttgtggtccagcgtcctttcagtgtaatagcagcacctgcatcccgcagctgtgggcctgcgataatgatcccgactgtgaagatgggagcgacgagtggccccaacgctgcagaggactgtacgtgtttcagggtgatagctccccgtgctctgccttcgaattccactgcctctccggtgagtgtattcattcaagctggaggtgcgacggcggcccggactgcaaggacaagtccgacgaagagaattgcgcggtcgcaacttgcagaccggacgaatttcagtgttcggacggaaattgcatccacgggagccggcagtgcgaccgggaatacgattgtaaggacatgtccgatgaggtcggatgcgtgaacgtgacgctgtgcgaaggaccaaataagttcaagtgccactcgggagaatgcatcactcttgataaggtgtgcaacatggcccgcgattgtagagattggagcgacgaaccaatcaaagaatgtggtacggcggaatgcctcgacaacaacggaggttgctcgcacgtctgtaacgacctcaagatcggatatgagtgtctgtgcccggatggctttcagctcgtggctcaacgccggtgcgaagatattgatgaatgtcaagacccggacacctgctcacagctgtgtgtcaatctcgagggaggctacaaatgccaatgcgaagagggattccaactcgatccgcacactaaggcctgcaaagccgtgggttcaatagcctacctgttcttcacgaaccgacatgaagtgcggaaaatgaccctggatcggtccgaatatacctcgctgatccctaacctccggaacgttgtggccctcgataccgaggttgcctcgaaccggatctactggtccgacctgagccaacggatgatctgctcgactcaattggacagagcccatggagtgtccagctatgacacggtgatctccagggacatccaagcccctgacggactggctgtcgactggatccattcgaacatctactggactgattccgtcctcggaactgtgtccgtggcggacaccaaaggagtgaagaggaaaactctgtttcgcgagaacgggtcaaaacccagagccatcgtggtggatcccgtgcacggtttcatgtactggactgactggggaacgccggccaagattaagaagggcgggctcaacggagtggacatctacagcctcgtgaccgagaacatccagtggccgaatggaatcacgttggacctgctcagcggacggttgtactgggtggattcaaagttgcactctattagctcaatcgatgttaacggcggaaatcgcaagaccatcctggaagatgagaaacggctcgcccaccctttctcgctcgcagtgttcgaggacaaggtgttctggaccgacatcatcaatgaagctattttctcagctaaccggttgaccggcagcgacgtcaacctgctggcagaaaacctgctgtcgccggaggacatggtgctgttccataacctgacccaacctcggggagtcaactggtgtgaacgcacgaccctttccaatggaggatgtcagtacctgtgcctccctgcaccacagatcaacccacactcgcctaagttcacgtgcgcgtgtcccgacggcatgctgctggcgcgtgatatgaggtcctgtctgaccgaagccgaggccgcagtggctactcaggagacgtcaaccgtcaggctcaaggtatcctcaaccgctgtgcgcacccaacacaccactacccgcccagtgccggacacctcacggctgcccggtgcgactccggggttgaccaccgtcgaaatcgtgacgatgagccaccaagccctgggagacgtcgccggacgcggcaatgaaaagaagccatcatcagtcagagcactgtctatcgttctgccgatagtgctcctggtgtttctctgcttgggagtctttctgctttggaaaaactggaggctgaagaacatcaatagcatcaacttcgacaatccagtttaccagaaaaccaccgaggatgaagtgcacatttgccacaatcaggatggctactcctacccttcgaggcagatggtgtcgcttgaagatgacgtggcg

SEQ ID NO: 16190 - DNA, 2580 bp, synthetic construct
  misc_feature 1..2580: note = source = /note="Description of Artificial Sequence: Synthetic coding sequence"
  source 1..2580: mol_type = other DNA
atgggcccctggggttggaaattgcgctggacggtggcactgctccttgccgcagcaggcaccgccgtgggagatcggtgcgaacggaacgagtttcaatgtcaggacggcaagtgtatttcgtacaagtgggtgtgtgacggcagtgccgagtgccaagatggatcggatgagtcccaagaaacttgcttgtcggtgacttgcaagagcggagatttttcttgtggcggcagggtcaacaggtgcatccctcagttttggcgatgtgacggacaggtggactgcgataacggtagcgacgagcaaggatgtccgcctaagacttgctcgcaggatgaattccgttgccacgatggaaagtgcatttcccggcagttcgtgtgtgattctgacagggattgtttggatgggagcgatgaagcatcgtgtcccgtgctcacgtgtggtccagcatctttccaatgcaattcatcaacgtgtatcccccaactttgggcatgtgacaatgaccctgattgtgaggacggtagcgatgagtggccacaaaggtgtcgcggtctgtacgtctttcagggagactccagcccatgttccgcctttgagttccattgcctgtcgggtgaatgtatccactcctcctggcggtgtgatggagggcctgattgtaaagacaaaagcgacgaagagaactgtgccgtcgcgacctgtcgacctgatgaatttcaatgttcggatggtaactgtatacatggtagccgacagtgcgatagagaatacgattgtaaggatatgtcagatgaagtgggctgtgtgaacgtcaccctgtgcgaagggccaaataagttcaagtgtcattcgggagagtgtattacccttgataaggtgtgcaacatggcccgtgactgcagagattggtcagatgagcccatcaaggaatgtggaacggcagagtgtctggacaacaacgggggatgttctcacgtgtgtaatgacctcaagattggatacgaatgcctttgtccggacggattccagctcgtggcccaacggagatgtgaggatatcgatgaatgccaggacccggatacctgtagtcaactgtgcgtgaaccttgagggcggatacaaatgtcaatgtgaggaggggtttcagctcgatccccacacgaaggcatgtaaggcagtcggctcaatcgcatacctgtttttcactaaccggcatgaggtccggaaaatgactctggaccgctcagaatacacttcactgatcccaaacctcagaaacgtggtcgcacttgataccgaagtggcatcaaacagaatctattggtccgacctgagccagcggatgatttgctcaacccaacttgacagagcacatggagtgtcatcatacgacactgtcatctcccgcgatatccaggcacccgatggcctggccgtggactggatccactccaacatttactggactgactccgtcctgggaaccgtgtcggtggcagatactaaaggagtgaagcgtaagaccctgtttcgagagaatggatctaagcctagagcaatcgtcgtggatcctgtccacgggtttatgtactggacggattggggaaccccagcaaagatcaaaaaaggagggcttaacggcgtggatatctactcccttgtcactgaaaacatacaatggcccaacggtatcactctcgatcttctgagcggccgtctgtactgggttgattccaaacttcatagcatttcgtcaatcgatgtgaatggaggcaaccgaaagactattctggaagatgaaaagcgtcttgcacatccttttagcctcgcggtattcgaggacaaggtcttttggacggatatcattaacgaggcaatcttttcggctaacaggctgactggatcagatgtcaatcttcttgcagaaaaccttctgtcgcctgaagatatggtccttttccataacctgacccagccaaggggagtgaattggtgtgagaggactaccttgagcaatggaggatgtcaatacctctgtctgccagcgccacagataaatccacattccccaaaattcacttgcgcgtgccctgacggaatgcttctggcgcgcgacatgaggtcgtgtcttacggaagcggaagcagcagtggcaacccaggaaacctccaccgtgcgactcaaggtgtcaagcaccgcagtccggacccagcatactaccaccaggcctgtgccagacacttcaagattgccaggggccactcctggcctcactaccgtcgaaattgtcaccatgtcccatcaggcgctgggtgatgtcgcaggtaggggaaacgagaagaaaccctcgtcggtccgtgcactctcgatcgtgcttcctatcgtgctgcttgtctttctctgcctcggagtgtttcttctgtggaagaattggcggctgaagaacatcaacagcattaactttgataaccctgtgtaccaaaagactaccgaggatgaagttcatatttgtcataaccaggacggttactcctacccgtcgcgtcagatggtgagcctcgaagatgatgtggcg

SEQ ID NO: 16191 - DNA, 2580 bp, synthetic construct
  misc_feature 1..2580: note = source = /note="Description of Artificial Sequence: Synthetic coding sequence"
  source 1..2580: mol_type = other DNA
atgggcccctggggttggaaacttcggtggaccgtcgccctcctgcttgcggcagcggggactgcagtgggagatcgatgcgagcgcaatgagttccagtgtcaagatggcaagtgcatttcgtacaagtgggtgtgtgacggttcagcagagtgccaggatggtagcgatgaatcccaggaaacttgtctttcggtaacctgtaagtcgggagatttctcatgtggtggaagagttaatagatgcattcctcagttttggcgatgtgatgggcaggtggactgtgacaacgggtcggacgagcaaggatgtccgcccaaaacttgttcacaggacgaatttcggtgccatgatggaaaatgtataagccgccaattcgtgtgtgattccgatcgtgattgtctcgatggcagcgatgaagcctcctgtcccgtgctgacctgtggcccagcctccttccagtgcaactccagcacctgtattccacagttgtgggcttgtgacaatgatccagattgcgaggacggttcagatgaatggccgcaacggtgccgcggtctttacgtgtttcagggtgattcatccccctgttctgcgtttgaatttcattgcctttcgggagagtgtattcactcgtcgtggagatgcgacggagggcctgactgtaaggataagtctgatgaagaaaactgtgcggtcgctacctgcagacctgatgaatttcaatgcagcgatggaaattgcatccatggttcgcgccagtgcgacagagaatatgactgcaaggatatgtcggatgaagtgggatgtgtgaatgtcaccctgtgcgaaggtccaaataagtttaagtgtcactcaggagaatgcatcactctggacaaggtatgtaacatggcgagggattgccgcgactggtcggatgagccaattaaggaatgtggcaccgcagaatgtctggacaacaacgggggttgttcgcacgtgtgcaatgacttgaagattggatacgaatgtctctgccctgatggcttccaactggtggcccaacgtcgttgtgaagatatcgacgaatgtcaggaccctgacacttgctcgcagctctgtgttaaccttgagggaggatacaaatgtcagtgtgaagagggcttccagctggatcctcataccaaagcatgtaaagctgttggttccatcgcctacttgttcttcaccaacagacacgaggtccgtaagatgactcttgatcgaagcgaatacacttccctgatcccaaaccttcgcaacgtggtcgccctggacaccgaggtcgcatcaaataggatttactggtcagatctctcgcaacgtatgatctgttccactcaactggatcgcgcacatggagtgagctcgtacgatactgtgatttcacgtgacatccaagcgccagatgggctggcagtggattggatccattcgaacatttactggacggattcagtgcttgggactgtgtctgtcgcagacaccaaaggagtgaagagaaaaaccttgtttcgcgaaaacggtagcaaaccgagagccattgtggtggaccccgtgcacggatttatgtactggaccgactggggtacccccgcaaagatcaagaagggaggactcaacggagtggatatctattcactggtgactgagaacatacagtggcctaatggtattaccctggatctgctgtcaggtagactctattgggtggactccaagctccactcgatatcctcgatcgacgttaacggtggaaaccgcaagacgattctggaagatgaaaagagacttgcccatccattttcgcttgccgtgtttgaggacaaggtcttttggactgatatcattaacgaggcaatattctcagcaaatagactcactggatcggatgttaacctgctggcggaaaacctgttgtccccagaggacatggtgctgtttcataacctgactcagccgcgaggagtgaattggtgtgagagaaccaccctgagcaacggaggttgtcagtatctttgtctgccagcccctcagatcaacccacattccccaaagttcacctgcgcatgccctgacggcatgcttcttgctcgcgacatgaggtcatgtcttaccgaagccgaggcagcagtggcaactcaggaaacttccacggtcagacttaaggtgtcgagcacggcagtgagaacccaacacaccacgaccaggcctgtgcctgacacctcgaggttgccaggcgcaacccccgggctgaccactgtggagattgtgaccatgagccaccaggcgctgggggatgtggcaggtagagggaatgaaaagaaaccgagcagcgtacgcgcattgtcgatagtcctgcctattgtgctcctggtctttctgtgcctcggcgtgttcctgctctggaagaattggagactcaaaaacataaactctatcaattttgataatcccgtgtaccagaaaaccaccgaggacgaagtccacatttgtcataaccaagatgggtactcatacccatcgcgccaaatggtgtcgcttgaagatgacgtggcg

SEQ ID NO: 16192 - DNA, 2580 bp, synthetic construct
  misc_feature 1..2580: note = source = /note="Description of Artificial Sequence: Synthetic coding sequence"
  source 1..2580: mol_type = other DNA
atgggaccctggggctggaaacttagatggacggtggcccttttgcttgcagccgcggggacggcagtgggggatcggtgcgaacgaaacgaatttcagtgtcaagatgggaagtgcatttcgtacaagtgggtgtgcgatggttcggcagaatgtcaagacgggtcggatgaaagccaagaaacctgtctcagcgtgacttgtaagagcggcgatttcagctgtgggggaagagtcaatagatgcattccccagttctggcggtgtgatggtcaagtggattgtgataacggctccgacgagcagggttgcccacctaagacttgttcccaagatgagtttcgatgccatgacggtaaatgtatatcgaggcagtttgtgtgtgattcggatcgtgactgcctggatggatcagacgaagcatcatgtcctgtcctcacttgcggtcctgcatcatttcaatgcaacagcagcacctgtatcccacaactgtgggcatgcgataatgatcctgattgcgaggatggctccgatgaatggccacaacgttgccggggactttatgtgtttcagggagattcaagcccatgcagcgcctttgagtttcactgcctgtcaggagaatgtatccattcctcatggaggtgcgacggaggtcctgactgtaaggacaaatcggatgaagagaactgtgccgtcgcaacctgtcgtcctgatgagtttcagtgttccgatgggaattgtattcatggcagcagacaatgtgatcgggaatacgactgtaaggatatgtccgatgaggtcggttgcgtgaatgttaccctctgtgaggggcctaataagttcaagtgtcattcgggagaatgtattaccctggataaggtctgtaacatggcaagagattgccgcgattggtccgacgaacctatcaaggaatgtggcaccgcagagtgtctcgacaataatggcgggtgtagccacgtgtgcaatgatctcaaaattggctacgagtgcttgtgccctgatggatttcaacttgtggcgcagcgcagatgcgaggatatcgatgaatgccaggatcctgatacgtgctcacagctgtgtgtcaacctcgagggtggttacaagtgccagtgcgaggagggttttcaactggacccacatactaaggcatgtaaggcagtgggttctatcgcgtaccttttcttcaccaatagacatgaagtcagaaaaatgacccttgatcgatcagaatacaccagccttatccccaacctgcgtaatgtggtggcgttggacaccgaagtcgcgtcgaatcgaatttactggtccgaccttagccagcgcatgatttgttccactcagctcgatcgggctcatggcgtctcgtcatacgataccgtgatttcacgtgatattcaagcacctgatgggctcgcggtggactggatacactcaaacatttactggaccgactcggtcttgggcactgtgagcgtggccgacaccaaaggtgtcaaacgcaagactctgtttcgagaaaacggatcaaagccaagagcaattgtggtcgatccagtgcatggcttcatgtactggacggattggggtactccggccaagattaagaagggtggattgaatggagtggacatatactcgctcgttactgagaacatacagtggcctaacggtatcaccctcgaccttcttagcggacggctgtattgggtggatagcaaactgcactcgatctcatcgatcgacgtcaacggaggaaacagaaagactattcttgaggacgaaaaacgactcgctcatccgttttcacttgccgtgttcgaggataaggtgttttggacggacatcatcaatgaggccatcttttctgccaatcgcctcaccggatccgacgtgaaccttctggcagaaaatctgctctctccagaggacatggtcctctttcacaacctgacccaaccacgcggcgtgaactggtgtgaacggactactctctcgaacggtggatgtcaatacctgtgtctgcctgcgccacagattaaccctcattcgccgaagttcacttgtgcatgccctgatggtatgttgcttgcacgggatatgcgatcctgcctcaccgaagcagaagcagcagtggcaactcaagagacttcgaccgtgcgactcaaggtgtccagcactgctgttcggactcaacacaccaccaccagaccagtgccggatacgtcgcggttgccaggagcgactcccggactcactactgtggaaattgtcacgatgagccaccaggcactcggagatgtggcagggcgcgggaacgagaagaaaccaagctcagtgagggcactgtcaatagtgcttccaattgtgctgcttgtttttctctgtctgggcgtgttcctgctgtggaagaactggagattgaagaacattaactcgatcaatttcgataaccccgtgtaccaaaagaccacggaggatgaagtgcatatttgtcacaaccaagacgggtactcctacccttcccggcagatggtgagccttgaagatgacgtggca

SEQ ID NO: 16193 - DNA, 2580 bp, synthetic construct
  misc_feature 1..2580: note = source = /note="Description of Artificial Sequence: Synthetic coding sequence"
  source 1..2580: mol_type = other DNA
atgggaccttggggctggaagctccggtggaccgtggcactgttgttggccgctgccggtacggcagttggcgataggtgcgaaagaaacgaatttcagtgccaggatggtaaatgtatcagttacaagtgggtgtgtgatggcagcgcagagtgccaagacggaagcgatgagtctcaggaaacctgtctgtcagtcacgtgtaaatcgggcgatttttcatgcgggggccgagtgaacaggtgtataccccaattttggaggtgcgacggccaagtggactgcgacaacggatcggacgaacaggggtgcccccccaaaacttgttcccaagatgagtttaggtgccatgatggcaaatgcatctctaggcaatttgtgtgtgactcagatcgggattgccttgacggcagcgatgaagctagctgtcccgtacttacttgcgggcctgcatcttttcagtgcaactcctccacttgcattccacagctgtgggcttgtgataatgacccggattgtgaggacggaagtgacgagtggccacagagatgtagaggcttgtatgttttccagggagacagtagcccgtgtagcgcttttgaattccactgcctctccggagaatgtatccatagttcctggaggtgcgatggtggtcctgattgcaaagataaaagcgacgaagagaactgcgctgtcgctacttgccggcctgatgaatttcagtgtagcgatgggaattgcatccatggcagcagacagtgcgacagagagtatgattgtaaagatatgagcgatgaggttggttgcgtgaatgtcacactctgcgaaggccccaataagttcaaatgccactccggcgagtgcattactttggataaggtttgcaacatggctcgcgattgccgggattggtccgacgaaccaatcaaagaatgtggcactgctgagtgcctggataacaacggagggtgcagccacgtctgcaacgatctgaaaattgggtacgagtgcctgtgccccgatggattccaattggtggctcaacgcaggtgtgaggatatcgacgagtgccaagacccagacacctgtagccagctttgtgtgaatctcgaggggggatataaatgccagtgtgaagagggctttcagctagatccacacactaaagcctgtaaagcagtgggatctattgcctacttgttctttactaacagacacgaggtgcgcaaaatgactctggatcgctctgagtacacatctctgatccctaatctgagaaacgtcgtggcactggataccgaagtggcgagcaacagaatctactggagtgacctcagccaacggatgatctgctctacccaattggaccgggctcatggtgtctctagttacgacaccgtcatcagtcgtgacatacaagctccggacggtctggcagtggattggatccacagtaacatctactggacagactcagtgttgggaacagtgagtgtagccgacactaaaggtgttaagcgaaagacgttgtttagggagaacggttccaagccgcgagctatcgtggtggatccagtgcacggcttcatgtactggacagattggggaactccagcaaagattaagaaaggtgggcttaacggggtggatatctactctcttgtcacagagaatatccaatggccaaacggcatcaccttagaccttctgtctggccggctctactgggttgactctaaactgcacagtatctcatctattgatgtgaatggaggaaacaggaaaacaattctggaagacgagaagaggctcgcccaccccttttcactagccgtgtttgaggataaggtcttttggaccgatatcatcaacgaggctatcttcagtgccaatcgactaacaggtagtgatgtgaacttgctggccgagaacctgctgagtcctgaggacatggtcctttttcacaacctcacacagccgaggggggtcaattggtgtgaaaggaccacactttcgaacggcggctgccagtatttatgtctgcctgccccacaaatcaacccacattcacccaaatttacctgtgcctgcccagacggtatgcttctggctagggatatgagatcatgcctgacagaggcagaggcggctgtggccacccaagagacatccacagtgcgcctcaaagtctctagcaccgctgtgagaacacagcacacaacaacacggccggttccggatactagtagactcccaggggctacaccaggactgactaccgtggagatcgtgaccatgtcccatcaagccttgggggatgtggccggcaggggtaatgagaaaaaaccatccagcgtgcgtgctctttctatcgtactgccgattgtccttttggtctttctgtgtctgggagtgtttctcctgtggaagaattggcgcctgaagaacattaattcaatcaacttcgacaaccccgtgtaccagaaaactacagaagacgaagtccacatttgccataaccaggacgggtactcttaccctagcaggcagatggttagcctcgaggacgacgtggca

SEQ ID NO: 16194 - DNA, 2580 bp, synthetic construct
  misc_feature 1..2580: note = source = /note="Description of Artificial Sequence: Synthetic coding sequence"
  source 1..2580: mol_type = other DNA
atgggcccgtggggttggaagctgcggtggacggtggctctcctgctcgcggctgcaggaaccgcggtgggtgatcgctgtgaaaggaatgaattccaatgccaagatggaaagtgcatctcttacaaatgggtctgcgacggaagcgccgagtgccaggatggttcggatgagtcccaggaaacttgtttgtcggtgacctgcaaatcgggcgacttctcgtgtgggggaagggtgaacagatgcatcccccaattctggcgctgtgatgggcaagtggattgcgataatggatcggatgaacagggctgtccgcctaagacctgctcacaggatgaatttcgctgccacgacggcaagtgcatctcacgccagttcgtgtgcgattcggatagagactgcctcgacggttccgacgaggcttcctgcccggtgctcacttgtggccctgccagcttccagtgcaattcatccacctgcatcccacaactgtgggcgtgcgacaacgacccagactgcgaagatgggtctgatgagtggcctcagcggtgcagaggactgtacgtgttccagggagactccagcccttgctccgcgttcgagttccattgcctgtctggtgagtgtatccatagctcatggcgctgcgacggaggaccggactgcaaagacaagtccgatgaagaaaattgcgccgtggctacgtgtaggccagacgaatttcaatgttcggacggaaactgcattcacggctcaagacagtgtgaccgcgagtacgattgtaaggatatgagcgatgaggtaggatgtgtgaatgtgaccctgtgcgagggaccaaacaaattcaagtgccactccggcgagtgtatcactctggacaaggtgtgcaacatggcgcgcgattgtcgcgactggtcggatgagccaatcaaggaatgcggaaccgccgagtgcctggataacaacggaggatgttcccatgtgtgcaatgacctcaagatcggatacgaatgcctgtgcccggatggctttcagctggttgcgcagcggcgctgcgaggacatcgacgaatgccaggacccggatacctgttcgcaactctgcgtgaacttggaaggtggatacaagtgccagtgcgaagaaggattccaactggatccgcacaccaaagcatgcaaggcggtggggtcaatcgcctatttgttctttacgaatcggcacgaggtgcggaagatgactctcgacaggtcagaatacaccagcctgatccccaatctcagaaacgtggtggcactcgataccgaagtcgcctcgaataggatctactggagcgatttgagccagcgtatgatttgtagcacccagcttgatcgggcgcacggagtgtcatcctatgataccgtgatcagcagagatattcaagcccccgacgggcttgccgtggattggattcattcgaacatctactggactgattcagttctggggaccgtgtcagtggcagacactaaaggagtgaagcgcaaaaccctgttccgcgagaatggatccaagccacgagcaatcgttgtggacccggtgcacggatttatgtactggaccgactggggcaccccggccaaaatcaagaagggagggctgaacggagtggacatatactcactggtgactgaaaacatccaatggccgaacggcatcactctcgacctgctcagcggacggctctactgggttgattccaagttgcattccatttcgagtatcgatgtcaatggtggaaacagaaagactatcctcgaagatgaaaaaagactggcccacccgtttagcctggcggtgttcgaagataaagtgttctggactgacattatcaacgaagctattttctcagccaatcgcctgactggaagcgacgtcaatctgctggccgagaaccttctgtccccggaggacatggttctgtttcacaacctgactcaaccgcggggagtgaattggtgtgagcgcaccactctgtcaaacggaggatgccagtacctctgtctcccggctccgcagatcaacccacattctccaaaattcacttgcgcctgtccggatggaatgctgctcgcgagggatatgcgctcatgcctgactgaagcggaggcggcggtggctacccaggaaaccagcaccgtgcgcctcaaagtctccagcacggcggtccgcactcagcacaccaccactagaccggtgccggacaccagcaggctcccgggggccactcctgggctgactacggtggaaatcgtcactatgtcccatcaggcattgggagacgtagcaggccgcggcaacgagaagaagccttcgtcggtgcgtgcgctgtctatcgtgctgccgatcgtcctgttggtgttcctctgcctcggtgtgttcctgctgtggaagaattggcgcttgaagaatatcaacagcatcaatttcgacaatccggtctaccagaaaaccactgaagatgaggtgcacatctgccacaaccaagacggatacagctacccgtcaagacagatggtgtccctcgaggatgacgtggcc

SEQ ID NO: 16195 - DNA, 2580 bp, synthetic construct
  misc_feature 1..2580: note = source = /note="Description of Artificial Sequence: Synthetic coding sequence"
  source 1..2580: mol_type = other DNA
atgggcccctggggttggaagctgcggtggacagtggccctgctactggccgcggccggaaccgcggtgggagacaggtgtgagaggaacgagttccagtgtcaggacggtaagtgcatctcttataaatgggtctgtgacggatccgcagaatgtcaggatgggtctgatgagtcgcaggagacctgtctgtctgtcacctgcaagtccggcgattttagctgcgggggacgggtgaacaggtgcatcccacagttttggcgatgtgatgggcaagtggattgtgataatggctctgatgagcagggctgtcccccaaaaacctgctcacaggatgaattccgctgccacgacggcaagtgtatttcaagacagttcgtttgcgacagtgaccgagactgtctggacggatcagacgaggcatcctgccctgtcctcacatgcggccccgccagcttccagtgcaattcttctacatgcatcccacagctttgggcttgtgacaatgacccagattgcgaggacggaagtgacgagtggccacaaaggtgccgcggtctgtacgtattccagggcgactcttccccatgctctgcgttcgagttccattgtctctcaggcgagtgcatccattccagttggcgctgtgacggtggcccagattgcaaagacaagtccgatgaagagaattgtgcagttgctacatgtcggccagatgaatttcagtgtagtgatggaaactgtatccacgggtctaggcagtgcgaccgagagtacgattgcaaggatatgtctgacgaagtgggttgtgtgaatgtcacactttgcgaaggacccaacaagtttaagtgtcacagtggagagtgtattacactggacaaggtttgtaacatggctagagactgccgggattggtctgacgaaccaataaaggagtgcgggactgctgaatgccttgacaacaacgggggctgcagccacgtttgtaacgaccttaaaataggctatgaatgcctctgccccgacgggtttcagcttgtcgcgcagcgtcgttgcgaggacattgacgaatgtcaggaccccgacacgtgtagtcagctgtgcgtaaacctggaagggggatataaatgtcagtgtgaggagggattccagctggacccccacactaaagcctgcaaagcagtgggcagcatcgcctacttgttctttacgaatcgacacgaggtaagaaagatgacacttgaccgatctgaatacacatcgctcattcctaatctgcggaatgttgttgctctggataccgaagtggccagcaatcgcatctactggagcgacctgtcgcaacgtatgatctgttccacacagctcgatcgcgctcacggggtatctagctatgacacggtgatatcgagggacatccaggccccggacggtctcgcggtggattggatccatagcaatatttactggacagattccgtacttggcacggtgtctgtcgcagacactaagggtgtgaagcgcaaaactctgtttcgggaaaacggatccaagccccgagccattgtggtcgaccctgtacatggctttatgtactggaccgattggggaacacctgccaaaataaaaaaaggcgggttgaatggggtcgacatttacagtctggtcactgagaacatacaatggccaaacggcatcactctggacctgctaagcgggcgcctgtactgggtggactctaaactccattccatctcctcaattgacgtaaatggggggaatcggaaaacaatcctggaagacgagaagcgcttagcccaccccttttctctggcagtttttgaggacaaggtgttttggactgacatcatcaatgaggccatcttctccgcaaatcgcttaacgggatctgatgtaaaccttctcgccgaaaacctgttgagcccagaagatatggtcttgtttcataatctgacccagccccgcggagtgaattggtgcgagcgcacgaccctgtccaatgggggatgccagtacctatgcctacccgccccccagattaatccccattctcctaaattcacttgcgcatgtccagatggaatgttactggcgagagatatgcgcagttgcttgacggaggccgaagcagccgttgccacccaggaaaccagtacagtgcgacttaaagtgtcgtcaactgctgtgcgcacccagcatactactacacgtcccgtacccgatacgtcacgcctgccaggcgctacccccgggctgaccactgtggaaatagtcacaatgtctcatcaggctttaggggacgtagcgggacggggtaacgagaaaaagccttcttctgtgcgcgctcttagtatagttctgcctatagtgctcctggtcttcttgtgccttggggtgtttctgttatggaaaaactggcggttaaagaatattaactcaattaacttcgacaatccagtgtatcagaaaaccaccgaggatgaggtccatatctgtcataatcaggacggatattcctaccccagccgacagatggtcagcttagaggatgacgtggcg

SEQ ID NO: 16196 - DNA, 2580 bp, synthetic construct
  misc_feature 1..2580: note = source = /note="Description of Artificial Sequence: Synthetic coding sequence"
  source 1..2580: mol_type = other DNA
atggggccctgggggtggaagttgagatggactgtcgcactgctgttagcggcagccggcacagctgtaggtgacagatgtgagcggaacgaattccagtgtcaggatggcaaatgtataagctataaatgggtatgcgacggctccgctgagtgccaagatggaagtgacgaaagccaggagacatgtctttcggtgacatgtaaatccggggactttagctgcggaggcagagtgaatagatgtattcctcaattttggcggtgtgacggtcaggtagattgtgataatggctccgatgagcaagggtgtccccccaagacctgtagccaggatgaatttaggtgccatgatggtaagtgtatatccagacagttcgtttgcgattctgacagagattgtctggatgggtctgacgaagcttcctgccctgtgctgacgtgcggacccgcttcatttcagtgcaattccagcacatgtatacctcagctgtgggcatgcgataacgaccctgattgtgaagacggaagcgacgagtggccacagagatgccgaggtctttacgtgttccagggagattcttctccttgctcagcgtttgagtttcactgcctgtccggcgaatgtattcattcatcatggaggtgcgacggcgggcccgactgtaaggataaatccgatgaggagaattgcgcggtagctacttgcagacctgacgagtttcagtgtagtgacgggaattgtattcacggatctcgtcagtgcgatcgcgagtatgactgcaaagacatgagtgacgaagtagggtgcgtgaatgttacactgtgcgagggcccaaacaagttcaagtgccattcgggggaatgtattacgctcgacaaagtgtgcaatatggctcgagactgcagggactggagcgatgaaccaattaaggaatgtggcaccgccgaatgcctcgacaacaatggcggctgctcgcatgtctgcaacgatctcaaaatcggttacgagtgtctatgcccggacggatttcagttggttgcccagagacggtgcgaagatatcgacgaatgccaagaccccgacacatgcagccagctctgtgtgaacttggagggcggatacaagtgtcagtgtgaggaagggtttcagctggatccccataccaaagcttgcaaagctgtgggatccattgcctatctcttcttcactaatcgccacgaagtgcggaaaatgactctggaccgttcagaatatacctcccttatacctaatctccggaatgtcgtcgcgttagacacagaggtggcaagtaacagaatatactggagtgacctgagccagaggatgatttgttctacccagcttgatcgcgctcacggcgtcagctcatatgacacagtcatcagtcgggatattcaagcaccagatggattagcggtggattggatccactccaacatttattggaccgactcggttcttggtaccgtctcagtcgctgatactaagggcgttaagagaaaaactctttttcgggagaacggcagcaagccccgtgctatcgttgtggacccagtgcatgggtttatgtattggaccgattggggcacacctgctaaaataaaaaaaggtggattgaacggtgtcgacatttatagcctcgtaacggaaaacattcaatggccaaatggcattactctcgacctgttatcaggccgcctgtattgggtggattctaagctccattccataagttcaatcgacgtaaacggcggcaatagaaagaccatcctagaggatgaaaaacgtttagcccacccattttccctcgctgtgttcgaggataaagttttttggacagatatcataaatgaggccatcttctcagcaaacagactcacagggtcggacgtcaatctactagccgagaatctacttagccctgaagatatggtcctgtttcataacttaacccagccccggggagtgaactggtgtgagcgaacaacactgtctaacggcggctgccagtatctttgccttccggcgcctcagataaatccacattcccctaagtttacctgtgcctgtcccgacggcatgctgctggcacgggatatgcggtcttgtctcaccgaggctgaggcagccgttgccacgcaggaaactagtacagttcggctgaaagtctccagtaccgcagtcaggactcagcatactactactcggcccgtcccagatacatctcgcctgcccggagctacgccaggtctgaccactgtggagattgtgaccatgtcccaccaagcattgggggacgtcgcaggacgcggcaatgaaaagaaaccatcaagcgttagggccctctcgatcgtgctgccaatagtgcttctggtcttcctgtgcctgggggttttcctgctttggaagaattggcgccttaagaatatcaattctataaacttcgacaaccctgtataccaaaagaccactgaagatgaggtccatatttgccacaatcaagatggatattcctacccctccaggcagatggtgtctctggaggatgatgtcgct

SEQ ID NO: 16197 - DNA, 2580 bp, synthetic construct
  misc_feature 1..2580: note = source = /note="Description of Artificial Sequence: Synthetic coding sequence"
  source 1..2580: mol_type = other DNA
atgggtccttggggatggaaactgagatggactgtggcgctgcttcttgccgccgcaggtactgcagtgggggaccgctgtgagaggaacgaattccagtgtcaggacggaaagtgtatctcctacaagtgggtgtgtgatgggtcagcagagtgtcaagatggatccgatgaatcacaggaaacttgtttgtcggtcacctgtaaatccggggatttctcctgcggtggcagagttaatagatgtataccgcagttctggcgatgtgatggacaggtggattgtgataacggatcagacgagcaaggatgccctccgaaaacttgttcccaagacgagtttagatgccacgatggtaagtgcattagcagacagtttgtgtgtgacagcgacagagattgtctcgatggttcggatgaggcttcgtgcccagtcctgacctgtggtccagcgtcatttcaatgtaatagctctacctgtattccccagctctgggcgtgcgataacgaccccgattgtgaggacggctccgacgaatggccacaacggtgccgcggactgtacgtgtttcagggtgattcgtccccttgttccgcgttcgagttccattgtctttcgggagagtgtatccactcgtcgtggcgctgtgatggtggacccgactgtaaggataagtcagatgaggaaaattgcgctgtggccacctgtagacctgatgagtttcagtgctccgacggaaactgtatccatggctcccggcagtgtgatcgggaatacgattgtaaggacatgtcggatgaggtcggctgtgtcaacgtgacgctgtgcgagggacccaataagtttaagtgtcattccggagagtgcatcactctggataaggtgtgtaacatggctcgagactgccgggattggtcggatgaaccaatcaaagagtgtggaactgctgaatgtcttgataacaatggcggttgtagccatgtctgtaatgacctgaagattggatacgaatgtctgtgccctgatggctttcaacttgtggcacagcggcgttgcgaagatatcgacgaatgtcaggatccggatacttgttcgcaactctgcgtgaaccttgaaggaggatacaagtgccagtgtgaagaggggttccaacttgacccacatactaaggcatgtaaagcagtggggagcatagcgtacctgtttttcactaaccgacatgaagtgcgcaaaatgaccctggacaggtcagaatacacctcactgattcccaatcttcgtaatgtggtggcactggatactgaagtggcaagcaaccgcatctactggtcggacctgtcgcagcggatgatttgttcgactcaactggacagagcacatggtgtctcctcctacgataccgtgatatcaagagatattcaggcgcccgatggtcttgcggtcgactggatacatagcaacatttactggactgattccgtgctgggcaccgtctcggtcgccgataccaagggggtcaaacgtaagaccctttttcgggagaacgggtcgaagcctcgtgccatagtggtggaccctgtccatggatttatgtattggactgactggggtacccctgcaaagataaagaagggcggcctcaatggtgttgatatctactcactcgtgaccgaaaacatccaatggccgaatggtattaccctcgatctcctgtcggggagactttactgggtggattcaaaacttcactcgattagctccatcgacgtgaacggtgggaacagaaagaccatattggaagatgaaaaacggctggctcatccattctcgctggccgtgtttgaggacaaggtgttctggaccgacataatcaacgaggccattttctccgccaaccgtttgaccggtagcgacgtgaatctgctggcagaaaatctgctctcccctgaggacatggtcctgttccataaccttacccaaccgaggggtgtcaattggtgcgagcgcaccacgctgtcaaatggtggttgtcagtatctctgccttcctgcaccacaaatcaatccacattcccctaagttcacctgcgcctgtcccgatggcatgctgctcgcacgtgacatgcgatcgtgcctgactgaggcagaagccgccgtggcaactcaagaaaccagcactgtgcgtttgaaggtttcgtcgacggcagtgagaacgcaacataccactacgcgcccggtccctgatacctcccggctccccggcgcaactccaggacttaccaccgtggaaattgttactatgtcccatcaggcgcttggtgacgttgcagggagaggtaacgagaagaagccctcatcggtgagagcactttcaattgtgttgcccatcgtccttctcgtgttcctgtgtctgggagtctttctcctttggaaaaactggcgacttaagaacataaactccatcaatttcgacaacccggtgtaccagaaaacgactgaagatgaagtccacatatgtcacaaccaggatggatactcgtacccctctcggcaaatggtgtcactggaagatgacgtcgca

SEQ ID NO: 16198 - DNA, 2580 bp, synthetic construct
  misc_feature 1..2580: note = source = /note="Description of Artificial Sequence: Synthetic coding sequence"
  source 1..2580: mol_type = other DNA
atggggccgtggggctggaaactgagatggaccgtcgcgcttctgctggcggcggccggtaccgcagtcggcgaccggtgcgaaaggaatgaattccaatgccaagacggaaaatgcatttcctacaagtgggtgtgcgacggctcagcagagtgtcaggatggatcggatgagagccaggagacttgcttgtctgtgacctgcaagtccggtgacttttcttgcggaggccgcgtgaacagatgcatcccgcagttctggagatgcgatggtcaggtggactgcgataacggaagcgacgaacagggatgccctccgaaaacctgctcgcaagatgaattccgctgccatgacggcaagtgcatcagccgccaattcgtgtgcgattccgacagagactgcctggacggatcggacgaagccagctgccccgtgctgacttgcggcccggcctcctttcagtgtaattcaagcacctgcataccacagctctgggcatgtgacaatgatccggattgtgaagatggctccgacgagtggccacaacgctgccggggattgtacgtctttcagggcgactcgagcccgtgtagcgcgttcgagttccattgtttgtccggagagtgcatccattcgtcttggcggtgcgatggaggaccagactgtaaggacaaatcggatgaggagaattgcgcggtggcgacttgtcgcccggatgagtttcaatgctccgacgggaactgcattcacggcagccgccagtgcgatcgagaatacgactgtaaggatatgtccgacgaggtcggctgcgttaacgtgactctctgcgaaggaccgaacaagttcaagtgccattccggtgaatgtatcactctggacaaggtgtgcaatatggcacgggattgtcgggattggtctgacgagcccatcaaggaatgtggaactgccgaatgcctcgacaacaacggtggttgcagccatgtgtgtaacgacctgaagatcggctacgaatgcctctgcccagacggtttccagctggttgcacagcggagatgcgaagatattgatgagtgccaggatcccgacacgtgtagccagctgtgtgtgaatcttgagggcgggtacaagtgtcagtgtgaggaaggattccaattggacccgcacaccaaagcctgcaaggcggtgggctcgatcgcctacctgttcttcactaatcgccacgaggtgaggaaaatgactctggaccgctcggaatacacctcgctgatcccgaatttgagaaatgtggttgccctggataccgaagtggccagcaatagaatctactggtctgacttgtctcaacgcatgatttgttcaacccagttggaccgggcacacggagtctcctcctacgatactgtgatctcgcgcgacatccaggcaccggacggactggccgtcgattggattcacagcaacatctactggacggattcggttctgggaactgtgtccgtggcagacactaagggagtcaagaggaaaactctcttccgggagaatggctcaaagcccagggccatcgtcgtggatccggtgcatggcttcatgtactggaccgattggggaactcccgccaaaatcaaaaaaggaggactgaacggagtggatatctattcgctcgtgaccgagaatatacagtggccgaacggaatcaccttggatctgctcagcggaaggctgtactgggtcgatagcaagctgcacagtatctcatccatcgacgtgaatggtggcaacagaaaaaccatactggaggacgaaaagcgcctcgcgcaccctttttccctcgcggtgttcgaagataaggtcttttggacggatatcattaacgaagctattttctcagccaaccgcctgaccggttccgatgtgaacctgttggcagagaatcttctctcccctgaggatatggtgctgtttcacaatcttactcaaccacgcggagtgaattggtgtgaaagaaccaccctgtccaacgggggatgccaatacctgtgcctcccggcccctcagatcaacccgcacagcccaaagttcacttgtgcttgccctgatggcatgctcctcgcgagagatatgcgctcgtgtctcactgaagctgaagccgccgtggctactcaggaaacgtcgaccgtgcgcctcaaagtgagctcgaccgctgtgcggacccaacataccactactcggcctgtgcctgatacttcgaggctgcctggagctacgccgggccttacgacggttgaaatcgtcaccatgagccatcaagctctcggagatgtggcgggacggggaaacgaaaagaagccctcctcagtccgggcgctctccatcgtgctccccatcgtgcttctggtgtttttgtgtctgggagtattccttctgtggaagaattggcgcctcaagaacatcaactccatcaacttcgacaacccggtttaccagaaaactaccgaggacgaagtgcacatctgccacaatcaggacggctattcctacccttcacggcaaatggtatccctggaggacgacgtggca

SEQ ID NO: 16199 - DNA, 2580 bp, synthetic construct
  misc_feature 1..2580: note = source = /note="Description of Artificial Sequence: Synthetic coding sequence"
  source 1..2580: mol_type = other DNA
atggggccgtggggatggaagctgagatggactgttgcactcctgctggcggcagccggaactgctgtgggtgatcgttgcgaaaggaatgagtttcaatgtcaagatggtaaatgtatctcgtacaagtgggtgtgtgacggatcagccgaatgccaagacggatcagacgagtcgcaagaaacctgcctgtccgtcacttgcaagtccggggacttctcctgtggcggacgggtgaatcggtgcattccgcagttttggcggtgcgacggccaggtggactgtgacaacggaagcgacgaacaggggtgtcctccgaaaacttgtagccaagacgagttccggtgtcacgatggtaaatgcatctcgcgccagttcgtgtgcgactcggacagagattgcctcgatggatccgacgaggcttcttgccctgtgctgacctgcggtccggcctcgtttcagtgcaactcgtccacctgcatcccgcaactttgggcctgcgacaatgaccctgactgcgaagatggatccgatgaatggcctcagcgctgtcgcggcctttatgtgttccagggtgattcatccccgtgttcagccttcgagttccactgcctgtcgggcgaatgcatccattcgtcctggcgctgcgacggcggccctgattgcaaagataaatcggatgaagaaaactgtgcggttgcgacgtgtagaccagacgaattccaatgctctgacggtaactgcatccacggatcgagacaatgtgatcgtgaatatgactgtaaggacatgagcgatgaggtcgggtgtgtcaatgtcaccctctgcgaaggtccgaacaaattcaagtgccatagcggagaatgcatcacgctggataaggtctgcaatatggcccgcgattgtcgggattggtctgacgaaccgatcaaagaatgcggaaccgcagaatgcctggacaataacgggggatgctcacacgtctgcaatgatctgaagattgggtacgaatgtctctgcccagacggcttccaactggtggctcagaggagatgcgaggacatagatgagtgccaggaccccgacacttgctcacaactgtgcgtcaatctcgagggaggatacaaatgccagtgtgaggaaggattccagctcgatccacacactaaggcatgtaaagccgtcggttcgattgcctacctctttttcactaatcgacatgaggtgagaaagatgactctcgatcgatcagaatacaccagcctcatcccgaaccttcggaatgttgtggcgctggatacggaagtggcctcaaaccgcatctactggtcggacctctcgcagcggatgatctgctcgactcaattggatcgtgctcatggagtcagctcctacgataccgtgatcagcagagacatccaggcccctgacggcctcgccgtggactggatccattcaaacatctactggaccgactcggtcttgggtaccgtctccgtggcggacaccaaaggagttaagcggaaaaccctttttcgcgagaacgggtcgaaaccgcgcgcgatcgtggtggacccagtgcatggttttatgtactggactgactggggaactccggccaagatcaagaagggaggcctcaatggggtggacatctactctctcgtgactgagaacatccaatggcccaacggcattaccctggacctgctgtcaggacgcctgtactgggtggattcaaagctgcatagcatcagctccatcgacgtgaacggaggcaatcgcaaaacgatactggaggatgagaagcggctggcgcatcctttctccctcgcagtgttcgaggacaaggtgttctggactgatatcatcaacgaggcaattttcagcgcgaataggctcactggctcggatgtgaacctgctggcagagaacctgttgagcccggaggatatggtcctgtttcacaatctgacccagccgcggggcgtcaactggtgcgaaagaacgaccctttcgaacggcggctgccagtacctctgcctgccggctccgcagatcaacccgcactctccaaagttcacttgcgcttgcccggacggaatgcttttggcccgggatatgagatcttgcttgactgaagcggaagccgccgttgcgacgcaggagacttcgactgtgcggctgaaagtctcctccactgcggtgcggacccagcacacgactacccgcccagtgccagacacctcaagacttccgggagctaccccaggcctcaccaccgtcgaaatcgtgaccatgagccaccaggctcttggtgatgtcgctgggcgcgggaacgaaaagaaaccaagctcggtgcgcgcgttgtccatcgtccttccgatcgtcttgttggtgtttctgtgcctcggcgtctttctgctgtggaagaattggcggctcaagaacatcaacagcatcaacttcgacaaccccgtctaccagaaaactacggaggacgaagtgcacatttgccacaatcaggacggatactcctacccgagccgacagatggtgtcactggaggacgacgtggcc

SEQ ID NO: 16200 - DNA, 2580 bp, synthetic construct
  misc_feature 1..2580: note = source = /note="Description of Artificial Sequence: Synthetic coding sequence"
  source 1..2580: mol_type = other DNA
atggggccatggggatggaagctgcgatggaccgtcgccctgctgctggcagctgcaggaactgccgtgggtgatcggtgcgagcggaacgaattccagtgccaggacggtaaatgtatctcgtacaaatgggtgtgtgacgggtcggcagagtgtcaagacggctcagatgaatcacaggaaacttgcctctccgtcacttgtaagagcggggacttctcttgcggcggtcgcgtgaatagatgcatccctcagttctggcggtgcgacggacaggtggactgcgataatggaagcgacgagcagggctgtcctccgaaaacttgttcgcaggacgagttcaggtgccacgacgggaagtgcatatcccggcaattcgtgtgtgactcggatagagattgcctggacggatcggacgaggcctcctgccccgtgctcacttgtggacccgcgtccttccaatgtaactcctccacttgcatcccgcaattgtgggcctgcgataacgatccggactgcgaagatggtagcgacgagtggcctcaacgctgcaggggcctgtacgtgttccagggtgattcctcaccatgctccgcgtttgaattccattgcctttcgggagagtgcattcatagctcatggagatgcgatggcggaccagattgcaaggacaaatctgacgaggagaactgcgccgtggccacctgtcgcccagacgaatttcagtgttcagatgggaactgtatccatggttcgcgccagtgcgatcgcgaatatgactgcaaggacatgtcggacgaagtgggatgcgtgaacgtcacgctgtgtgagggtcccaacaagttcaagtgccattctggagaatgcatcaccttggataaagtgtgcaatatggcacgcgattgcagagactggtccgacgaaccgataaaagaatgtggcaccgccgaatgtcttgataacaacggaggatgctcccacgtgtgcaacgacctgaagatcgggtacgagtgcctgtgtccagatggcttccagctggttgcgcaacgccgctgcgaggacattgacgaatgccaagacccggatacctgcagccagctctgcgtgaacctggaggggggctacaagtgccaatgcgaggaaggattccagctggacccgcacactaaggcctgcaaggccgtcggatcgatcgcgtacttgttctttaccaacaggcacgaagtgcggaagatgactctggatagatcagaatacaccagccttatccctaacctgcgcaacgtcgtggcgctggataccgaggtggcaagtaatcgcatctactggagcgacctttcccaacgcatgatctgctccacgcaactggatcgcgcccacggcgtgtcgtcgtacgacactgtgatctccagggatattcaagcgcctgacgggctcgccgtcgactggatccacagcaatatctactggaccgactcggtactgggaactgtgtcggtggccgacacgaaaggagtcaagcgcaaaactctgtttcgggaaaacggatccaagccgagggcgattgtcgtcgacccggtgcacggattcatgtactggactgactggggaacgccggccaaaatcaagaagggagggctcaatggtgtggacatctacagcttggttactgaaaacatccagtggccaaacggcataactcttgatctgctgagcggaaggttgtactgggttgactccaaactgcacagcattagctcaatcgacgtcaacggaggcaaccgcaagaccattctggaggatgaaaagagactggcccacccttttagcctggcggtgttcgaggataaggtcttttggactgatatcatcaacgaggcaatcttctccgcgaatcgcctgactggatcagatgtgaacctgctggctgaaaacctgctgtcacctgaggacatggtcttgttccacaatttgacccagccaagaggtgtgaactggtgtgagcggactacccttagtaatggaggctgtcagtatttgtgcctgccggccccgcagattaatccgcacagccctaagttcacgtgcgcatgccccgacggcatgcttttggcaagggacatgcgctcgtgtctcacggaggcagaggccgccgtggctacccaggaaacctccacggtcagactgaaggtttcatcgaccgctgtgcgcacccaacataccaccactaggccggtcccagatacctcccgtctgccgggtgccaccccgggacttactactgtggaaatcgtgaccatgtcgcatcaggccctgggagacgtcgctggacgcggcaacgaaaagaaaccttctagcgtaagggcgctgtccatagtgctcccgattgtcttgctggtctttctttgcctgggcgtctttctgctctggaagaattggcggctcaagaatatcaactcaatcaatttcgacaatcccgtttaccaaaaaaccacggaggatgaagtccacatctgccataaccaggacggatactcgtacccatccagacagatggtgtccctcgaagatgacgtggcc

SEQ ID NO: 16201 - DNA, 2580 bp, synthetic construct
  misc_feature 1..2580: note = source = /note="Description of Artificial Sequence: Synthetic coding sequence"
  source 1..2580: mol_type = other DNA
atggggccctgggggtggaaactcaggtggacagttgcactgctactcgcagctgccggtaccgctgtgggcgatcgttgtgagcgtaacgagtttcagtgccaggatgggaaatgcataagttacaagtgggtctgcgatggatctgctgagtgtcaagacggttctgatgaatctcaggaaacttgcctctcagtgacatgcaaatcaggtgatttctcatgtgggggccgtgtgaatcgatgtataccccagttctggaggtgcgacggtcaggtggattgcgacaacggtagcgacgagcaggggtgccccccaaaaacttgttcacaagatgaattccgatgccatgacggaaaatgcatctcccggcaatttgtctgcgattccgatcgggactgcctcgatggttctgatgaagcctcttgtcccgtactgacatgtgggccagcctcattccagtgcaacagttcaacctgtattccacaactatgggcctgcgacaatgaccccgattgcgaggatggtagtgatgaatggcctcaacggtgtagagggctgtacgtgttccagggtgattcttccccctgcagtgcatttgaatttcattgtctgtccggggaatgcattcactcctcatggcggtgtgacggcgggcctgactgcaaagacaaatcggacgaggagaattgcgccgtggcgacctgtcggccagatgagttccagtgtagtgacggcaattgcattcacggcagccggcagtgcgatcgcgagtatgactgcaaggacatgtcagacgaagtgggatgcgtgaacgtgaccctgtgcgaaggcccaaataaattcaagtgccactcgggcgagtgcattaccctggataaggtgtgtaatatggcgcgggactgcagggactggtccgacgagcccattaaggagtgtgggaccgcagagtgtctggataacaacggaggctgttcacacgtatgcaatgaccttaagatcggctacgagtgcctctgccccgatggtttccagttggtggcccaaaggcggtgtgaagacattgacgagtgccaggaccctgatacgtgttcacagctttgcgttaatcttgagggcgggtacaagtgtcagtgtgaagagggctttcagctcgacccccacaccaaagcctgcaaagcggtgggatcaattgcctacctcttttttaccaaccgacacgaagtacgcaagatgaccttagataggagcgagtacacatctctcatcccaaatctgcggaacgtagtcgcattggacacagaggtcgcttccaatcgcatttactggtccgatctctcacagaggatgatctgcagtacacagctagacagagcacacggcgtgtcgtcatatgatacagtcatcagtagagatatacaggctccagacggtttggctgtcgattggattcacagtaacatttactggaccgattccgtgctcggtactgtgagcgttgctgacacgaaaggagtgaagcgcaagacccttttccgagagaatggatctaaacctagggccatcgtggtggatcctgttcatggtttcatgtattggaccgactggggcactcccgcgaagatcaagaaaggcgggctgaacggtgtcgacatatatagtctggtaaccgaaaacatacagtggccaaatggaatcactctggacctcctttcagggcgtctgtactgggtcgattcaaagctgcattccatttcaagcatcgacgttaacggcggcaatcggaaaacgatcttggaggacgagaagcggctggcacacccgttttccctcgcagtgtttgaggataaagttttctggacagatataataaatgaagctatcttctccgcaaaccgtctaacaggcagtgatgtgaacctattagctgagaatctgctttctcctgaggacatggtcctgtttcacaatttgacccaaccaaggggtgtgaactggtgcgagaggacaactctgtccaatggcggctgtcagtacctctgccttcccgccccacagattaacccacacagtcccaagttcacgtgcgcttgccccgatgggatgctgttggcacgagacatgcgatcttgcttgaccgaggcagaggccgccgtcgccacccaggaaacaagcacggtaaggctgaaggtttcatccaccgccgtaagaacccagcacaccactaccaggccagtgccggacacaagccgcctgccaggagctacgcccggcctaaccacggtcgaaatcgtgacgatgtctcatcaggccttaggggacgtagctggccgtggaaatgagaagaaacctagtagtgtgagggcgctctccatcgtgcttcctatcgtcctactggtgttcctatgtctaggtgttttcttgctgtggaagaactggcgcctaaagaatatcaattcaatcaacttcgacaaccccgtgtaccagaagaccactgaggatgaggtgcacatctgccataatcaggatggatacagttatccttctcgccaaatggtgtccctcgaagacgatgttgcc

SEQ ID NO: 16202 - DNA, 2580 bp, synthetic construct
  misc_feature 1..2580: note = source = /note="Description of Artificial Sequence: Synthetic coding sequence"
  source 1..2580: mol_type = other DNA
atgggtccttggggatggaaactgagatggacggtcgccctgcttctggcagccgccgggaccgcagtcggtgaccgctgcgaacgaaacgaatttcagtgccaagatggcaagtgtataagctacaaatgggtgtgtgatggtagcgccgaatgccaggacggaagcgacgagagccaagaaacctgccttagcgttacgtgtaaatcaggagatttctcgtgtggtggaagagtgaaccgctgtattccgcagttttggagatgtgatggccaggttgattgtgataacggcagcgatgagcaaggatgcccccctaagacctgcagccaggatgaatttcggtgtcacgacggaaagtgtatctcgagacaatttgtgtgtgactcggatcgtgactgccttgatggatcggacgaagcgagctgcccggtgttgacctgtggccctgcatcttttcagtgcaatagttcaacctgtattccacaactctgggcatgcgataatgatccagattgcgaggacgggtccgatgaatggccacaacgctgtagaggactctacgtgtttcaaggagattcctctccctgttccgcgttcgaatttcattgtttgtcaggagaatgcatacactcctcatggcgctgtgatggtggacccgattgtaaggataagtccgatgaagaaaactgcgccgtggccacgtgccgtccagatgagttccaatgttcggatggaaattgtattcatgggtccagacaatgtgacagagaatacgattgcaaggatatgtcagatgaagtcggttgtgttaatgtgaccctgtgtgagggacccaataagttcaaatgtcattcgggagaatgtattaccttggataaagtgtgcaatatggcacgggattgccgggattggagcgatgaacctattaaggagtgcgggaccgctgagtgtctggataacaacggaggatgttcacacgtctgcaatgaccttaagataggatacgaatgcttgtgtcccgacggttttcagctcgttgctcaacgtcgatgcgaagatatcgatgagtgtcaggaccccgatacgtgttcgcaactctgtgtgaatctggagggaggctacaagtgccagtgtgaggagggcttccaactggacccacataccaaggcatgtaaagcagtggggtcaattgcatatcttttctttaccaacagacatgaggtcagaaaaatgactcttgatcgctccgagtacacttcactgattcccaacctgcgcaacgtggtcgcgctcgataccgaagtggccagcaacagaatctactggtcggatcttagccaacgcatgatctgctcgacgcagcttgatagagcacacggagtgtcctcctacgataccgtgatctctagggatattcaagcacctgatgggcttgcagtggactggattcactcaaacatttactggactgatagcgttcttggaactgtgtccgtggctgacacgaaaggtgtgaagcgtaagacccttttcagagaaaacgggagcaaaccaagagcgatcgtggtggatccagtccacggttttatgtactggacggattggggcactcccgcgaagattaagaagggtggactcaatggtgtggacatctactcgctggtgactgaaaacatccaatggcctaacggaattactcttgatctgctgtcgggaagattgtactgggtcgattcgaaacttcatagcatttccagcattgatgtgaatggcggcaatcggaaaaccattctggaggatgaaaagagacttgcccatccatttagccttgccgtgtttgaagataaggtgttttggactgacatcataaatgaagcgatcttttcagccaatcgattgactggatccgacgtgaacctgttggctgaaaacctgctctctcctgaggatatggtgctgtttcacaaccttactcagccgaggggagtcaattggtgtgagcggactaccctttcgaacggcggctgtcagtacctttgcttgcctgcccctcagataaaccctcactcgccgaagttcacctgcgcatgtccagacgggatgcttctggcccgggatatgcgctcctgcctcaccgaagcagaggcagcagtcgcgacccaggagacttcaaccgtccgtctgaaagtgtcctcgactgcggtgcgcactcagcatacgaccacgcggcctgtcccagacacttcgaggctgcccggtgcgacgccgggactgacgacggttgaaatagtgaccatgtcccatcaggcacttggagatgtcgcaggcagaggaaacgaaaagaagccctcttcggtgcgcgcactttcaatcgtactgcctatcgtgttgctcgtctttctttgtctgggggtctttcttctctggaagaactggcgcctcaagaatatcaattccatcaatttcgataacccggtgtaccaaaagactacggaagatgaagtgcatatttgtcataaccaagacggttacagctatccgagtcgacagatggtgtccctcgaagatgatgtggct

SEQ ID NO: 16203 - DNA, 2580 bp, synthetic construct
  misc_feature 1..2580: note = source = /note="Description of Artificial Sequence: Synthetic coding sequence"
  source 1..2580: mol_type = other DNA
atggggccctggggctggaagctccgatggaccgttgcactgttgttggcagcagctggaaccgccgtgggagatagatgcgaacggaatgagttccaatgccaggacggcaagtgcattagctacaaatgggtctgcgacgggtctgcggaatgccaggacggctccgatgagtctcaggagacttgcctgagcgtcacctgcaaatcaggcgacttctcttgcggcgggagggtcaaccgatgtattccccagttctggcggtgcgacggacaagtggactgcgataatggcagcgacgagcaaggatgccctcccaaaacctgctcacaggacgagttccgctgtcatgacggtaagtgcatttctagacagttcgtctgcgacagcgatcgcgattgcctggacgggtctgatgaggctagttgtcccgtgctcacgtgtggccccgcctccttccagtgcaactcctcaacatgtataccgcaactgtgggcatgtgacaacgaccctgactgtgaagatggaagtgatgagtggcctcaacgctgccgcggactgtacgttttccagggtgacagcagcccatgctcagccttcgaatttcattgtttgtccggggagtgcatccactcctcttggcgatgtgatgggggacctgattgcaaggataagagtgatgaagagaactgcgccgtggccacgtgtcggccagacgagtttcagtgttctgacggaaactgcattcatgggagtagacagtgtgatagggaatacgactgtaaggacatgtctgatgaggtcggctgcgtgaatgtaacgctgtgcgaaggccccaataaatttaaatgtcattcaggcgagtgcatcacattggacaaggtgtgcaacatggctcgggactgccgggactggtccgacgaacctatcaaggaatgtggcacagccgaatgcctggataataatggaggctgtagccacgtctgcaacgaccttaagatcgggtacgaatgtttgtgcccagatggatttcagctggtcgctcagcgacggtgcgaggacatcgacgaatgtcaggatcctgacacctgcagtcaactgtgtgtcaatcttgaggggggctacaagtgtcaatgcgaagagggattccagctcgacccgcataccaaagcttgcaaggctgttgggtcaattgcctatttgtttttcacaaaccgacatgaggtacgcaagatgacactggaccggagcgaatataccagcttgatccctaatctcagaaatgtcgtggccctcgacactgaggtggcctccaaccgaatatactggtctgatctgtcccagaggatgatttgctcaacacagctggatcgagcgcatggagtttcttcctacgacactgtgatttctcgcgatattcaagcccccgacgggctggccgtagattggatacattctaatatctattggaccgatagcgtgttgggtaccgtgtctgtggcagacacaaaaggggtcaagcgcaagactctctttcgggagaatgggagtaaacccagagcaatagtggtggatcccgtgcacggatttatgtattggaccgattgggggactccagctaagattaagaaaggcggcttgaatggcgttgacatctactccctggttacggagaacattcaatggcccaacggtatcaccttggatttgttgtccgggagactgtactgggtggattcaaagctgcactctatctcctccatcgacgtcaatggaggcaacaggaaaacaatactcgaagacgaaaaaagactggcacatcccttttcactggcagtgtttgaggataaagtcttttggactgacataatcaatgaggcaattttctccgctaatagacttacaggaagcgatgttaatctgctggccgaaaatctgctgtcacccgaggatatggtcctcttccacaacctgacgcagccaagaggcgtgaattggtgcgaaagaaccaccctgtccaacgggggatgccagtatctgtgccttccagccccccagataaaccctcacagcccgaaattcacctgcgcatgtcctgacggaatgttgttggcccgggacatgcggtcctgcctgacagaggctgaagctgccgtcgctacccaggaaacttcaaccgtgagactgaaggttagtagcaccgcggtcagaactcagcatactacaactcggccagttccagatacaagtcgactgcctggagccaccccgggcctgactaccgtcgagattgttaccatgagtcaccaggccctgggagatgtcgccggccgcgggaacgagaaaaaaccctcatccgtcagagccctgagtatcgtactgcctatagttctgcttgtgtttttgtgccttggggtgttcctcctgtggaaaaactggaggctgaagaacattaacagtataaactttgacaatccagtctatcagaaaactacagaggatgaggtacacatttgtcataatcaggacgggtattcctacccctcccggcaaatggtgtccttggaggacgacgtggct

SEQ ID NO: 16204 - DNA, 2580 bp, synthetic construct
  misc_feature 1..2580: note = source = /note="Description of Artificial Sequence: Synthetic coding sequence"
  source 1..2580: mol_type = other DNA
atgggaccttggggctggaaactacggtggacagtggcattactgctagctgctgcaggaaccgccgtgggcgatcggtgcgaaagaaatgagttccagtgtcaagacgggaagtgcattagttacaagtgggtgtgtgacggcagcgccgagtgtcaggatgggagcgacgagagccaagaaacgtgtttgagcgtgacatgcaagtccggtgactttagttgcggcggtagggtgaaccggtgtattccacagttctggagatgtgatgggcaggtcgattgtgataatggtagtgatgaacaaggttgtccccccaaaacatgttcccaggacgaatttaggtgccatgatggcaagtgcatttcccgacagtttgtatgtgacagtgaccgcgattgtcttgatggatccgatgaggcctcctgccctgtgctgacatgcggccctgcctcttttcagtgcaactccagtacatgtatcccacaactatgggcctgtgacaacgaccccgactgcgaagacggtagtgacgagtggcctcaaagatgcagaggcctgtatgttttccagggtgactcgtccccttgcagcgcttttgagttccattgcttgagcggcgagtgtatccatagctcttggaggtgcgacggaggtccggactgtaaagacaagagcgatgaggagaactgcgccgttgccacctgccggcctgatgagttccagtgttcagacgggaattgcatacacgggtcaagacaatgtgatcgagagtacgactgtaaagacatgagcgacgaggtagggtgtgtcaacgtcacgctctgtgaggggcctaataaatttaagtgccactcaggcgagtgtatcacactggacaaggtgtgcaacatggctcgggattgtagagactggtctgacgagccaatcaaggagtgtggaaccgcggagtgccttgataacaatggtggatgctcacatgtttgtaacgacctcaaaataggatacgagtgtttgtgtccagacggattccaactggtcgctcaacgccggtgtgaggatatagatgagtgtcaagaccctgatacctgcagccagttgtgcgtgaacctcgagggtggctacaagtgtcaatgcgaagaggggttccaactggatcctcacacaaaagcctgcaaagcggtgggatccatcgcatatttgtttttcacaaatcgccacgaagtcaggaagatgacattggatcggtcagagtacactagcctgatcccaaacctgcggaacgtggtggccttggatactgaagtagcaagtaaccggatttattggtcagacctgtctcagcgcatgatatgcagtacacagctggaccgcgcacatggagtctctagctatgacactgtgatttcaagagatatacaggcgccagacgggcttgctgttgactggattcattcaaatatctattggaccgattcggtcctgggcacagtttctgtggccgacacgaaaggagtgaaacgaaaaacattgtttagggagaatggttccaagcctagggccatcgtcgtggatccagtccacgggttcatgtactggacggattgggggactcctgctaaaattaaaaaagggggtctcaatggggtggacatttattcactggtgactgagaacatccagtggcctaacggaattacactcgatctgcttagcggtcgactctattgggttgactcaaaactgcacagcattagcagtatagacgtgaatggcggaaaccggaagacaattctagaagatgaaaagagactggcccacccattctccctcgcagtattcgaggataaagtgttctggacggacattattaatgaggcgatattttcagctaacaggttgaccggcagcgatgtgaacctgctggccgagaacttgctttcccctgaggacatggtgttgtttcacaacctgacacagccccgtggcgtcaactggtgcgagaggactactctgtccaatggcggctgtcagtacctctgcctgccggccccacagattaacccgcatagtcccaagttcacatgtgcctgtcccgacggaatgctgctggcccgagatatgcggagctgccttaccgaagccgaagccgctgtcgccacgcaagagacctctactgtgaggctgaaggtatcaagcacagccgtgcggactcagcataccacaacccggccagtaccagacacatcgcgcctcccaggggctacgccggggttgacaactgtggaaatcgtaacgatgtctcaccaggcactgggtgacgtcgctggtcgcggcaatgaaaagaagcctagctctgtgcgcgctttgagtatcgtgctcccaatcgtcctcctcgtgttcctctgcttaggggtgtttctgctgtggaagaactggagattgaagaacattaactccatcaacttcgacaatccggtgtaccagaagactactgaagatgaggtgcatatctgccataatcaagatgggtatagctacccttctagacagatggtcagccttgaagatgacgtagct

SEQ ID NO: 16205 - DNA, 2580 bp, synthetic construct
  misc_feature 1..2580: note = source = /note="Description of Artificial Sequence: Synthetic coding sequence"
  source 1..2580: mol_type = other DNA
atgggaccctggggatggaaactgcggtggaccgtggctctgctgctggcggccgccggcactgcagtcggtgatcgctgcgaacggaatgagtttcagtgtcaggatggcaaatgtattagctacaagtgggtgtgcgacggaagtgctgagtgccaggatggcagtgacgaaagccaggaaacctgcttaagtgtgacatgtaagtccggagatttctcatgcggcggacgtgttaataggtgtattccccagttctggaggtgtgatggtcaggtggactgtgacaatggaagtgatgaacaaggctgtccgccaaagacttgttcacaggatgagtttagatgtcatgatggaaagtgtatctcacgccagttcgtctgcgactctgaccgggactgtttagacgggtctgacgaagctagctgtcccgtgctgacatgcgggcccgcctcgttccaatgtaattcttctacgtgtattccgcagttgtgggcttgcgacaacgatcccgattgcgaagatggcagcgatgagtggcctcagcggtgtcgggggctgtatgtgttccagggcgactcatccccatgctcggctttcgagtttcattgcttgtcaggagaatgcatccatagctcttggcggtgtgacggtggtcccgattgcaaagataagtctgacgaggagaattgcgctgttgcaacttgccgccccgacgaattccagtgtagtgacggtaattgcatccacggctcccgccagtgcgaccgggagtatgactgtaaggacatgtccgatgaggtgggctgtgtcaacgttacactgtgtgaaggccccaacaaattcaagtgccattcgggggagtgtatcaccctggacaaagtgtgcaatatggctcgcgattgtcgggactggagcgatgaacctatcaaggagtgtggcaccgcagagtgcttggacaacaacgggggatgtagtcacgtgtgcaatgatctgaaaattggctatgagtgtttgtgcccagacggattccagttggttgcacaacgacgctgcgaagatatcgatgaatgccaggatcctgacacatgctctcagttgtgcgttaacctcgagggcgggtacaaatgccagtgtgaagaaggattccagctagatccacacaccaaagcctgcaaagccgtgggctctatcgcatatctgttttttacgaaccgccacgaagttcgcaagatgacgctagacaggtcagaatatacaagccttatcccaaacctgcgcaacgtcgttgctctggacaccgaagtggcttctaatcgaatttattggtctgatctctcccaaaggatgatttgcagcactcagcttgacagagcacatggagtgagctcttacgataccgtaattagcagagatatccaggcccctgacggtctcgccgttgactggatacatagcaatatctactggacagacagcgtgctggggactgtatccgttgcggacaccaagggcgtgaagagaaaaacgctgttccgagaaaacggttcaaagcccagggcaatcgttgtagaccctgtacacggtttcatgtactggacagactggggaacccccgcaaagatcaagaaagggggtctcaatggcgtggatatctactccctggtcacagaaaatatccaatggccaaatggcattacgctggacttgctgtcaggacgtctctattgggtcgattctaagctgcattctatttcgtctatagacgtgaacggaggtaacaggaagacaattttggaggacgagaagcgcctggcccacccgttctccctcgctgttttcgaggataaggttttctggaccgatattatcaatgaggcaattttctccgcaaacaggctgacaggctctgatgtgaacctgctggccgaaaacttattgtcccccgaggacatggtgctttttcacaacttgacccaacccagaggggtgaactggtgtgaacgcacgaccctgtctaacggaggatgccagtacttgtgcctgcccgcgccccagataaacccccattcgcccaaattcacttgtgcgtgtcccgatggtatgttacttgcacgcgatatgcgcagttgcctgacggaggcagaggccgccgtggccactcaggagacaagcacggtgcgattgaaggtttcctctacggctgtgcggacgcaacacacaacaacacgacctgttccagacaccagtcgcctgccgggtgctacaccgggactcaccactgtggagatcgtaaccatgtcacatcaggctctcggcgacgtggcaggacgtggcaatgagaagaagccatcctccgtgagagccttaagtattgtgctgcccatagtgctgctcgtattcctgtgccttggggtctttctgttgtggaagaactggcggttaaagaacatcaacagcatcaactttgataacccagtgtaccagaaaacaaccgaggacgaggtgcacatttgccataatcaggatgggtactcatacccctcgcggcagatggtgtccctggaagacgatgtggca

SEQ ID NO: 16206 - DNA, 2580 bp, synthetic construct
  misc_feature 1..2580: note = source = /note="Description of Artificial Sequence: Synthetic coding sequence"
  source 1..2580: mol_type = other DNA
atgggtccgtggggatggaagctccgctggacggtggccctcctgttggccgcagccgggacggctgtcggagatcgatgcgagcggaatgagttccaatgccaggatgggaagtgcatctcctacaagtgggtgtgcgacggaagcgccgaatgccaagacggatcggatgagtcccaagaaacctgtctgtcggtgacgtgcaaatcaggagacttttcctgtggaggacgggtgaaccggtgtatccctcaattctggcggtgcgacggccaggtggactgtgacaacggatccgacgaacaggggtgcccgccgaaaacctgcagccaggacgagtttcgctgccacgatggcaaatgcatctcgcggcagttcgtttgcgatagcgatcgcgattgtctcgacgggagcgatgaagccagctgcccagtcctgacttgtggcccggcgagcttccagtgcaactcctccacttgcatcccgcaactctgggcgtgtgataacgacccggactgcgaggatggatcggacgagtggcctcagcggtgcaggggactgtacgtgttccagggcgattcatcgccctgctcggccttcgaattccactgcctgtcaggcgagtgcatccactcgtcatggcgctgcgatggcggaccagactgcaaagacaagtcggacgaggagaattgcgcagtggcgacttgccgccctgacgaattccaatgctcggacggaaactgcattcacggaagccggcaatgcgaccgcgaatatgattgcaaggacatgtcggatgaggtcggctgcgttaacgtgaccctttgcgaagggcctaacaagtttaagtgccattcgggagaatgtattaccctggacaaggtgtgcaatatggcccgagactgccgggactggtccgatgaaccgatcaaggaatgtggaaccgctgaatgccttgacaacaacggtgggtgctcacacgtgtgcaatgacctgaagatcggctacgaatgcctctgcccggacggattccaactcgtggcacaacgccgatgcgaagatattgatgaatgtcaagaccctgacacttgctcccagctctgtgtgaatctcgagggaggctataagtgccaatgtgaagaaggattccagctcgatccgcacactaaggcttgcaaggccgtgggttcgatcgcctacctgtttttcacgaataggcatgaagtccggaagatgactctggaccgcagcgaatatacctccctgataccgaacttgcggaatgtggtggctttggataccgaagtggcatctaatcgaatttactggtccgatttgagccagcgcatgatttgctccacccaactggatagggcgcatggagtgtcctcgtacgacactgtgatctcacgcgacattcaggccccagacggacttgctgtggactggatccactcgaacatctactggaccgattccgtgctgggaacggtcagcgtggccgatacgaaaggagtcaagcgtaagaccctcttcagagagaatggatcaaaaccgcgggcgatcgtggtggatccggtacacggatttatgtattggactgattggggcactccggccaaaatcaagaagggaggattgaacggagtggacatctactccctggtgaccgaaaacatccagtggcctaacggaataaccctcgatctgctgagcggcagactgtactgggtcgactcgaagctgcactcgatcagctcgatcgatgtgaatgggggaaaccggaaaactatccttgaggatgagaaaagactggcgcacccgttttcgctggccgtctttgaagataaggtgttctggactgacatcattaatgaggcaatcttctcagcaaaccgcctcaccggcagcgacgtgaacctgctcgccgagaatctcctttcgccggaagatatggtgttgtttcataacctgacccaaccccgcggcgtgaattggtgcgagcgcaccaccttgtcgaatggaggttgtcaatacctgtgcctcccggctcctcaaatcaacccacattctcctaaattcacctgcgcgtgcccggacgggatgctccttgccagagacatgagatcatgcttgacggaggccgaggccgccgtcgcgactcaggagactagcactgtcagactgaaggtgtcgagcactgccgttcggactcagcacacgaccacccgccctgtcccagacacctcccggctgcccggagcgaccccgggcctcaccacggtggagatcgttactatgtcccaccaggcgctcggagacgtggcaggccggggcaacgagaagaagccatccagcgtgcgcgctctctctatcgtgctgccgatcgtgctgctggtgttcctgtgcttgggcgtgttcctgctgtggaagaattggcggctgaagaacatcaattcaattaacttcgacaatcctgtgtaccagaaaaccactgaagatgaagtgcatatttgccacaaccaggatggctactcatacccaagcaggcagatggtgtccctggaagatgatgtggct

SEQ ID NO: 16207 - DNA, 2580 bp, synthetic construct
  misc_feature 1..2580: note = source = /note="Description of Artificial Sequence: Synthetic coding sequence"
  source 1..2580: mol_type = other DNA
atggggccctggggatggaagctgcgatggactgttgccctgttgctggccgctgccggaacagctgtaggcgatcgctgtgagcggaacgagtttcagtgtcaagacggtaagtgcatcagttataagtgggtatgtgacggatctgccgagtgtcaggacggatccgacgagtcgcaggaaacatgtttatctgtgacgtgcaaatccggagacttttcctgcggcggtcgggttaatcggtgcattccacaattctggcgctgtgacggtcaggtggactgcgataacggaagcgacgaacaaggctgtccccctaaaacctgcagccaggacgaattcaggtgtcacgatggcaagtgcatctcccggcaattcgtgtgcgattcagatcgagactgtctcgacggctcggacgaggcatcttgtccagtgctcacctgcggtccagctagctttcagtgcaattcctcgacttgtatccctcagctctgggcctgcgataacgacccggactgcgaggacggtagtgatgaatggccccagcgttgtcgaggtctatacgtgttccagggcgacagcagcccgtgcagcgccttcgaattccactgcctctccggggagtgcatccactcctcgtggaggtgcgatggggggccagattgcaaagacaagtctgacgaagagaattgcgctgtggctacctgccgcccagacgaatttcagtgtagtgacggaaattgtatccacggcagtcgccagtgtgatcgcgagtacgactgtaaggatatgagcgacgaggtcggctgcgtcaatgtgactctttgtgagggcccaaataagtttaagtgccattcgggagagtgcatcactctcgataaggtctgcaatatggctagagattgccgggactggagcgacgagccgattaaagaatgcggtacagctgagtgccttgataataacggcggttgtagccacgtatgtaacgacctcaagatcggctatgagtgcctgtgccctgacgggtttcagcttgtcgcacaaaggcggtgcgaagacatcgacgagtgccaggacccagatacttgctctcagctgtgcgtgaatctcgagggtggctacaaatgccagtgtgaagaggggtttcagctcgatcctcacactaaagcatgtaaggccgttgggtcgattgcttatttgttttttactaacaggcatgaagtgcgaaagatgactctcgatcgctccgagtatacttccctgatccccaacttgcgcaacgtggtggccctggatacagaggtcgcctctaatcggatctactggtcggatctctctcagagaatgatatgcagcacccaactcgaccgcgctcacggcgtgtcctcctacgatacagtgatatcccgtgatatccaggcgcccgatggtcttgctgttgactggattcattccaatatctactggaccgacagcgttctcggcactgtgagcgtggccgacaccaaaggcgtgaaacgaaagacgttatttcgcgagaacggtagcaagccaagggccatcgtcgttgatcctgtgcatggcttcatgtattggacggattggggcaccccagccaagattaagaaaggagggctgaacggtgtcgatatctacagccttgtcaccgagaacattcagtggcctaatggcatcacacttgatctcctgtcaggcaggctgtactgggtggactctaagcttcattcaattagtagtattgatgtgaacgggggtaacagaaagacgatccttgaggacgagaaaagactggcacacccttttagtttagccgtgttcgaagataaagtcttctggactgatattatcaacgaggcaatctttagcgccaatcgcctcaccggctctgatgtgaacctcctcgccgaaaacctgttaagtcccgaggacatggtgctgttccacaatttgacacagccacgcggagtgaactggtgcgaacgtactaccctcagcaatggggggtgccagtacctatgcttgcccgctccgcaaataaaccctcattcgcctaagttcacctgtgcctgccccgatggcatgctgctggccagggacatgaggagttgtctgaccgaagcggaggctgccgtagccactcaggaaacctccactgtgcggctaaaagtctcttcaacggctgtgagaacccagcacacaaccacaagacccgttcctgacacatcccgcctgccgggtgctaccccgggattaaccactgtggaaatcgtgaccatgtctcaccaggccttgggagacgtggccggtcggggcaacgaaaaaaagccatcttcagtccgcgccctcagtattgttctgcccatcgtgctcttggtgttcctctgcttgggcgtcttcctgctctggaaaaactggagactgaagaatattaactccataaactttgacaatcccgtttaccagaaaacaactgaggacgaggtgcacatttgtcacaaccaagacggctacagctacccctcacgccagatggtgtcactggaggatgatgtagca

SEQ ID NO: 16208 - DNA, 2580 bp, synthetic construct
  misc_feature 1..2580: note = source = /note="Description of Artificial Sequence: Synthetic coding sequence"
  source 1..2580: mol_type = other DNA
atgggcccgtggggctggaaacttcgatggactgtggcattgctgctcgctgcagcaggtactgctgtgggtgatcgctgcgaacggaacgaatttcagtgtcaagatggcaagtgcatttcatacaaatgggtctgtgacggttcggcagaatgccaagacggatccgacgaatcccaggaaacctgcctctcagtgacctgtaagtcaggcgacttctcctgcggagggcgcgtcaatagatgcattcctcaattttggcggtgtgatggacaggtggactgtgacaacgggtccgatgaacaaggttgtccccctaagacttgttcgcaggacgaatttcgctgtcacgatgggaagtgcatatcaaggcaatttgtctgtgattcggatagagattgtctcgacggctcggacgaggcatcgtgccctgtgctcacttgtggtcctgcatcgttccagtgtaactcctcgacctgtattccacagctttgggcatgtgataacgatccagattgtgaagatggctcagatgaatggccgcagaggtgtcgcggcctctacgtttttcagggtgactcgagcccgtgttcggcgtttgagtttcattgcctgagcggggaatgtatccactcgtcttggaggtgcgatggagggcctgattgcaaagataaatcagacgaagaaaactgtgcagtggctacttgcagaccagatgagttccagtgttcagatggtaactgcattcacggctcgaggcagtgtgatagggagtacgactgtaaggatatgagcgatgaggtcgggtgtgttaacgtgactctctgcgaaggaccaaacaagtttaagtgccactctggtgaatgcatcaccttggataaggtgtgcaacatggccagagattgtcgggattggtccgatgagccaattaaggaatgtggaactgccgagtgtctggacaacaatggaggatgttcgcatgtgtgtaacgacctcaagatcgggtacgagtgcctgtgccccgatggttttcagcttgtggcacaacgcagatgtgaagatatcgatgaatgtcaggaccctgatacctgttcacaactttgtgtcaatctcgagggaggctacaagtgtcaatgcgaggagggtttccagcttgaccctcacactaaggcatgtaaggcagtcggaagcattgcatacttgttctttactaaccgacacgaggttaggaaaatgactctggatcgatcagaatatactagccttatccccaacctcaggaacgtggtggcacttgatactgaagtggcatcgaatagaatttactggtcagatctcagccaacggatgatatgttcgacccagctggatagagcccacggcgtgtcgtcgtacgacaccgtgatcagcagagacatccaagcccccgacggactcgcagtggactggattcatagcaacatatactggactgacagcgtcctggggaccgtgtccgtggcagatactaagggggtcaagcggaaaactctcttccgggaaaacggcagcaagccgagggccattgtggtggatcctgtgcatggattcatgtactggactgattggggtacccccgctaaaatcaagaaaggaggacttaatggtgtggacatttactccctggtgaccgaaaacattcagtggcctaacggaattactctcgatcttctctccggacgtctttactgggtggattcgaagttgcattcgattagctccattgatgtgaatggtggaaaccgtaagaccatactggaggacgaaaagcgccttgcacatcccttctcactggccgtatttgaagataaggtgttttggaccgacattatcaatgaagcgattttctcggcgaaccgactgaccgggagcgatgtcaaccttctcgcagagaacctgctgtcgcccgaggacatggtgctgtttcacaaccttacccagccccggggtgttaactggtgcgagcgcactaccctttcgaatggcggctgccaatacctgtgtctccctgctcctcaaatcaaccctcacagccccaagtttacctgtgcgtgtccagacggtatgctgctcgcgcgtgatatgcgcagctgcctgactgaagccgaagccgcagtcgccactcaagaaacctctaccgtgagactcaaggtgtccagcactgcggtcaggacccaacacaccactactcgaccagtccctgatacgagccggcttcccggagccaccccagggttgacgaccgtcgagatcgtcaccatgagccaccaagccctgggtgatgtggccggcagggggaatgaaaagaagccctccagcgtgagagcactgtcgattgtcctgccaattgtgcttttggtgtttttgtgcctcggtgtgttcctgctttggaagaactggaggttgaagaatatcaacagcatcaattttgataatccagtgtaccaaaagacgaccgaagatgaggtgcatatatgccacaaccaagatggatactcatacccttcaagacagatggtgtcgctcgaagatgacgtggca

SEQ ID NO: 16209 - DNA, 2580 bp, synthetic construct
  misc_feature 1..2580: note = source = /note="Description of Artificial Sequence: Synthetic coding sequence"
  source 1..2580: mol_type = other DNA
atgggtccttggggatggaagttgagatggacagtagccctccttcttgccgccgccggtaccgctgttggagacaggtgcgaacgcaatgaatttcaatgtcaggacgggaaatgtatttcctataaatgggtgtgtgacggcagcgccgagtgtcaggacggttcagatgaatcacaggagacctgtttgtctgttacctgtaagagcggtgacttctcatgcggtggcagggtgaatcgatgtataccccagttctggaggtgtgatggccaggtggattgcgacaatggcagtgatgaacagggctgtcccccaaaaacctgctcccaggacgaatttaggtgccatgacggcaagtgcatctcccgccagtttgtgtgcgattctgaccgggactgtctggatggctctgatgaggctagctgccccgtgttgacttgtgggcccgcctcattccaatgcaatagcagcacatgcattccacagctgtgggcctgtgacaacgacccagactgtgaggacggttccgacgagtggccccaacgatgccgcggcctctatgtgtttcagggtgacagttcaccatgtagcgcatttgaatttcactgcttgagcggcgaatgtatacactcttcttggagatgtgatggcgggccagactgtaaggataagagcgatgaggaaaactgcgcagtggccacctgtaggccagatgagttccagtgttccgatgggaattgcatccacggctccaggcagtgtgacagagagtatgattgcaaggacatgtcagatgaggtggggtgcgttaatgtgacactctgcgaagggccaaacaaatttaagtgtcacagtggagaatgtatcacactggataaggtgtgcaacatggctcgggattgcagagactggtctgacgagcccattaaggagtgcggcaccgcggaatgcctggacaacaacggcggttgtagccacgtgtgtaatgacctgaaaataggttacgagtgcctgtgccctgatggatttcaactggtcgcccagcgcagatgtgaagacatcgacgagtgccaggatcctgatacctgtagccagctgtgtgtgaatctggagggcggctataagtgccagtgcgaagagggattccagctcgatcctcacacaaaagcttgcaaggcggtcggatccattgcttacctgtttttcactaatagacacgaagtgaggaagatgacattggataggtccgaatatacttctttgatccctaatctgcgcaacgttgttgccctggacaccgaagtggcatctaaccgcatctactggagtgatctgagtcagcggatgatctgcagcactcagctggatcgagctcacggtgtgtccagctatgacactgtcatatctcgagacatacaagccccggacggcttggctgtcgactggattcatagcaacatctattggaccgacagcgtgctggggacagtgtcagttgcagatactaaaggggtgaaacgcaagacacttttccgcgaaaatggaagcaagccgcgcgccattgtggttgatcctgttcatggattcatgtattggactgactggggtactcctgctaagatcaagaaaggaggcctgaatggtgtagacatctacagtctcgtgaccgagaacatccagtggcccaatgggatcacactggaccttttgtctggccggctttattgggtggattcaaagctccacagtatatcctctattgatgtaaacggaggaaatcggaagacaatcctcgaggacgagaaacggctcgcccatcctttcagccttgcagtgttcgaggacaaagtattctggactgacattattaatgaagcgatcttttccgcgaatcgacttactgggtctgacgtgaaccttcttgccgagaatctgttgtcccccgaggacatggtgcttttccacaacctgacccaaccgcggggggtcaactggtgcgaacggacgacactgtcaaacgggggctgccagtacctttgtctcccagcccctcaaataaaccctcactctcccaagtttacttgtgcgtgtcccgacggtatgctcctggcaagggacatgcggtcctgcctgacagaggctgaagccgccgtggctacccaggaaactagcactgtgcgcttgaaagtcagcagcaccgccgttcgcactcagcacactacaactcgccctgtgcctgatacctccaggctcccgggcgcaacaccgggtctgactaccgttgagatagtgactatgtctcaccaggccctgggcgatgtagccgggcgaggcaacgaaaaaaaaccctcctctgtcagggccctgtctatcgttttgccaattgttcttctggtgttcctgtgtctgggagtgttcctgctctggaaaaactggcgactgaaaaatatcaactctatcaacttcgataaccccgtgtatcagaaaaccacggaggatgaggtgcacatctgccataatcaagatggatactcatatcccagcaggcaaatggtgtcccttgaagacgatgttgcc

SEQ ID NO: 16210 - DNA, 2580 bp, synthetic construct
  misc_feature 1..2580: note = source = /note="Description of Artificial Sequence: Synthetic coding sequence"
  source 1..2580: mol_type = other DNA
atgggtccatggggctggaagctgcgttggaccgttgcactcctcctggcggcggcaggcaccgcggtgggtgaccggtgcgagcggaacgaatttcaatgtcaagatggcaagtgcatttcatacaaatgggtgtgtgatggatcggcagagtgccaggatggatcagacgagtcgcaagaaacttgtctttcagtcacctgcaaaagcggagatttcagctgtgggggcagggtcaatagatgcattccccagttttggagatgtgatggacaagtggactgcgacaatggatcggatgagcaagggtgtcctccaaagacttgctcccaagacgaatttaggtgccatgatggaaagtgtatttccaggcaatttgtgtgtgatagcgatcgcgactgccttgacgggtcggacgaagcatcatgtccagtgcttacttgtggacctgcctcgtttcaatgcaactcctcaacttgcattccgcagttgtgggcgtgcgacaatgatcccgactgcgaggacggaagcgacgaatggccacaaaggtgtcgagggctctacgtgttccagggggactcatcaccttgctccgcattcgaatttcattgtctttccggagagtgcattcactcgagctggaggtgtgacggaggacctgattgtaaggacaagtcggatgaggagaactgtgccgtggccacctgccgacctgatgagtttcaatgctccgatgggaactgtatccatggatcgagacagtgcgaccgcgaatacgattgcaaggatatgagcgacgaagtgggttgtgtcaacgtgactctgtgtgaaggacctaacaagttcaaatgccattcgggagaatgcattactctggataaggtgtgtaatatggcaagagactgtcgtgactggtccgatgagccaattaaggagtgtggtactgcagaatgccttgacaataacggagggtgctcacatgtgtgcaatgacctcaaaatcggttatgaatgcttgtgcccagacggatttcaactggtcgcccagagaagatgcgaggatatcgacgaatgtcaggatcccgacacttgcagccaattgtgtgtcaacctcgagggagggtacaagtgtcaatgtgaggaaggattccaactggatccacataccaaggcttgtaaggccgttgggtcaattgcatacctctttttcactaacagacacgaggtcagaaagatgacccttgatcgctcggagtacacctctcttattcctaatctgcgtaatgtcgtcgcacttgatacggaggtcgcctcgaaccggatctactggtcagatctctcgcaaagaatgatttgttccactcagctggatcgcgcacatggagtgtcgtcttacgataccgtgatttctcgcgacattcaggcaccagacggactcgcagtcgattggattcattccaatatctactggaccgattcagtcctgggaactgtctccgtggcagacactaaaggagtcaagagaaagaccctctttagagaaaatggctccaagcctcgggccattgtcgtggatcccgtgcatggatttatgtactggaccgactggggcaccccggcaaaaatcaaaaaaggtggccttaacggcgtggacatttactccctggttactgaaaacattcaatggccaaacggcattacgctcgaccttttgtcggggcgtctttactgggtggatagcaagctccattccatttcctccattgatgtcaatggcggaaacagaaagactattttggaggatgagaaacgactggcacatccattttcactggctgtgtttgaggacaaggtgttctggactgatatcatcaatgaagcaatattcagcgcaaacaggctgaccggaagcgacgtcaaccttctcgccgaaaaccttctttcacctgaagatatggtgctgtttcataatcttacccaaccgagaggtgtgaactggtgtgaacgcactactctcagcaatggaggttgccagtacctctgccttcctgcaccgcagataaaccctcattcccctaagtttacttgcgcgtgcccagatggaatgcttcttgcccgcgatatgagatcatgtctcaccgaagccgaggcggcagtggccacccaggaaactagcactgtgcggcttaaggtgtccagcaccgcagtgcggacgcaacataccaccactcgccccgtgcccgatacctccagactccccggcgccaccccagggcttaccaccgtggaaatcgtcaccatgtcgcatcaggcacttggcgatgtggcaggtaggggaaatgagaagaaaccttcgtcggtgagagcccttagcatcgtgcttccaattgtcctcctcgtgtttttgtgtttgggggtgtttcttctgtggaaaaactggcggctgaaaaacatcaattccattaacttcgataatcccgtgtaccagaaaaccaccgaagatgaggtgcacatttgtcacaaccaagacggatacagctacccatccagacaaatggtgtcgctggaagatgacgtcgca

SEQ ID NO: 16211 - DNA, 2580 bp, synthetic construct
  misc_feature 1..2580: note = source = /note="Description of Artificial Sequence: Synthetic coding sequence"
  source 1..2580: mol_type = other DNA
atggggccatggggatggaagctgagatggactgtggccctcctgctggcggcggcaggtacggcggtgggagatcgatgcgagagaaatgaattccagtgccaagacggaaagtgcatatcttacaagtgggtgtgtgatgggtcggcggaatgccaggacgggtcagacgaaagccaggagacttgtctgtctgtcacttgcaagagcggggacttctcgtgtggcggccgcgtgaatcgctgcatccctcagttttggcgctgcgacggacaggtggactgtgataacggaagcgacgaacaaggttgcccgccgaaaacgtgctcgcaagatgagtttcggtgtcatgatggtaagtgcatttcacgccagttcgtctgcgattcagatagagattgcctggacggatcggatgaagcctcctgcccagtgctgacttgtggaccggcatccttccagtgtaatagctcaacctgtatccctcaactgtgggcatgtgataatgatccagattgcgaggacggctccgacgaatggcctcagagatgccgcggactgtacgtgttccagggagatagcagcccctgctccgcattcgaatttcactgccttagcggcgagtgtatccactcgtcctggagatgcgatggaggaccggactgcaaggataaatccgacgaagaaaactgcgcagtagcgacttgtagacccgacgaattccaatgctcagacggaaactgcatccacggctcgagacagtgcgaccgcgagtacgactgcaaagatatgtcagacgaggtgggatgcgtgaatgtgactctctgcgaaggaccgaataagttcaagtgccactcaggagagtgcatcacccttgataaagtctgcaacatggcccgggactgccgggattggtcagacgaaccaatcaaggagtgcgggactgccgagtgcctggataacaatggaggatgctcgcacgtgtgcaacgacttgaagatcggatacgaatgcctctgccccgacggcttccaacttgtggcacagcgccgatgtgaggacattgacgaatgtcaagatcccgatacctgctcgcaactgtgcgtcaacctcgaaggtggctacaaatgccaatgtgaagagggattccagctcgatccgcataccaaggcctgtaaggccgtgggaagcatcgcatacctgtttttcacgaaccgccacgaagtgcggaaaatgactctcgatcgctcggaatacacttccttgatccctaaccttcggaacgtggtggccctcgacacggaggtggcatccaatcggatctactggtcggacctgtcccaaagaatgatttgctccactcagctggaccgcgcccacggagtgagttcgtacgatacggtgatctcaagagatatccaggccccggacggactcgcggtggactggatccattccaacatctattggaccgattcagtcctgggcacggtgtcagtggccgacactaagggagtcaagagaaaaaccctgttccgcgagaacggttcaaagccgcgagcgatcgtggtggatccggtgcatggcttcatgtactggaccgactggggcaccccggcgaagatcaaaaagggaggcctgaatggtgtcgacatatactccctggtgacggagaacatccagtggccaaacggaattaccctggatctcctttcaggccgcctgtactgggtggactcaaagctccactcgatctcgtcgatcgatgtcaacggaggaaaccgcaaaaccatcctcgaggacgaaaagcgtcttgcgcaccccttctccctggccgttttcgaggataaggtgttctggaccgacatcatcaacgaagctatcttttccgcgaatcgcttgaccgggtcggacgtgaacctcttggccgaaaatctgctgagcccggaagatatggtgttgttccacaatctgactcagccgcgcggcgtgaactggtgtgagagaaccactctgtccaacggagggtgtcagtacctgtgcttgccggctccacagattaacccacactctccgaagttcacttgtgcctgtccggatggaatgctcctggcacgcgacatgcgcagctgcctcaccgaagccgaagcggccgtggcgactcaggagacttcgactgtgagactgaaggtgtcctccaccgcagtgaggacccagcacactactacccgcccggtgccggacacctcgaggctgccaggtgccaccccgggactgaccactgtggagatcgtgactatgtcacaccaggcgctgggtgacgtggcaggccggggcaacgaaaagaaaccatccagcgtgcgcgctctgtcaatcgtgctcccgatcgtcctgttggtgttcctctgtttgggagtgttcctcctgtggaagaattggaggctgaaaaacatcaattccatcaacttcgacaaccctgtctaccaaaaaaccactgaagatgaagtccatatatgccataaccaggacggatactcgtaccctagcagacaaatggtgtccctggaggatgacgtcgca

SEQ ID NO: 16212 - DNA, 2580 bp, synthetic construct
  misc_feature 1..2580: note = source = /note="Description of Artificial Sequence: Synthetic coding sequence"
  source 1..2580: mol_type = other DNA
atgggaccttgggggtggaagctcagatggactgtggcgctgcttttggcagcagcaggaaccgccgtcggtgaccgttgcgagaggaacgagttccagtgccaagatggtaaatgtatcagctacaagtgggtgtgtgatggatccgccgaatgtcaagatggttcggacgaatcccaagagacttgtcttagcgtgacttgtaagtcgggagacttctcgtgtggaggtagggtgaacaggtgcatcccacagttttggcgctgtgatggtcaggtggattgcgacaatggctccgatgaacaagggtgtcccccgaaaacctgttcgcaagatgaatttcgttgtcatgatggaaagtgtatatcgcggcagtttgtgtgtgatagcgaccgcgactgcctggatggctcggacgaagcatcatgcccagtgcttacctgcggaccagcatccttccagtgcaacagctccacctgcattccacaactctgggcctgtgataatgatccagattgtgaagatggttccgatgagtggccacaacgatgccggggcctctacgtgtttcagggtgattcgtcaccctgttcggcatttgaattccattgtcttagcggagaatgtattcactcaagctggcgttgcgatggtggcccagattgcaaggataagtccgatgaggaaaactgtgccgtggcaacttgtagacccgatgaatttcagtgttccgatggaaactgcattcacggtagccgccaatgtgatcgcgaatacgactgcaaagatatgagcgatgaagtcggatgcgtgaatgtcactttgtgcgaaggcccgaacaaattcaagtgtcattcaggcgagtgtataaccctggataaggtgtgcaatatggccagggattgtagggattggtcagatgaacctattaaggaatgtgggaccgcagaatgtcttgacaataacggcgggtgctcccatgtgtgcaatgatcttaagattggctacgaatgtctttgtcccgatggttttcagctcgtcgcacagaggcgctgtgaggacattgacgaatgtcaggaccctgacacttgttcgcaactttgtgtaaacctggaaggtggatataagtgccagtgtgaagaaggttttcaactggatccacatactaaagcgtgcaaggccgtggggtccatcgcataccttttctttactaacaggcacgaagtcagaaaaatgacgctggatcgctccgaatacacgtcgctgattccaaacctgagaaatgtcgtggccctggatactgaagtcgcatccaatcgcatctactggtccgatctgtctcaaagaatgatttgctcgactcagctggacagagcacatggtgtgtcatcctatgataccgtgatttcgcgcgatattcaggcacctgacggccttgcagtcgattggattcattcaaacatttactggacggactccgtcctcggtaccgtgagcgtggcggatacgaagggtgtgaagcgaaaaacccttttcagagagaacggctcaaagcctcgcgccatcgtggtggatccagtccatggcttcatgtactggaccgactgggggaccccagcaaagatcaagaaaggagggctgaacggtgtggacatctactccctcgtcaccgagaatatccagtggccaaatggtatcaccctggatcttctgtccggccggctgtactgggtggattcgaagttgcattccattagctcgatcgacgtgaacggcggaaacagaaagaccattttggaagatgaaaagagacttgcccacccttttagtctggctgtgtttgaagataaggtgttttggactgacattatcaacgaagcgattttctcggcgaatcgtcttaccggatcggatgtgaacctcttggcagagaatctgctgtcgcccgaggatatggtgctgttccataatctgacccagccaagaggcgtcaattggtgtgaaagaacgactctgtcaaacggcggttgtcaatacctttgtctccccgcgcctcaaatcaatcctcattcgccaaagtttacttgcgcatgcccagacggtatgctgctcgctagggatatgaggtcctgccttaccgaagccgaggctgccgtcgccactcaagaaacctcaaccgtgcgtctcaaggtttcctccacggccgtgaggacccaacacactaccactcgcccggtgcctgatacttcgagacttcctggtgcgacccctggacttactaccgtggaaattgtgactatgtcgcaccaagcactgggtgacgtggcggggagaggcaatgaaaagaagccttcctctgtgcgtgcactgtccattgtcctgcctatcgtcctgctggtctttctttgtctgggagtgtttcttctttggaaaaactggcggttgaagaacattaacagcatcaattttgataacccagtgtaccagaaaaccaccgaagatgaggtgcatatctgtcataaccaggatgggtactcgtatccatcccgccagatggtgtcccttgaggatgacgtcgcc

SEQ ID NO: 16213 - DNA, 2580 bp, synthetic construct
  misc_feature 1..2580: note = source = /note="Description of Artificial Sequence: Synthetic coding sequence"
  source 1..2580: mol_type = other DNA
atgggcccttgggggtggaaacttcgttggaccgtggcattgttgctggctgcagctggaaccgcagtcggtgacagatgtgaacgaaatgagtttcagtgccaggatggaaaatgcatatcttataagtgggtatgcgatggttctgccgagtgccaggatggtagcgacgaatctcaggaaacttgtctgagcgtgacctgtaagagcggcgattttagctgtgggggacgagtcaatcgctgcatcccacagttctggaggtgcgacgggcaggtggattgtgataacggctctgacgaacaggggtgccctccgaagacatgctctcaagacgaatttcgctgccacgatggaaagtgcatcagccgacagttcgtgtgtgatagtgacagggactgcctcgacgggagtgatgaagcttcctgtcctgtgctgacatgcggtcctgcgtcatttcagtgtaattcgtcaacttgcatccctcagctttgggcttgtgataacgacccggactgcgaggacggcagtgacgagtggccacagaggtgccgtggtttatatgttttccagggagatagtagcccgtgctccgcttttgagttccactgcctttccggagaatgcattcactcctcttggcgctgtgatggcggtcccgattgcaaggacaaatctgacgaggagaactgcgctgtagctacctgccggccggatgaatttcagtgttctgatggaaactgtatccacggcagtcgccaatgcgatagagagtacgactgtaaggatatgtctgatgaggtggggtgcgttaacgtaactctgtgcgagggccctaacaagtttaaatgccattctggggagtgtatcacgttagataaggtgtgtaacatggccagagattgtcgtgactggtccgacgagcccatcaaggaatgcggaaccgcagaatgcctagacaataacggaggctgctcgcacgtgtgtaacgaccttaaaatcgggtacgagtgcctatgcccagacggatttcagctcgtagcccagaggcgttgtgaggatattgacgagtgtcaggatcccgatacctgcagccagctgtgtgtcaatcttgaagggggctataagtgtcagtgtgaagaaggattccagttggatccacacacaaaggcttgcaaggctgtgggttcaatcgcttacctgttttttaccaaccgccacgaggtgcgcaagatgacactcgaccggtctgagtacaccagcttaatcccaaatttgaggaatgttgtcgcactagacaccgaggtagccagtaacagaatttactggtcggacctgagtcagaggatgatctgtagcacacagctagacagggctcacggagtgtcttcttatgataccgtgatttctagagacatccaggcccctgatggcctcgccgttgattggatacactccaatatctattggacagactccgtccttggcactgtgtcagtagcagacaccaagggcgtcaagaggaagactctgttcagggagaacggctctaagcctcgggcaattgtggtggaccctgttcatgggttcatgtactggacggattggggaacgcctgccaagattaaaaaaggcggtctcaatggggtggatatttattccctcgtgacagagaatattcaatggcccaacgggatcacactggacctactatctggacgtttgtactgggtggattccaagctccacagtatttcatctatcgacgttaatggcggaaacagaaagacaattctcgaggacgagaaaaggctcgcccatccttttagtctggccgttttcgaggacaaagtcttctggactgatatcatcaatgaagccatcttctccgccaataggctgactgggtccgacgtaaacttactcgcggaaaatctgctaagtcctgaggatatggtgctgttccataatctcactcagcctagaggggtaaattggtgtgagcgaaccacactaagtaacggcggctgccagtacctctgtctgcccgccccacaaatcaaccctcacagtcccaaattcacatgtgcatgtcccgatgggatgctgctcgcacgggacatgcgatcttgcctgacagaagccgaggcagcggtggccacacaggagacgtccaccgtccgactgaaggtctccagtactgccgtacgcacacagcacacaaccacaaggccagttccggatacctctagactgccaggcgccactcctggccttaccaccgtggaaatcgtgactatgtcacatcaggcactcggcgacgtcgcaggtcggggaaatgagaaaaagccatcatctgtccgagctcttagcattgtcctgccgatcgtacttcttgtgttcctatgcctgggcgttttcctcctgtggaagaactggaggctgaagaacataaatagcattaatttcgataacccggtgtatcagaagaccaccgaggatgaggtgcatatctgtcataaccaagatggctacagctacccttcacggcaaatggtgagcttggaggatgacgtcgca

SEQ ID NO: 16214 - DNA, 2580 bp, synthetic construct
  misc_feature 1..2580: note = source = /note="Description of Artificial Sequence: Synthetic coding sequence"
  source 1..2580: mol_type = other DNA
atggggccctggggatggaagctccgttggacagtcgccttgcttcttgcggccgccggtactgcagttggggaccgatgcgagcgcaacgagtttcaatgccaggatgggaagtgcatcagctacaaatgggtgtgcgatggcagcgctgaatgtcaggatggttctgacgagtcgcaggagacctgtctctcagttacgtgcaagtccggagatttctcttgcggcggccgtgttaaccggtgcattccccaattctggcgctgtgacggtcaggtcgattgtgataacggaagcgacgaacaaggttgtcctccgaagacctgctcccaggacgagtttagatgccatgacggcaagtgcatctcgcgccaattcgtctgcgactcggaccgcgattgtctcgacggctccgatgaggccagttgccctgtgctgacctgcggtcccgcctccttccagtgcaacagctccacttgcatcccccagctctgggcgtgcgacaacgatccagattgcgaagacggtagcgatgagtggcctcagcgttgtcgcggcctctacgtattccaaggtgactcgtcgccctgctcggccttcgaattccattgtctgtctggggagtgcattcattcatcgtggaggtgtgacgggggtcctgattgcaaggacaagtcggacgaagaaaactgtgccgtcgctacctgcagacctgacgaatttcagtgcagcgacggcaactgtatccatggctccagacagtgcgacagggaatatgactgtaaggatatgagcgatgaggtgggctgcgtgaacgtgaccctgtgcgaaggtcccaacaagtttaagtgccactccggtgagtgtataaccctcgataaggtttgtaacatggctcgtgactgccgcgactggtcggacgagcccatcaaagaatgcggtaccgcggagtgtctggataacaacggtggttgctcccacgtctgtaacgaccttaagattggttacgagtgcctctgtccagatggattccagctagtggcccagaggagatgtgaagacattgatgaatgccaggaccccgatacctgcagccaactttgtgtcaacctggagggtggctacaagtgtcagtgcgaggaaggcttccagttagaccctcacaccaaggcctgtaaagcggtgggttccattgcatacctgttcttcaccaacagacacgaagtgcggaaaatgaccttggatcggagtgaatacacgtctctcatcccgaacctgcgcaacgtggtcgccctcgacaccgaggtcgcctctaaccgcatctactggagtgacttgtcgcagaggatgatctgctcaactcagctggatagagcccatggtgtgagctcgtatgacacggttataagccgcgacattcaggctcctgatgggttggccgtcgactggatccactctaatatttactggaccgattccgtactcggaacggttagtgttgctgacaccaagggagtgaagaggaagaccttgttccgtgaaaacggcagcaagccgcgcgctatcgtggtggaccctgtccatggcttcatgtattggacggactggggtacccccgccaagattaaaaaaggggggctcaacggtgttgacatttactcattggtcaccgagaacattcaatggcccaatggtattaccttagacctcttgtccggtcgcctgtactgggtcgactctaagctgcatagcatctccagcatcgacgtcaacggaggtaaccgcaagactatcttggaagatgagaagcgcttggcgcatccgttttccctggctgtgttcgaggacaaggtcttttggactgatatcatcaacgaggctatctttagcgccaaccggctgacgggctctgatgttaacctcctcgccgagaatctgctctcccccgaggacatggtcctgttccataacctgactcaacccaggggtgtcaactggtgcgagaggaccacgttgtccaacggaggctgccagtacctttgcctgcctgcccctcaaattaacccgcacagccccaagtttacctgtgcctgtccagacggcatgctcctggctcgggatatgcgctcgtgtctgaccgaggctgaagctgccgtggccacccaggagacctcgaccgtgcgtctgaaggtgtcgtcgacggccgtgcggacccagcataccaccacgaggccggttccagacacctccagattgccgggtgctacccctggtttgacgaccgtcgagatcgtaaccatgtcgcaccaggccctcggtgatgtagctggcagaggtaacgagaagaaaccttcgtctgttagagccctttcgattgtcctccctattgtgttgctcgtttttctgtgccttggagtattcctcttgtggaaaaactggcgtctcaagaacatcaacagtatcaattttgacaaccctgtctaccaaaaaactaccgaagacgaggtccacatctgccacaaccaggacggatatagctacccctcccgtcagatggtctcccttgaggacgacgtcgct

SEQ ID NO: 16215 - DNA, 2580 bp, synthetic construct
  misc_feature 1..2580: note = source = /note="Description of Artificial Sequence: Synthetic coding sequence"
  source 1..2580: mol_type = other DNA
atgggtccctggggctggaagctccggtggactgtggccctgctcttggcagccgcgggaaccgctgtgggggatagatgtgaaagaaatgagtttcaatgtcaggatggcaagtgtatcagctacaaatgggtatgtgacgggtccgcagagtgtcaagatggcagcgatgagtcccaggaaacctgtctttccgtgacttgcaaatccggagacttttcgtgtgggggacgtgtgaatcgctgtattccacaattttggagatgcgatggccaggtggactgtgataatggttcggacgagcaaggttgccctcccaagacctgctcgcaagacgaatttagatgccacgatggaaagtgtatatcaaggcaattcgtctgcgattcggaccgcgactgcctcgatggttcagacgaagcctcgtgtccagtcttgacttgcggccccgcgtcctttcagtgtaactcgtcgacgtgcattcctcagttgtgggcctgtgataacgaccccgactgtgaggacggctcagacgagtggccccaacgttgcagagggctttacgtgttccagggtgattcgtctccatgttcggcatttgagttccactgcttgtccggtgagtgtatacattcaagttggcgctgtgatggaggtccggattgtaaagataagtccgatgaggaaaattgcgcagtagctacctgtagacctgacgaatttcagtgcagcgatgggaattgcattcacggatcgagacaatgcgatagagagtacgattgtaaagacatgtcggacgaagtcgggtgtgtgaacgtcaccctgtgtgagggtccgaataagttcaaatgtcattccggcgaatgcatcactctggataaagtgtgcaacatggcaagagattgtcgggattggtcagacgagcctattaaggaatgtggcacggcggaatgcctggacaacaacggaggttgttcccatgtgtgcaacgacctcaagatcggatacgaatgcctgtgccctgacggtttccaactcgtggcacaaaggcgttgtgaagatattgacgagtgccaggatcctgatacgtgtagccagctttgtgtgaatctcgaaggcggatacaagtgccaatgcgaagaggggtttcaacttgatccccacactaaagcatgtaaagcggttgggtcgatcgcatacctcttctttactaacaggcatgaggtgagaaagatgaccctggatcgcagcgaatacacttcgcttatccctaatctgagaaacgtggttgcgctggataccgaagtcgcgtccaacaggatatactggtccgatctgtcacaaagaatgatttgttccacccagctcgacagagcacatggagtttcctcctacgatactgtcatctcgcgtgacatccaggcacctgatggactggcagtggattggatccacagcaacatttactggaccgattcagtgcttggaacggtgtcagtggccgacaccaagggagtgaagagaaagaccctttttcgtgaaaacggctcgaagcctcgggcgattgtggtcgatcctgttcatggattcatgtactggaccgactgggggacgccagcaaagatcaagaaaggcggcctcaacggtgtggatatctactccctggtgacggaaaacattcaatggccgaacggtatcactcttgacctcttgagcggtcggctttactgggttgactccaagctgcattccatatcttccatcgatgtcaatgggggaaacagaaagaccattctcgaggacgaaaagcgactggcccatccattttcccttgcagtgttcgaagataaagtgttttggactgacattatcaacgaggcaatattctccgccaacaggctgaccgggagcgacgtcaatctgctggcagaaaacctgctctcacctgaagatatggtgctgtttcacaacctcactcagccccggggtgtcaactggtgtgaacggaccaccctgtccaatggtggatgccagtacctgtgccttccggcacctcagattaatcctcattcccctaagtttacctgtgcctgtccggatggtatgctgctggccagggatatgcggtcctgccttactgaagccgaggccgcagtggcgacccaagagacttcaactgtccgccttaaggtgtcatccacggcagtgcgtactcaacataccactacccgcccagtccctgacactagtagattgccaggtgcaacgcccggtctgactactgtggagatcgtgaccatgtcacatcaagccctgggtgatgtggcagggcgcggaaatgaaaagaaaccctcaagcgtcagagctttgtccattgtgctgcctattgtgctcctcgtgtttctttgtctcggtgtctttctgctgtggaagaactggcgcctgaagaacattaactccataaactttgacaaccccgtgtaccaaaagactaccgaggatgaagtgcacatctgtcataatcaggacggatattcctatccttcgagacaaatggtttcccttgaagatgacgtcgca

SEQ ID NO: 16216 - DNA, 2580 bp, synthetic construct
  misc_feature 1..2580: note = source = /note="Description of Artificial Sequence: Synthetic coding sequence"
  source 1..2580: mol_type = other DNA
atgggaccatggggatggaagctgagatggaccgtggctttgctgctggccgcagcgggaactgctgtgggggatcggtgcgagaggaatgaattccaatgtcaggacggaaagtgcatctcgtataagtgggtctgcgacggttccgcggagtgccaagacggatccgacgagtcacaagaaacttgcctttccgtgacctgcaagtctggtgacttcagctgcgggggacgcgtgaacagatgcataccccagttctggcgctgcgatggccaggtggactgtgacaacgggtcggatgagcagggctgcccccctaagacgtgctcgcaagacgagttcagatgtcacgatggaaaatgcatctcaagacaatttgtgtgtgactcggaccgggactgtctggatggttcagatgaggcatcctgtcctgtccttacctgcggtcctgccagcttccagtgcaattcttccacttgcattccccaattgtgggcctgcgataacgatcctgactgcgaagatggcagcgacgagtggccgcaacgctgcagaggattgtatgtattccagggcgacagcagcccgtgctcggctttcgagttccattgcctgtccggggaatgcatccattcctcatggcggtgcgatgggggtccggactgtaaggacaagagcgacgaagaaaattgtgctgtggcaacctgtcggccggatgagtttcagtgctccgacggaaactgtatccacggatcgcgccagtgcgaccgcgaatacgactgtaaagacatgagcgatgaagtgggatgcgtcaacgtcactctctgtgaagggccgaacaagttcaagtgccactccggagaatgcatcacgctggataaagtatgcaatatggctcgagactgcagggattggtcagacgaacccatcaaagagtgcggaaccgcagagtgcctggacaataacggagggtgctcgcatgtgtgcaatgaccttaagatcggttatgagtgcttgtgcccagacggctttcagctggtcgcacagcgccgatgcgaggacattgacgaatgtcaggacccggatacttgctcgcagctctgtgtgaacctcgaggggggttacaaatgtcagtgcgaggaaggttttcagttggacccgcacactaaggcttgcaaggccgttggaagcattgcttacctgttcttcaccaatcggcatgaggtcagaaagatgacgctggaccgctctgagtacacgtcactgatcccaaacctgaggaatgtggtggcgttggacactgaagttgccagcaatcggatctactggtccgatctgtcgcaaagaatgatttgctccacgcaactcgatcgagcacacggagtgtcatcctacgacaccgtgatctcacgcgacatccaggctccagacgggctcgcagtggactggatccattccaacatatactggactgacagcgtcctgggaaccgtctcggtggcggacaccaaaggcgttaagcgcaagaccctgttccgcgagaacggttcgaagcctcgcgccatcgtcgttgatccagtgcacggattcatgtactggacggattggggcacgcccgcgaaaatcaaaaagggcggactgaacggcgtggacatctacagcctggtgaccgagaatattcagtggccgaacggtatcactttggacctcttgtccggcagactgtactgggtcgattcaaaactccactccatctcgtccatcgacgtgaatggaggcaatagaaagaccatcctggaggacgagaagagactggcccaccccttctcactcgcggttttcgaagataaggtcttttggaccgacatcataaatgaagccattttcagcgccaaccgcttgaccggatccgacgttaacctgcttgccgaaaacctgctgagcccggaagatatggtgctgttccacaacctgacccaaccgcgcggggtgaactggtgtgagagaacgactctgtcgaacggcggttgtcagtatttgtgtctgccggcccctcagatcaatcctcactcaccgaagttcacctgtgcatgccccgacggcatgctgcttgcccgcgacatgcggagctgcctgactgaggcagaggcagctgtggcgacccaagaaacttcaacggtgcgcctgaaagtctcaagtaccgcggtccggactcaacacaccactactcggccagtgcctgatacttcgagactcccaggagccaccccgggactcactaccgtggagatcgtgaccatgtcgcatcaggccctcggagatgttgcgggaaggggcaacgagaagaagccgtcgtcggtgcgcgcactgtccattgtcctgcctatcgtgctgttggtctttctctgtcttggagtgttccttctgtggaagaactggcgcctgaagaacatcaattcgatcaactttgataacccggtctaccagaaaaccaccgaagatgaggtccacatctgtcataaccaggatggttactcatacccgagccgacagatggtgtctttggaagatgatgtggca

SEQ ID NO: 16217 - DNA, 2580 bp, synthetic construct
  misc_feature 1..2580: note = source = /note="Description of Artificial Sequence: Synthetic coding sequence"
  source 1..2580: mol_type = other DNA
atgggcccatggggttggaagctacggtggacagtagcactgctgctggccgctgccgggactgcagtcggcgatcggtgcgagcgcaacgagttccaatgccaggacgggaagtgcatcagctataaatgggtgtgcgacggcagtgccgaatgtcaggacgggtccgatgaatctcaagagacgtgcctaagcgttacctgcaagtccggtgacttttcctgcggcggcagggtgaataggtgtatccctcagttctggcgttgtgacggacaggtggattgtgataacggaagcgatgagcagggctgtccgcccaagacttgctctcaggacgaatttcgttgccacgatggcaagtgcatctctcggcagttcgtgtgcgattcagatagagattgcttagatggcagtgacgaggcctcctgcccagtgctgacatgtggacctgcatctttccagtgtaattcttctacgtgtatccctcaactttgggcttgtgacaacgacccagattgcgaggacggctccgacgagtggccacagagatgccgaggactttacgtattccaaggagattcctccccatgtagcgcttttgagtttcattgcctgagcggagaatgcatccatagcagttggcgctgtgacggggggcctgattgcaaggataaatctgacgaagagaactgtgcggtcgccacgtgccggcccgatgagttccagtgttccgacgggaactgtattcacggctctaggcaatgcgacagggagtatgattgtaaagacatgtcggacgaagtgggctgtgtgaacgtgacgttgtgtgagggtccaaataagttcaaatgtcatagtggcgagtgtattaccttggataaagtttgcaacatggcccgtgattgcagggactggagtgacgaacccattaaggaatgcggaaccgccgagtgcttagacaataacggcggctgtagtcacgtttgtaacgatcttaagatcggatatgagtgcctttgccccgacgggtttcagctggttgcacagcgccggtgtgaagatatagatgaatgtcaggatcccgatacctgcagccagctttgtgtgaacttagaagggggttacaagtgtcagtgtgaggaaggtttccaactcgacccccatacaaaagcgtgcaaggctgtggggagtattgcttacttgttcttcacaaataggcatgaagttcgtaagatgaccctagataggtccgagtacacaagcttaatacctaatcttagaaacgttgttgctctggacaccgaggtggcatcaaatcgtatctattggagcgacctcagtcagcggatgatctgctctacccagttagatagagctcacggtgtgtccagctatgatactgtaatttctcgggatattcaagctccggacggcttggccgtggattggattcatagcaatatctactggactgacagtgtactgggcaccgtgtcggtagcagacaccaaaggggtgaagcggaagacactttttagggaaaacggttcaaagcccagagctattgtggtggaccctgtgcacggtttcatgtattggacagactggggaactcccgctaagatcaaaaaggggggcctcaatggggtggatatctacagcttggtgacagaaaacattcagtggcctaacgggattacgctggatctgctgagcgggagactatattgggtcgattcaaagctccattcaatctccagtatagacgtcaacggcgggaatcgcaagaccattctagaagacgaaaagcgattagctcaccctttcagcctggccgtttttgaagataaggtgttttggactgatattatcaacgaggcaattttttcagctaatcgcctgactggctccgacgtgaatctccttgccgaaaacctgctaagtcctgaggacatggtcctttttcacaaccttacccaaccaagaggcgtcaactggtgcgagagaactaccctgtcaaacggggggtgtcagtacctctgcctacctgcacctcagataaaccctcattcccctaaatttacctgcgcctgtcctgacgggatgctcctggcccgtgatatgcggagctgccttactgaggctgaagcagcggtggccacacaggagacaagtacagtccgcttaaaagtgagctccacagctgtacggacccagcacactaccacccgccccgtgccggacaccagtcgactgccaggtgccacaccagggctgacaactgtagagattgttactatgagccaccaggcccttggcgatgttgccgggcgtggaaatgagaaaaagccctcttccgttcgtgcgcttagcattgtcctgcctatcgtattgctggtatttttgtgtttgggggtcttcctcctctggaagaactggaggcttaaaaatatcaatagtataaacttcgacaatccagtgtaccagaaaactactgaggacgaggtccatatctgtcacaaccaggacgggtacagttatccctctcgacaaatggtcagtctggaggatgacgtggcc

SEQ ID NO: 16218 - DNA, 2580 bp, synthetic construct
  misc_feature 1..2580: note = source = /note="Description of Artificial Sequence: Synthetic coding sequence"
  source 1..2580: mol_type = other DNA
atgggtccttggggctggaagcttcgctggaccgtcgcactgctgttggccgctgctggcactgccgtcggggatcgttgcgagagaaatgagttccaatgccaggacggtaagtgtatctcctataagtgggtttgtgatgggagcgcagagtgccaagacggtagcgatgagtctcaggaaacctgtctgagcgtcacctgcaagagcggagactttagctgcggcggtagggttaaccgctgcattccgcaattttggcggtgcgatggacaagtcgactgcgataacggctccgacgaacaaggctgccctccgaagacctgctctcaggacgaattcaggtgccatgatggaaaatgcatcagccggcagttcgtgtgtgattcggaccgcgattgccttgatggtagcgatgaagcctcttgccctgtcctgacctgcggaccagcgtcgtttcagtgtaatagctcgacttgtattccgcaactgtgggcctgcgacaacgacccagactgtgaggatggatccgacgaatggcctcagaggtgcaggggtctgtatgtgttccagggggactccagcccttgttctgcctttgaatttcactgcctgagcggggagtgtatccatagcagctggcgctgcgacggaggtccagattgcaaagataaaagcgacgaagagaactgtgcggtggcaacctgccgtcctgatgagtttcagtgtagcgacggtaattgtatccacggtagccgtcaatgcgaccgggaatacgactgtaaggatatgagcgacgaagtcggctgtgtgaatgtgactttatgcgagggccccaacaagtttaagtgccactccggagaatgcattactcttgataaagtgtgtaatatggcccgagactgtcgcgactggagcgacgaaccgattaaggagtgtgggaccaacgcatgcctcgacaacaacgggggttgtagccacgtatgcaacgatttaaaaattggctatgagtgtctgtgccctgatgggtttcaactggttgcgcagcgccgctgtgaggatatcgacgaatgccaggatcctgacacgtgttctcaactctgtgtgaacctcgagggaggttataaatgccagtgtgaggagggcttccaactggaccctcatacgaaggcgtgtaaagccgttggtagcattgcttacttgttcttcaccaaccgccatgaggtcaggaaaatgacactggatcgttctgaatacacctcgctgatccctaatttacgtaatgtagtggccctggacacagaagtcgcgtcaaacaggatctactggtcagatctgtctcagcgtatgatttgcagtacccagttggatagagcccatggcgtaagcagctatgataccgttatctcccgcgatatccaggcacctgatgggctggcggtcgactggatccattctaatatttattggacagactctgtgctgggaacggtcagtgtggccgatactaagggcgtgaagcgtaaaacgttgttccgtgagaatggctccaaacctcgtgcaattgtcgtcgaccctgttcacggttttatgtactggaccgactggggtaccccagctaagattaaaaagggtggcctgaatggcgtggacatctatagcctagttaccgagaacatccaatggcctaacggcattaccttggatctgctgtctggtcgcctgtattgggtcgattctaaattgcatagcataagcagtatcgatgttaatggcggcaatcggaagaccatcctggaggacgagaagcgtttggcccatccattttcattggcagtgtttgaagacaaagtgttctggaccgatatcattaacgaagctatcttcagcgccaataggttaaccggcagcgacgtgaacctgttggcagagaacctgctgagcccagaggacatggtgctgttccacaatctgacacaaccgcgcggcgtcaactggtgtgaacgcactacactgagcaatggcggctgccagtacctgtgcttgccggccccgcagataaacccacacagccctaagtttacatgtgcatgtccggatggaatgctcctggcgagggatatgcgctcatgtctgaccgaagcagaagcggcggtggcgacccaggaaacgtcaaccgttcgcctgaaggtttcttcaaccgcggtgcggactcagcatacgacgaccaggccggtaccggatacaagccgtctgccgggggcaacaccaggtttgaccaccgtggaaatcgtgacgatgagccaccaggctctgggcgacgtcgcgggaaggggtaatgagaaaaagcctagctccgtccgcgccttaagtattgtcttaccaatcgtgttacttgtgtttctttgcctgggcgtgtttctgctgtggaaaaattggaggctgaaaaacataaacagcatcaattttgataatccggtatatcagaaaactacggaagacgaggtgcacatttgtcacaaccaggacggatactcttacccaagtcgccagatggtgagtctggaagacgacgtggca

SEQ ID NO: 16219 - DNA, 2580 bp, synthetic construct
  misc_feature 1..2580: note = source = /note="Description of Artificial Sequence: Synthetic coding sequence"
  source 1..2580: mol_type = other DNA
atgggcccatggggctggaaactgaggtggacagtggccctgcttttggccgcggccggtactgccgttggggaccgctgcgagcggaacgagttccaatgtcaggatggcaagtgtatttcctataagtgggtgtgcgacggttcagcagaatgccaggatggatccgatgaaagtcaggaaacgtgtctatctgtgacttgtaagagcggagacttctcatgtggaggacgtgtgaaccgatgcattcctcaattttggcggtgcgacggacaggtggattgcgataatggaagtgacgaacagggctgcccacccaaaacctgcagtcaggacgaattccggtgccatgacggaaaatgtatatccaggcagtttgtatgtgactcggatcgcgattgtctcgatggctcagacgaggcatcatgtccagtcttaacttgcgggccagcttcctttcagtgtaattcctccacgtgcatcccacagctctgggcgtgcgataacgatcctgactgcgaagatggctccgacgaatggccgcagcgctgccgcggcttgtacgtgtttcagggggatagctccccatgcagtgcgttcgaattccactgcctgtccggagaatgtattcactcatcctggcgctgcgatggcggccccgactgcaaagataagtcagatgaggaaaattgcgcggttgcgacctgcaggcccgacgagtttcaatgttctgacggaaattgcatccacggttcccgccaatgtgatcgtgagtacgactgcaaggatatgtccgacgaagtgggttgtgtgaacgtcaccctttgtgagggccctaataagttcaaatgtcattctggcgagtgcattactctggacaaagtgtgcaacatggcccgggactgcagagactggtctgacgagccaattaaagagtgcggtacgaacgcctgcctggacaataatggggggtgctcccacgtgtgcaacgacttaaagatcgggtatgagtgcctgtgtccggacgggtttcagcttgttgcacagcgcagatgcgaggatattgatgaatgtcaggaccccgacacctgctcacaattgtgtgtgaatcttgagggcgggtacaagtgtcaatgtgaagaaggctttcagttggatcctcacactaaagcatgtaaggcggttggcagcattgcctatctcttttttactaatcggcatgaggttcgaaagatgacgctcgacagatctgagtacacgagcctgattcctaacctgcgaaacgtggtggctctggatacagaggtcgcctctaacaggatctactggtccgacctctcccagcggatgatatgctcaactcagctcgacagggcccacggggtgtccagttacgacacggtcatctcgcgggacattcaggcacctgatgggctggccgtcgactggatccatagtaatatttactggacagatagcgtactgggcacagtgtccgtggcagacacaaaaggggtcaaaaggaaaaccctgttccgcgaaaatgggagcaagcctcgcgcaatcgtcgttgatcctgtacatggattcatgtattggaccgattggggaactccggcaaagatcaagaaaggagggttaaacggcgtcgatatttattcactggtcactgaaaatatccaatggcccaatggaatcaccttggacctactgtctggccggctttactgggtcgattccaagttgcattccatcagcagtatagacgtcaacggtggcaaccggaagacaatactggaagacgagaaaaggctggctcatcctttcagcttggctgtgtttgaggacaaagttttctggacagacatcataaatgaggcaatattctcagcaaaccgccttactggatccgatgtgaatctgctggccgagaacttactgtcccctgaagatatggtcctttttcacaacctgactcagcccaggggcgtcaactggtgtgagcgcaccactttgagtaacggaggttgccaatatctgtgtcttcctgcacctcagattaatccccattctccaaaatttacctgtgcatgcccagacgggatgctacttgcgcgcgacatgagaagttgcctgactgaggccgaggccgccgtagccacccaggagacgagcaccgtgcggctcaaagtgtcgtctacagctgtccggactcagcataccactacaagacctgtgcccgatacatcgcgcctgcctggcgcaacccccggcctgaccactgttgaaatcgtgaccatgagccatcaggctttgggagacgtggccgggcggggcaacgaaaagaagccctccagcgtgcgcgccttatccatcgtcttgccgatcgtcctgcttgtgtttctgtgcctgggtgtgtttttgttgtggaagaactggcggcttaagaatataaactcgataaacttcgacaaccctgtgtaccagaagactaccgaggacgaagtgcatatttgccacaatcaggacgggtactcctatccgtcccggcagatggtatccctggaggacgatgtggct

SEQ ID NO: 16220 - DNA, 2580 bp, synthetic construct
  misc_feature 1..2580: note = source = /note="Description of Artificial Sequence: Synthetic coding sequence"
  source 1..2580: mol_type = other DNA
atgggcccctggggatggaaactgcgctggactgtggcattgctcctcgccgcggccggtaccgcggtcggagatagatgtgagaggaacgaatttcagtgtcaagatggaaagtgcatctcctacaagtgggtctgcgatgggtccgctgaatgtcaagacggaagcgatgaatcccaagaaacctgtcttagcgtgacttgtaagtcgggagacttctcctgtggcggaagagtgaaccggtgtatcccccagttttggagatgtgatggccaagtcgattgcgataacggatcggatgaacaaggatgccctccaaagacgtgttcacaagacgagttccgctgtcatgatggcaaatgtatttcgaggcaattcgtctgtgacagcgacagagactgtttggatggttcggatgaagcatcgtgtccagttctcacctgtggtccagcctcgtttcaatgcaactcatcgacctgtatccctcaattgtgggcatgcgataacgaccccgattgtgaagatggttccgacgaatggcctcagagatgtagaggactttacgtgttccagggtgattcctcgccatgctcagcatttgagttccattgcttgtcgggtgaatgtattcattcgtcttggcgatgtgatggaggaccagattgcaaagataagagcgatgaagaaaactgcgcagtcgccacctgccgacctgatgagtttcagtgttcagatggcaactgtattcatggatcgcgtcagtgtgatagagaatacgattgtaaggatatgagcgacgaggtgggctgtgtgaacgtgaccctgtgtgaaggacctaacaaattcaagtgccactccggtgaatgcatcacccttgataaggtgtgcaacatggctcgcgattgccgagattggtccgatgaacctatcaaagaatgtggaactaacgcgtgtctggacaataacggtggatgttcgcacgtgtgtaatgatcttaagattggatatgaatgcttgtgtcctgacgggtttcaacttgtggcgcagcgccgttgtgaagatattgatgagtgccaggatccggatacttgttcgcaactttgtgtgaacctggaaggtggttacaagtgccaatgcgaagagggctttcagttggatcctcatactaaagcatgcaaggccgtcggatccattgcttatctgtttttcaccaacagacatgaagtgagaaagatgactctggatcgcagcgaatatactagccttatccccaatcttcgaaacgtggtggccctcgataccgaagtggcatccaaccgcatttactggtccgatctgagccaacggatgatttgcagcacccaacttgaccgggcacatggagtgagctcctacgataccgtcatctcgcgtgacatacaggcccctgacgggcttgcggtggactggattcattccaacatatactggaccgactccgtccttggaaccgtttcagtggctgacactaagggggtgaagaggaaaaccctctttcgggagaatggctcgaagccacgcgcgattgtggtggatccagttcacggatttatgtactggactgactggggaactccggcaaagattaagaaaggcggtctgaatggtgtcgacatatactcgctggtgaccgagaatatacaatggcctaatggcattaccttggacctgctctcagggcggctgtactgggtcgactccaagctccatagcattagctcgatagacgtcaacggcggtaaccggaaaaccattcttgaagatgagaagcggctggcacacccattctccctggcagtgtttgaggataaagtcttttggacggacataatcaatgaagcgatctttagcgccaatcggctgacgggatcggacgtgaaccttctggctgagaatctgctttcgcctgaagatatggtgctgtttcataatctgactcaacctagaggtgtcaactggtgcgagagaactaccctttccaacggcggttgtcaatacctttgccttcctgcaccacagattaatccccatagccctaaattcacttgtgcttgtcctgatggtatgctgcttgcacgggacatgagatcgtgtcttaccgaggccgaggcagcagtggccactcaagaaaccagtaccgtcagactgaaagtgtcatcaaccgcagtgaggacccaacataccaccacgcgcccggtgcctgatactagcagattgcctggggcaacgcctggacttactaccgtcgaaatcgttactatgagccatcaagcgcttggagatgtggccgggagaggcaacgagaaaaagccatcatctgtccgcgcattgtccatcgtgctgcctatcgtgcttctcgtctttctgtgtcttggtgtctttctgctctggaagaactggcggctcaagaacattaactctatcaatttcgacaaccccgtgtaccaaaagaccaccgaagatgaggtccatatctgtcataatcaagacggatactcgtacccttcccggcaaatggtgtctctcgaagatgatgtggcg

SEQ ID NO: 16221 - DNA, 2580 bp, synthetic construct; identical to SEQ ID NO: 16219
  misc_feature 1..2580: note = source = /note="Description of Artificial Sequence: Synthetic coding sequence"
  source 1..2580: mol_type = other DNA

SEQ ID NO: 16222 - DNA, 2580 bp, synthetic construct
  misc_feature 1..2580: note = source = /note="Description of Artificial Sequence: Synthetic coding sequence"
  source 1..2580: mol_type = other DNA
atgggaccctggggttggaagctgcggtggactgtggcactgctcttggccgcagcagggactgccgtgggagatcggtgtgaacggaatgagtttcagtgtcaagacggaaagtgcatctcctacaagtgggtgtgcgatggtagcgcagaatgtcaggatggttcggacgaatcacaggaaacgtgtctctccgtgacctgtaagtccggcgacttttcctgtggaggaagggtgaacagatgtatacctcagttttggcgatgtgacgggcaagtggattgcgataatggatcagacgaacaaggatgcccccctaaaacttgttcgcaggatgaatttaggtgtcatgatggaaaatgtatttcgcggcaattcgtgtgcgattcggatagggattgtctcgacggttccgatgaagcatcctgccctgtgcttacctgtggcccagcatccttccaatgcaatagctccacctgtattccacagctttgggcatgtgacaatgatccagactgcgaggacggctccgatgagtggccacaaagatgtcgggggctgtacgtgttccaaggagattcgtcgccctgtagcgcattcgaatttcattgcctgtcgggcgagtgtatccattcatcgtggcgctgtgatgggggaccagactgtaaagataaaagcgatgaggagaattgtgccgtggcaacttgccgacctgatgagttccaatgttcagatggaaactgtattcatggttcaagacagtgtgatcgtgaatacgattgtaaggatatgtctgatgaagtgggatgtgtgaacgtcactttgtgtgagggtccgaataagtttaagtgccattcaggagaatgcataaccctcgataaagtctgtaatatggcgcgtgattgcagagattggtccgacgaaccgatcaaggagtgtggcaccaacgcctgtctcgacaacaacggaggctgttcccatgtctgcaatgatcttaagattggatacgaatgtctgtgcccggacggatttcaactcgttgcccaacgcagatgcgaagatattgatgaatgtcaagatcctgacacttgctcgcagctgtgtgtcaacctggaaggcggttacaagtgccagtgtgaagagggatttcaacttgatccccataccaaggcatgtaaggcagtcggctcgattgcatacctcttctttaccaaccgccacgaggtcagaaagatgactctcgataggtcagaatacacgtccctgatccctaacctgagaaacgtcgtggctctcgatactgaggtggcgtcgaaccgcatatactggagcgatctgtctcaaagaatgatctgttctactcaacttgatcgcgcacatggagtgtcgtcgtacgataccgtgatttcgagggacattcaagcacctgacggacttgcagtggactggattcattctaacatatactggaccgactccgtgcttggtaccgtgtcagtcgctgacaccaagggtgtaaaaaggaaaaccctcttcagggagaatggttcgaagccaagagcaatagtcgtggatcctgtgcatggttttatgtactggactgattggggaacccctgcaaagattaagaagggaggtctgaacggagtggacatctattccctcgtcacggaaaacattcagtggcctaatgggatcacgcttgacctgctttcgggacgcctttactgggtggattcgaaactgcattcgatctcctcaatcgacgtgaacggcggaaacaggaaaactatattggaagatgaaaaacgactggcccaccctttttccctcgccgtgtttgaggataaggttttttggactgacatcattaacgaagcgatcttttccgcaaacagattgactggatcggacgtgaaccttctcgccgaaaatctgctgtccccagaagatatggtcctctttcacaaccttacccagccacgcggggtcaattggtgcgaacggaccactctctcgaatggggggtgccaatacctgtgtctgcctgcgccacagatcaaccctcatagccctaagttcacctgtgcatgtccagatggaatgctgctcgcccgtgatatgcggtcatgccttaccgaagcagaagcagcagtcgcaacccaggaaacctcgactgtccgccttaaggtcagctccactgctgtgaggacccagcatactaccactagacccgtgccagatacttcacgccttcctggagcaaccccaggtcttaccaccgtcgagatcgtgaccatgtcacatcaagcactcggagacgtggccgggagggggaatgagaagaagccttcaagcgtgagagccctgagcattgtccttccaatagtccttcttgtgtttctgtgtctgggtgtgttccttctgtggaagaattggcgtctgaagaacatcaattcaatcaattttgacaaccctgtgtaccaaaagacgactgaagatgaggtgcacatttgtcataatcaggatgggtactcctacccttccagacagatggtgtccctcgaggacgacgtggcg

SEQ ID NO: 16223 - DNA, 2580 bp, synthetic construct
  misc_feature 1..2580: note = source = /note="Description of Artificial Sequence: Synthetic coding sequence"
  source 1..2580: mol_type = other DNA
atgggcccatgggggtggaagctgaggtggacggtagcattgctccttgcagccgccggcactgccgtgggcgatagatgcgagcgaaacgaattccagtgccaggatgggaaatgtatttcgtacaaatgggtctgtgacggatcagccgagtgccaagacgggtctgatgaatcacaagagacgtgcctgtcagtaacatgcaagagcggtgatttctcctgcggcggcagggtgaaccgctgtataccccagttctggaggtgtgacggacaagtggattgcgacaatggctctgacgaacaagggtgtcctcctaagacctgctcccaggacgaatttcgctgccatgatgggaagtgcattagccggcagttcgtttgtgattcggacagagattgtctggatggttcagacgaggcatcctgcccggtgctgacttgtggtccagctagtttccagtgcaattcctccacatgtatcccccaactctgggcgtgtgacaatgacccagattgtgaggacggaagcgacgaatggcctcaacgatgccggggcctgtacgtgttccaaggcgactcatccccgtgttcggcctttgagtttcattgtctatcaggcgagtgcatccacagttcgtggaggtgtgacggcggcccagactgtaaggataagagcgacgaagaaaactgcgccgtcgctacttgcaggccggatgaatttcagtgctctgatggaaactgcattcacgggtcgagacagtgcgacagagagtacgattgtaaggacatgtccgatgaagtgggctgcgtaaatgtcacattgtgcgagggaccaaataagttcaaatgccacagtggagaatgtattaccctggacaaggtttgtaatatggctagggattgtcgggactggtccgacgaacctattaaggagtgcgggacaaacgcttgcctcgacaataacggcggatgtagtcacgtctgcaacgacctcaaaattgggtacgagtgtttgtgcccagacgggtttcagctcgtggcccagaggcggtgtgaagatatcgacgaatgccaggatcctgacacctgtagccagctatgtgttaacctggaaggaggttacaagtgtcagtgtgaagagggctttcaactggaccctcacactaaggcctgcaaagccgtggggtctatagcctatctgttctttaccaatcggcacgaggttaggaagatgaccctcgataggtccgagtacacttctctgatcccaaaccttaggaacgtggtggcactggacactgaagtcgcaagcaataggatctactggagtgatcttagtcagcggatgatttgtagtacccagctggaccgggcgcatggcgtctccagctacgatactgtgattagtagggacatccaggctcccgacggactcgccgtggactggatccactcgaatatctactggacagatagcgtgcttggcactgtgagcgtcgccgatactaagggagtgaaacggaagaccttatttcgcgaaaacgggtctaaaccgcgtgctatagtggtcgatccagttcatggatttatgtattggacagactggggcaccccagccaagattaaaaagggcggtctgaatggcgttgacatctattctcttgtcaccgagaacatacaatggcctaatgggattacgttggatctgttgagtggaaggctttattgggttgattccaagttgcactctattagctcaatcgacgtaaacggagggaatcggaagaccatactcgaggacgagaaacgacttgcccatccttttagccttgcagtgttcgaggataaggtgttttggactgacatcataaacgaggccatcttctctgccaacaggttgactgggtccgatgttaacctgctggctgaaaacctgttgtctcccgaggatatggtcctgttccacaacctcacccagccgcgcggggtgaactggtgcgaacgtaccactctgtcaaatggcggatgtcaatatctgtgtctaccagcgccccagattaatccccactctcccaaattcacttgtgcgtgtcctgatggcatgctgctcgcgcgggatatgcgctcttgtctgacagaggccgaagccgcagttgctactcaagaaacatcgaccgtgagactgaaagtgagctccacagcagtgagaacgcagcacactaccacaagacccgtgcccgacacctcacgactcccgggggccacacccggcctcactacagttgagatagtcactatgagtcaccaagctctgggagacgtggcgggacgggggaatgagaaaaagccatccagtgttcgtgcactgtctatagtgctgccaatagtcctgctcgtgttcctgtgtctgggtgtcttcctcctttggaagaattggcgactcaaaaatattaactcaatcaattttgacaatcccgtctatcagaaaacaaccgaggacgaggttcatatctgtcataatcaggatggctactcctacccctccaggcagatggtttccctcgaagacgacgtcgcc

SEQ ID NO: 16224 - DNA, 2580 bp, synthetic construct
  misc_feature 1..2580: note = source = /note="Description of Artificial Sequence: Synthetic coding sequence"
  source 1..2580: mol_type = other DNA
atgggaccatggggttggaagttgcgttggacggtggccctcctccttgcagcggcggggacggcggtgggtgaccgctgcgagagaaatgaattccagtgccaagatggtaagtgtatctcgtacaagtgggtctgtgatggatccgcagaatgccaggacggctcagacgaatcgcaagagacttgtctgagcgtcacttgcaaatctggagacttttcatgtgggggaagggtgaatcggtgcattccacagttttggcggtgtgacggtcaagtcgattgtgacaatggatccgatgaacaagggtgtccaccaaagacttgttcccaagatgaattcagatgccatgacggaaagtgtatttccagacagttcgtttgtgactctgaccgggattgtcttgatggcagcgacgaagcaagctgtcctgtgcttacgtgtggtcctgccagctttcagtgtaactcgtcgacctgtattccccagctctgggcttgtgataatgatcccgattgtgaagatggctcggatgagtggccacagcgctgtaggggcctttacgtgtttcagggtgactcgagcccatgttcagcattcgagttccattgcctttccggcgagtgtatacattcctcctggaggtgtgatggtggccctgactgtaaagataaatccgacgaggaaaactgcgcggtggccacttgcaggcctgacgaatttcaatgttcagacggcaattgtatccatggatcgcgtcaatgcgatagagaatatgattgtaaggatatgtccgatgaagttggatgtgtgaacgtgactttgtgcgaaggacctaacaagtttaagtgtcatagcggggagtgcataactttggacaaggtgtgcaatatggcaagagactgccgtgattggtccgatgagcccattaaagaatgcggtaccaatgcgtgtctcgacaacaacggtggatgttcgcatgtgtgcaatgacctgaaaattggatacgaatgcctgtgccccgacggatttcagcttgtggcgcagcggcgctgcgaggatatcgatgagtgtcaagatcctgatacgtgtagccagttgtgtgtgaacctcgagggtggatacaagtgtcagtgtgaggaaggattccaacttgacccgcatactaaggcttgtaaagcagtgggaagcattgcttacctctttttcacgaaccggcacgaagtccgcaagatgactctcgacagatcggaatacacgagccttattccgaatctccggaacgtggtggccctggataccgaagtcgcgtcgaacagaatctactggagcgatctgagccagcggatgatatgttcgacgcaactggacagagcacacggagtctcatcctacgacactgtgatcagccgagatattcaagcacccgatggattggcagtggactggattcactcgaatatctactggaccgacagcgtgcttggaactgtgtcggtggcagataccaagggcgtgaagcgaaagaccctttttagagaaaatggctccaaacctcgtgcgattgtcgtggaccccgtccatggtttcatgtactggactgactggggtactcctgcaaagatcaagaaggggggactgaacggtgtggatatctactcccttgtgactgaaaacattcagtggcccaatggtattaccttggacctgctcagcggccgcctgtactgggtggactccaagctccattcgatctcttcgatagacgtgaacggaggtaatcgtaaaactattctcgaggacgaaaagcgtctcgcacatccattttcactggcagtgttcgaagataaggtgttttggactgacattatcaacgaagcgatcttttctgcgaacaggctgactggaagcgatgtcaatttgcttgctgagaacctcctctcgccagaggatatggtattgtttcataacctcacccagcctaggggggtgaactggtgtgaaaggactaccctgtccaacgggggatgtcaatacctctgcctgccagcacctcagattaacccccatagcccaaaattcacttgcgcatgccctgatggaatgcttcttgcaagagatatgcggtcatgtcttaccgaagcagaggcagctgtggcgacccaagaaacctccactgtgcgcctgaaagtgtcatccaccgcagtgagaacgcagcacactacgacccggccagtgccagatacttcgcgcctgccaggagcgactccagggctgaccactgtggagatcgtgactatgtcacatcaggcactgggggacgtcgcgggtagggggaacgaaaagaagccttcgtccgtgagagcactctcgatcgttcttccaatagtgcttctggtgtttctgtgcctcggcgtctttctgctttggaagaactggcgactcaaaaacattaactccattaactttgataacccagtgtaccaaaaaaccaccgaggacgaggtccatatttgtcacaatcaggatggttacagttacccttccagacaaatggtgtcactggaggatgatgtggca

SEQ ID NO: 16225 - DNA, 2580 bp, synthetic construct
  misc_feature 1..2580: note = source = /note="Description of Artificial Sequence: Synthetic coding sequence"
  source 1..2580: mol_type = other DNA
atgggcccctgggggtggaagcttcgttggacggtagctctgctgctggcagcagcaggcacagctgtcggggatcgctgcgagcggaatgagttccaatgtcaggatggcaagtgcatctcctacaagtgggtgtgcgacgggtccgcggagtgtcaggacggttctgatgagtctcaggaaacatgtctgagtgtgacatgtaagtcaggggacttttcttgcggtggcagagtaaatagatgcatacctcagttctggcgctgcgacggacaggtggattgtgacaacgggagtgatgaacaaggatgtccgccgaaaacatgttcccaggacgaatttcgatgtcacgatggcaagtgcatctctaggcagttcgtgtgcgattccgatcgcgattgcctggacggctccgacgaggcaagttgccctgtgcttacatgcggtccagcctcctttcagtgcaactccagtacttgcattccgcagctctgggcctgtgataatgatccagattgtgaggatggctccgacgagtggcctcagaggtgtagaggcctgtatgtcttccagggggattcttcaccatgttccgcttttgagtttcactgcctgtcaggcgagtgcatacattcatcttggcgatgcgacggcggcccggattgtaaggacaagtctgacgaggaaaattgcgctgttgccacctgtcgacccgatgagttccagtgttcagacggaaactgtatccacggctccagacagtgtgatcgggaatatgattgtaaagacatgagcgatgaagtcggatgcgtcaatgtcactctatgcgagggtcctaacaagtttaaatgccatagcggagaatgcatcaccctcgacaaggtctgcaatatggccagagattgccgggattggtccgatgagccgataaaggagtgtgggaccaacgcgtgcctggacaacaacggcggctgcagtcacgtctgcaacgacttgaaaatcgggtatgaatgtttgtgcccagacggctttcaactcgtcgcacagaggagatgtgaggacatagatgagtgccaggacccagacacctgcagccaactgtgcgtgaacctcgagggtggctataagtgccagtgcgaggaaggttttcagcttgacccccatacaaaagcctgcaaggcagtcggctcaatcgcctatcttttttttactaaccgtcatgaggtccgtaagatgaccctggatcggtcagagtatacctcactgataccaaacttacgcaatgttgtggcacttgacacggaggttgctagtaatcgcatatactggtcagatctgtctcaacgcatgatctgtagtactcagctggaccgtgctcatggagtgtccagctatgacacggtaatcagccgggatatccaggcccccgacgggcttgccgtggactggatccactctaatatctattggaccgactccgttctcggaacagtcagcgtggctgacacgaagggagtgaagaggaaaacactgtttcgggaaaatggctcaaagccacgggctatcgtggtggatcccgtgcatggcttcatgtactggactgactggggaacacctgctaagataaagaagggcgggctgaacggagtcgatatatatagcctagtcactgagaatattcagtggccgaacggaatcactctcgatctgcttagcggtagattgtattgggtggactccaaattgcactctatcagctccatcgacgttaacgggggcaacagaaagaccattttagaggacgaaaagcgactcgctcaccctttcagcctggcagtattcgaggacaaggtgttttggactgatattatcaacgaagcaattttctccgccaacaggttgacaggcagtgacgttaacctcctagccgagaaccttctctcccctgaagatatggtgctgtttcataacctgacccaacccaggggcgtaaactggtgtgaacgcactacgctgagcaatggcgggtgtcaatacctatgcctgccagccccccagataaaccctcattcaccaaaatttacatgcgcctgtcctgatggcatgctcctcgctagagacatgagatcgtgccttaccgaagccgaagcggcagtggctacgcaggagactagcacagttaggttgaaagtctctagcacagctgtcagaacacagcatacaactacccggcccgtccctgatacgtccagattgccaggggccacgccaggcttgaccaccgttgaaattgtgactatgagccaccaggcgctcggagatgtcgccggaagaggcaacgaaaagaaaccttcgtctgttcgagcactcagcatcgttctgcccatcgtgctgctggtgtttctatgcctgggcgtgttcttgttatggaagaattggagactgaagaacatcaactctatcaacttcgacaaccccgtgtatcagaaaacgaccgaagatgaagtccatatctgccataaccaggacggttactcgtacccttccaggcagatggtgagcctggaagatgacgtggca

SEQ ID NO: 16226 - DNA, 2580 bp, synthetic construct
  misc_feature 1..2580: note = source = /note="Description of Artificial Sequence: Synthetic coding sequence"
  source 1..2580: mol_type = other DNA
atgggaccatggggctggaaactcagatggaccgtggcgcttctgcttgccgcggcaggaactgccgtcggcgaccgctgcgaacgcaacgagttccagtgtcaagacggtaagtgtatctcgtataagtgggtgtgcgatggtagcgctgaatgccaagatggatccgacgaatcccaggagacttgcctgtcggttacttgcaagtctggagatttcagctgcggaggccgcgtgaatcggtgtattccccagttctggagatgcgatggacaggtagactgcgacaacggctccgatgagcaggggtgcccacctaagacctgctcacaagacgagttcagatgccacgacggcaagtgtatctcccgacagtttgtgtgcgactcagaccgggattgcctggacggctcggacgaggcttcctgccccgtgcttacctgtggacctgcgagcttccaatgtaattcctcgacttgtataccccagctgtgggcttgcgacaatgacccggactgcgaagatggatcagacgaatggccgcagaggtgccggggactgtacgtgttccagggtgattcttcaccgtgctccgcttttgaatttcactgcctgtcaggggagtgtattcactcctcatggcgctgcgacggaggacctgactgcaaagataagtccgacgaagagaactgtgccgtggccacctgccggcccgatgaatttcaatgttccgacggaaattgcatccacggaagtcggcagtgcgaccgcgagtacgactgcaaggatatgagtgacgaggtgggctgcgtgaacgtgactctgtgcgaaggtccaaataagttcaaatgccacagcggcgaatgcattactctggataaggtgtgtaatatggcacgggactgccgcgactggtcggatgagccgattaaagaatgcggaactaatgcttgcctggacaacaatgggggctgcagccatgtctgcaacgatctgaaaatcggctatgaatgtttgtgtcctgatggatttcagctggtggctcagcggcgctgtgaagatatcgacgaatgtcaggatcccgatacctgtagccagctctgcgtgaacctcgaaggcggatacaaatgccagtgcgaagaggggtttcagctcgatccgcatactaaggcctgcaaggctgtgggatccatcgcctacctgttctttaccaaccggcatgaagtgcgcaaaatgactctcgacagatccgaatacaccagcctgatcccgaatctgaggaatgtcgtcgcattggacaccgaagtggcgtccaacagaatctactggtcggatttgtcccaaaggatgatctgtagcactcagttggatcgcgctcacggcgtgtcgtcatacgacaccgtgatctcgcgggacattcaagcccccgacggactggcggtggattggatccattcgaacatctactggaccgattcggtccttggaactgtgtcagtggcagataccaaaggcgtgaagagaaagacgctgttccgcgagaatggctcgaaaccaagggcgatcgtggtcgacccagtgcacggattcatgtactggaccgactgggggactcccgcaaagattaagaagggcggactcaatggcgttgatatctactcactggtcactgagaacattcagtggcctaacggtattactttggatctgctcagcgggcgtctctactgggtggactccaagctgcactcaatctcgagcatcgacgtgaacggaggcaaccggaaaactatactggaggacgaaaagcggttggcccatccattctctctcgccgtattcgaggataaggtgttctggactgatatcatcaacgaagccatcttttccgcgaaccgccttaccggaagcgacgtcaacctgctcgctgagaacctcctgtcgccagaggacatggtcctgttccacaatctcacccaacctcgcggggtcaactggtgtgaacgcaccacgctgtccaacggtggctgtcagtacctgtgcctcccggcacctcaaatcaacccgcactctccgaagtttacctgcgcctgtccggacggaatgttgttggcaagagatatgcgctcctgcctgactgaagcggaagccgccgtcgccactcaggagactagcacggtccgcttgaaagtgtcctcgactgcggtcagaactcaacacaccaccacgaggccggtgcctgatacgtcccgcttgcccggggcaactccgggattgaccactgtggaaattgtgactatgtcacatcaagcactcggcgacgtcgcaggacgggggaacgaaaagaagccatcctccgtgcgagccctgtccatcgtgctcccaatcgtcctgcttgtgttcctttgcttgggagtgtttttgctttggaaaaactggcgcctgaagaacatcaattccatcaattttgacaatcctgtctaccaaaaaactacggaggacgaagtccatatctgtcataaccaggacggatactcgtaccctagtcgccagatggttagcctggaggatgatgtggct

SEQ ID NO: 16227 - DNA, 2580 bp, synthetic construct
  misc_feature 1..2580: note = source = /note="Description of Artificial Sequence: Synthetic coding sequence"
  source 1..2580: mol_type = other DNA
atgggaccctggggctggaaactacggtggacagtagccctgctcctagccgcagcaggaacagcagttggagatcgctgcgaaaggaacgaatttcagtgccaagatgggaagtgcatctcctacaagtgggtatgtgacgggtcagctgagtgtcaggatggaagtgacgaaagccaggagacatgtctgtcagtgacttgcaagtccggagatttctcatgtggcggccgagtcaacagatgtatcccacagttttggcggtgtgatggccaggttgactgcgataacggaagtgatgaacaaggatgtccaccaaaaacgtgttctcaggatgagtttcggtgtcacgacggcaaatgcatttcccgacaattcgtgtgcgactccgatcgagactgcttagacgggagtgatgaagccagttgtcctgtgcttacctgcgggcccgccagtttccagtgtaatagcagcacatgtattccccagttgtgggcgtgcgacaacgatcccgattgcgaagacggatccgacgagtggccccagcggtgccgcggcctatacgtctttcagggggattcatccccttgctcagcctttgagttccattgcctgagcggcgaatgtatccactcttcgtggcggtgtgatggtggacctgattgtaaggacaaaagtgatgaggagaattgtgcggttgccacctgcaggcctgatgaattccaatgctcagatggaaactgtattcacggatcgcggcaatgtgatagagagtatgattgcaaagatatgtctgacgaggtcgggtgtgtgaatgtcaccctgtgcgagggtcccaataagttcaagtgtcacagcggtgagtgcataaccctggataaagtgtgcaatatggcccgagattgcagagactggtccgatgaaccgatcaaggaatgcgggacaaatgcttgcctggacaataatggagggtgcagccatgtgtgcaatgatctgaagatcggctacgagtgcttatgtccagacggctttcagctggtcgctcaaagaaggtgtgaagatatcgacgaatgtcaggatcccgacacttgtagtcagctgtgcgtgaacctcgagggcggatataagtgccagtgtgaggaggggtttcaactcgatccccacactaaggcctgcaaagcagtcgggtccattgcctatctgttcttcacaaaccgacacgaggtcagaaagatgaccctggacaggtccgagtacacttctttaattcctaacctgcgtaacgtggtggccctggatacagaggttgcttctaatcggatttactggagtgacttatcacagaggatgatttgtagcactcaactggatcgagctcatggtgtttcttcttatgataccgtgatatcccgggacatccaggcccccgacgggcttgccgtggattggatccattctaatatttattggaccgactctgtgctcgggacagtgtccgtggctgacacaaagggtgtcaagagaaagaccttgttccgagaaaacggtagcaagccacgggccattgtcgtggatcccgttcacggcttcatgtactggaccgactgggggactcctgcaaagataaaaaagggcggcctgaacggagttgacatctacagtctggtcacagagaacatacaatggccaaacggaatcaccctggatttactgagcgggcggctgtattgggtcgactccaagcttcatagtatcagctccatagacgtgaacggtgggaaccgcaagaccatacttgaggacgaaaagcggttggcgcaccctttttccctggctgtattcgaggacaaagtcttctggaccgatattataaacgaggccattttcagcgccaatcggctgaccggaagcgacgtgaaccttttagccgagaacctgttgagcccagaggatatggttctcttccacaacctgacccagccaagaggggtgaactggtgcgaaagaactaccctgtcaaacggcgggtgtcagtacctgtgcctccctgctcctcagatcaacccgcattcgccgaagttcacttgtgcctgccccgatggcatgctgctcgcacgggacatgcggtcctgcttaactgaggccgaggccgcagtcgctacacaggagacctcaaccgtgcggttaaaagtcagttctactgcagtgcggacccagcatacaacgacacgcccagtgccagacaccagcagacttcccggagctactcctggactgaccaccgtagaaatagtgacaatgtcacaccaggcccttggggacgtggcgggccggggaaatgagaaaaagccttccagtgtccgggcactcagtatcgtcctgcctatcgtcctcctcgtctttttatgcctcggcgtgttcctgttgtggaagaactggcggctgaagaatatcaatagtataaatttcgataatcccgtgtaccagaaaaccacggaggatgaggttcatatctgtcacaaccaggatggatacagctaccctagtagacaaatggtctctctggaagacgatgtggcc

SEQ ID NO: 16228 - DNA, 2580 bp, synthetic construct
  misc_feature 1..2580: note = source = /note="Description of Artificial Sequence: Synthetic coding sequence"
  source 1..2580: mol_type = other DNA
atgggaccgtggggatggaaactgcgatggaccgtcgcactgttgctggcagcggcaggtacggcggtgggcgaccggtgcgaaaggaacgagttccagtgtcaagatgggaagtgcattagttacaaatgggtctgcgacgggtccgcagaatgtcaggatggctccgatgagtcccaggaaacctgtctgtcggtcacctgcaaatccggagacttctcgtgcggtggacgcgtgaacagatgtatccctcagttctggagatgcgatgggcaagtggattgtgataacggaagcgacgaacaaggatgccctcccaagacttgtagccaagatgagttccgatgccatgacggcaagtgcatctcacggcagttcgtctgcgattcggatagagattgcctggacggatccgacgaagcctcctgcccggttctgacctgcggcccggcgtcgtttcagtgcaactccagcacctgcatcccgcagttgtgggcgtgtgacaatgatccggactgcgaggacggatctgacgaatggccgcagagatgtcggggactctacgtgtttcagggcgattcctccccctgcagcgctttcgagttccactgcctgtcaggggagtgcatccactcgagctggcgctgcgacggaggcccggactgtaaggacaagtctgatgaggaaaattgcgctgtggcaacctgccggccggacgaattccagtgcagcgacggaaattgcatacatggatcccgccaatgcgatcgggaatacgactgcaaggatatgagcgacgaagtcggatgcgtgaacgttactctttgcgagggacctaataagtttaaatgtcattcgggggaatgcatcaccctcgataaggtctgcaatatggcacgcgactgccgcgactggtcagacgaacccatcaaagagtgcggcaccaacgcttgcctcgacaataacggaggatgctcccacgtctgcaacgaccttaaaatcggttacgagtgtctgtgcccggacggattccagctggtcgcccaacgcaggtgcgaggacatcgacgagtgtcaggacccagacacctgctcacaactgtgtgtgaacctggagggcggttacaagtgtcaatgtgaggaagggttccaactcgatccacacactaaggcttgcaaggccgtgggatcgattgcatacttgtttttcactaatcggcacgaagtgcggaaaatgaccttggaccgcagtgaatacacctccctgattccgaatctccggaacgtcgtggctctggacactgaagtcgcctcgaacaggatctactggagcgatctgagccagcgcatgatctgctcgactcagctggatcgggcgcacggtgtgtccagctatgacaccgtcatcagccgggacatccaggcccccgatggactggccgtggattggattcattcgaatatttattggaccgatagcgtgctcggcaccgtatcagtggctgataccaagggagtgaagcgtaagacccttttccgcgaaaacggttccaagccacgggcgatcgtcgtcgacccagtgcatggctttatgtactggacggactggggaactcctgccaaaatcaagaagggaggcctgaacggcgtggatatctacagcctcgtgactgaaaacatccagtggccaaacggaatcactcttgacctcctctcaggcagactgtactgggtggattctaagttgcattcgatttcgtcaatcgacgtgaatggaggaaatcgcaagaccatcctggaggacgaaaaacggctcgcccatccgttctcgttggccgtgttcgaggacaaggtgttttggactgatatcatcaacgaagccatcttctcggcgaatagattgaccggatcggacgtcaacctgctggccgagaacctgctctcaccggaggacatggtcctgttccataatctgactcagccgaggggggtgaactggtgcgaacgcactacgctgtcgaacgggggttgccaatacctttgccttcctgccccacagatcaaccctcactcgccaaagttcacctgtgcttgtcccgatgggatgctgctcgccagagatatgagatcgtgtctcaccgaagccgaggcagccgtggctacgcaggaaacttccactgtgcgtctcaaggtatcaagcactgcagttagaactcagcacaccactactcgcccggtgccggacactagccgcctccctggtgcgactccaggcctgacgaccgtggagatcgtcacgatgtcccaccaggcgctgggagacgtcgccggccgcggaaatgaaaagaaaccaagctcggtgagggcgctgtcaatcgtgctgccgattgtgcttttggtgtttctctgcctgggagtgttcctgctctggaaaaactggcggctgaagaacatcaactccatcaacttcgataaccctgtttaccaaaagaccaccgaagatgaagtgcacatctgccacaatcaagacggctactcatacccatcacgccaaatggtgtccctcgaggacgacgtggcc

SEQ ID NO: 16229 - DNA, 2580 bp, synthetic construct
  misc_feature 1..2580: note = source = /note="Description of Artificial Sequence: Synthetic coding sequence"
  source 1..2580: mol_type = other DNA
atggggccatggggatggaagctgcgatggaccgtggctctgttgctagccgccgcggggactgctgtgggagacagatgcgaacggaacgagtttcagtgccaggatggcaagtgcatctcctacaagtgggtgtgcgatggttcagctgagtgccaggatgggagcgacgaatcccaggaaacctgcctctccgtcacttgcaagtccggggatttctcctgtggtggcagagttaacagatgcatacctcaattttggcggtgtgacggacaagtggattgtgacaatggctctgatgagcagggttgcccccccaagacttgtagccaagatgaatttcgatgccacgacggcaaatgcatttcgcggcagttcgtttgtgattcggacagagactgcctggacgggtctgatgaagcgagctgtcctgtcctaacctgcggccccgcatcctttcagtgcaatagctccacctgcataccacaattgtgggcatgtgataatgatcccgactgtgaagacggatccgatgaatggccacagcgttgtagggggctgtatgtctttcagggtgacagtagcccgtgttcggcctttgagttccactgtctgtctggcgaatgtatccactcatcctggcggtgcgacggaggaccagattgtaaggacaaatccgacgaggagaattgtgctgtggccacctgccgcccggacgaattccaatgctcagacggcaactgcatccatggatcccgtcaatgtgatagggagtacgattgcaaagatatgagcgacgaagtgggatgcgtgaatgtaaccctttgcgaaggccccaacaaattcaagtgccatagcggagaatgcatcactctcgataaggtgtgcaacatggcccgggattgtagagactggagcgacgagccaatcaaggaatgtggaacaaatgcctgtctggataataacggaggatgctcacatgtctgcaatgatctgaaaattggctacgaatgcctctgcccagacggctttcaactggtggcgcagagaagatgcgaggatattgacgagtgccaagatcctgacacctgctcacagttgtgcgtcaaccttgagggcgggtataagtgtcaatgtgaagaggggtttcagctggatccccacactaaagcctgcaaagcggttgggtccatcgcatacctcttctttactaatcgacacgaagtccgcaaaatgacactcgaccggagtgaatatacaagcctgattcctaatctacgaaatgtggttgcactcgatacggaggttgcatctaaccgcatatattggtccgatttgtcccaaaggatgatctgcagcacgcaactggatcgggctcatggtgtgtcatcctacgacacagtcatctccagggacatccaagccccggatggccttgccgtggactggatacatagcaacatttattggactgattccgtactagggacggtgtctgttgcagacaccaagggggtaaagcgaaaaaccctattccgagagaatgggtctaagcctagggcgatcgtggtcgaccctgtacacgggttcatgtactggactgactggggtaccccagccaagatcaagaaggggggactcaacggcgtcgacatctatagcctagttaccgaaaacatacagtggcctaatgggataactcttgacctgttgtctggtagactgtactgggtggacagtaagctccattctataagctccatagatgtgaatggcggcaaccggaagactatcctcgaggacgaaaagcggttggcccatccctttagtctcgctgttttcgaggacaaggttttctggactgacatcattaacgaagcgattttttcagccaatcgcctgacggggtccgatgtgaaccttttggctgaaaacctcctttctcctgaagatatggtactctttcacaatctgacgcagcctagaggcgtcaattggtgtgaacgtaccaccttaagcaacgggggatgccagtatctgtgcttacctgcaccgcaaatcaacccacactcacccaagttcacctgcgcttgtccagacggaatgctgttggctcgagacatgcgtagttgcctgacggaggccgaagcggccgtggcaacccaggaaactagcactgtccgcctcaaggtcagcagcaccgcagtgagaacacagcatacgaccactcgaccagtgcccgatacgtcgcggttacctggggccacaccgggtctgaccacggtggagattgtgacaatgtcccaccaagccctcggtgatgtggctggtcgcggtaatgagaagaaaccatctagcgttagggccttgagcattgtactccctattgtactcctggtgttcctgtgtctcggggtttttctactttggaagaactggcggttgaagaatattaattccattaactttgacaatcccgtgtatcagaaaaccactgaagatgaagtccacatttgtcataaccaggacggttattcctacccatcccggcagatggtgtcgctggaggacgacgtcgct

SEQ ID NO: 16230 - DNA, 2580 bp, synthetic construct
  misc_feature 1..2580: note = source = /note="Description of Artificial Sequence: Synthetic coding sequence"
  source 1..2580: mol_type = other DNA
atgggtccctggggttggaagctcaggtggaccgtggcactgctccttgccgccgcgggtactgccgtgggtgatcgctgtgaaagaaacgaatttcagtgccaggacggaaagtgtatctcatataagtgggtctgcgacggaagcgctgaatgtcaagatggttcagacgaatcacaggagacctgcctcagcgtgacttgcaaaagtggtgacttcagttgtggaggtagggtaaaccgctgtattccacagttttggagatgcgatggacaggtggattgcgacaatggatctgatgagcaaggttgcccccccaaaacgtgctcccaggatgaattccgctgccacgacggtaagtgtatcagtaggcagttcgtgtgtgactccgaccgcgactgtctcgacggctctgacgaggcctcttgtccggttctgacatgtggccctgcttctttccagtgtaattcatctacctgcattccccaactctgggcctgtgacaacgatccagactgtgaggatggcagcgatgagtggcctcagagatgcagaggactctacgtattccaaggagactcctccccgtgcagtgcatttgaatttcactgcctgtccggcgaatgtattcattcttcttggaggtgcgacggtggcccagattgcaaagacaaatccgacgaggaaaattgtgccgtcgcaacgtgccgccctgatgaatttcagtgctcagatggcaactgcatccacggaagtaggcagtgcgacagggaatacgactgcaaggacatgagcgatgaggtcggctgcgttaatgtaacattgtgtgaaggtcctaacaagtttaaatgccacagtggcgaatgtatcaccctggacaaagtttgtaacatggcgcgcgactgcagagattggtccgacgagcctataaaagagtgcggcaccaatgcctgcctggataataacggaggttgtagccatgtgtgtaatgacctgaagatcggatacgagtgcctgtgtcccgacggttttcagctcgtcgcccagcgccgctgtgaagacatcgatgaatgccaagaccctgatacgtgctcacaactctgtgtgaacttggagggtggttacaaatgccaatgtgaggaaggcttccagttggacccccacactaaagcctgtaaggccgtgggctcaatcgcttacttgttctttactaatagacatgaggtgaggaagatgacactcgaccgcagcgagtacacgtccttgatacccaatctgaggaatgtcgtcgctctcgacactgaagtggcatcaaaccgcatatactggtccgatctgagccaaagaatgatttgcagtacgcaactggaccgcgctcacggagtgtcaagctacgatacagtcattagccgcgatattcaagcacctgacggcctggccgtggactggattcattctaacatttattggaccgacagcgtgctcggcacggtcagtgtggccgatacaaagggtgtgaagagaaagacgcttttcagagagaacggctcaaagccacgcgctatcgttgtggaccccgtgcatggcttcatgtactggaccgactggggcacacccgccaagatcaaaaagggaggactcaatggcgtggacatttactctctggtgactgagaacatccaatggcctaatggcataaccctggatctcctttccggaagactgtattgggttgattctaaactgcactcaatcagcagcatcgacgtcaacggtggtaacaggaagactattctcgaggacgaaaaaagactcgcgcaccccttcagcctcgctgtcttcgaagataaggtattttggaccgatatcatcaacgaggctatcttttccgccaaccgcttgacaggttcagatgtgaacctgctggcagagaacctgctgtcccctgaggacatggtcctgttccacaacctgacccaacctagaggtgtgaattggtgcgaaaggaccacccttagcaatggaggctgtcagtacctgtgcctgcctgcccctcagatcaacccccattcacctaagtttacgtgcgcctgcccagacggtatgctgttggcaagggatatgagatcatgcctgactgaggctgaagcagccgtggccacgcaggagacctccaccgtacgcctgaaggtttctagcaccgcagtgaggacacagcataccactactaggcctgtcccagacaccagtagattgcctggagccacgcccggccttactactgtggagattgtgacaatgtcccatcaagccctgggagacgtggccggcagaggtaatgaaaagaagccttcttccgtgagggccctgagtattgtattgccgatcgttctgttggtgtttctgtgccttggcgtgttcctcttgtggaagaactggagactgaagaacatcaacagtattaacttcgataacccggtctaccagaaaaccaccgaggacgaagtgcacatttgccataaccaggatggatacagctacccctctagacaaatggtctcacttgaagacgatgtagcc

SEQ ID NO: 16231 - DNA, 2580 bp, synthetic construct
  misc_feature 1..2580: note = source = /note="Description of Artificial Sequence: Synthetic coding sequence"
  source 1..2580: mol_type = other DNA
atgggtccttggggatggaaactgcggtggactgtggcactgctgctcgctgcggctgggacggcagtgggggatagatgtgagcgcaatgaatttcagtgccaggacggaaagtgtatctcatacaaatgggtctgtgatggctctgcggaatgccaagacggaagcgacgagtctcaggagacatgtctttctgtcacctgtaagagcggcgacttcagctgtggcggtagagtcaaccgctgtattccacagttttggcgatgtgatggccaggtagattgcgacaacggttctgacgaacaaggttgtccaccaaagacatgttcccaggacgaattcaggtgtcacgacggaaaatgtatttcacggcagttcgtatgtgatagtgatagggattgcctggacggcagtgacgaggctagctgtcctgtgctgacttgtggccccgccagctttcaatgtaattcatccacctgcatcccacagttgtgggcatgcgacaatgatcctgactgtgaggatggatccgatgagtggccacagagatgtcggggactgtacgtgtttcagggcgactccagcccttgttctgcattcgagtttcactgtctgtcaggagagtgcatacatagttcatggaggtgtgatggaggtccagactgcaaagataaatccgacgaggagaattgcgcagtagccacttgccgccccgacgaattccagtgtagtgacgggaactgtattcatggctcaagacagtgtgaccgcgagtatgattgcaaggatatgagtgatgaggtcggctgcgttaatgtcacactctgcgagggacccaacaaatttaagtgtcattccggcgagtgtatcacgctcgataaagtgtgtaatatggcccgagactgccgggattggagtgacgagcctattaaggagtgcggaactaatgcttgtctggacaataatggtggctgtagtcacgtatgtaatgatctgaaaatcggttatgagtgtctgtgccccgacggttttcagctggtggcacagcggaggtgcgaggacatcgacgagtgccaagatcctgatacatgcagccaattgtgcgtcaatctggaaggtggctacaagtgccaatgtgaagaggggttccagcttgacccccataccaaggcctgcaaagccgtgggctctatcgcctatctcttctttacaaatcggcacgaggtgcggaagatgactttggatcggtctgagtacactagcctgattcccaatctccgaaatgtggtagcacttgatactgaagtggcgagtaatcgcatctattggtctgacctgtcccaacgcatgatttgtagcacgcagttggatcgcgcgcacggcgtctcatcctatgataccgtgataagccgagatatccaagctcctgatggtctggcagtagactggatccatagcaacatttattggaccgactcagtcttggggaccgtgtcagtggctgataccaagggagtgaagaggaagactctgttccgagagaacggctcaaaaccaagagccatcgtcgtcgatcctgtgcacgggtttatgtactggacagattgggggaccccagcaaagattaagaagggggggctgaacggggtcgacatctatagcctcgtaacagaaaacatccagtggccaaacggaattaccctggatctcctgtctggtcgactttattgggtagattctaagttgcacagcatcagctcaatcgatgtcaacggcggtaacaggaagactatcctggaagatgagaaacgcctcgcacatcccttcagtcttgcagttttcgaagataaggtgttttggaccgacattataaacgaggccatcttcagtgcgaacagacttactggctcagacgtgaatctcttggccgagaacctgctgtctcctgaggacatggtgctcttccacaacctcactcagccgagaggtgtaaactggtgcgaaaggacaaccctgagcaacgggggctgtcaatatctgtgtctgccagctccccagatcaacccacattcccccaagttcacctgcgcctgccccgacggtatgctcctggctagagatatgaggtcttgcctgacagaggcagaagccgccgttgcaacgcaggagacctccaccgtgcggctgaaagtatcatccaccgccgtaagaactcagcacactactaccagaccggtccccgacacctccaggctgccaggagccacacctgggctgacaaccgtggaaatcgtgacaatgagccatcaagctctgggggacgtcgccgggagagggaacgagaaaaaaccctcctccgtgcgagccctgagcatagtgttgcccattgtgttgctggtgtttttgtgtctgggagtctttttgctctggaagaactggcggctgaagaatatcaatagtatcaacttcgacaaccccgtctaccagaagaccacagaagacgaggttcatatctgtcacaatcaggacggttatagctatccctctagacagatggtgagcttggaggacgatgtggct

SEQ ID NO: 16232 - DNA, 2580 bp, synthetic construct
  misc_feature 1..2580: note = source = /note="Description of Artificial Sequence: Synthetic coding sequence"
  source 1..2580: mol_type = other DNA
atgggaccgtggggctggaaattgcggtggaccgtggccctgctgcttgcggcagcgggaaccgcggtgggcgaccggtgtgagaggaatgaattccaatgccaggatggaaaatgcatctcgtacaagtgggtgtgtgacggatccgccgaatgccaagatggaagcgacgaatcgcaggagacttgtttgtcggtgacttgtaagtcgggcgacttctcgtgcggcgggcgcgtcaaccggtgcatcccccagttttggcggtgcgacgggcaagtggactgtgataacggtagcgacgagcaaggctgcccacccaagacttgctcgcaagacgagtttaggtgccacgatggcaagtgcatctcgagacaattcgtgtgtgatagcgaccgcgactgcctggatggctcagacgaggcttcctgcccagtgcttacttgtggcccagccagcttccaatgcaattcctctacctgcatcccgcaactctgggcgtgcgacaacgacccggactgcgaagatggatccgatgaatggccccagcggtgcaggggtctgtacgtgttccaaggagactcctcgccatgctcggcattcgagttccattgtctttccggcgagtgtatccactcatcgtggcgctgtgacggaggaccggattgtaaggacaagagcgacgaggaaaactgcgccgttgcgacttgtcggccggatgaattccagtgttccgatgggaactgcatccacggctcgaggcaatgcgaccgcgagtacgattgtaaggatatgtcggatgaagtgggatgcgtgaatgtgaccctgtgcgaaggtcctaacaagttcaaatgtcattcaggagaatgtattacccttgataaagtgtgcaacatggctcgtgattgtcgggattggtcggacgaacccatcaaagaatgcggcaccaacgcctgtctcgacaacaacggaggatgttcacatgtgtgcaacgacctgaaaatcggctacgagtgcctgtgcccagacggattccaactggttgcccagcgccgctgcgaggatattgacgaatgtcaggacccggatacttgctcccaactgtgtgtcaatctcgagggcggttacaagtgtcagtgcgaggaaggcttccagctggaccctcataccaaagcctgcaaggctgtcggctccatcgcatacctcttctttactaaccggcacgaggtcagaaagatgacccttgataggtcagagtatacttccctgatcccaaacctcagaaacgtggtggcactggatactgaggtggcgagcaatagaatctattggagcgatctgtcccagcgcatgatctgttcgactcagctcgatcgcgcccacggagtgtcctcttacgacactgtgatttcccgtgatatccaggcgccagatggactcgccgtcgactggatacactccaacatctattggactgactccgtgctgggcactgtgagcgtggccgataccaagggagtgaagcgtaagaccctgttccgggaaaatggctccaagccacgggctatcgtggtcgacccggtgcacggattcatgtactggaccgactggggaacgccggcgaagatcaagaaaggagggcttaacggagtggacatctactcgcttgtcaccgagaacatccagtggccaaatggtattacgctggatctgctgtcaggacgcctgtactgggtagattcgaagctgcattcgatttcatccatcgacgtgaacgggggcaaccgcaagaccatcctggaggatgagaaaagactcgcacaccccttctcactggcagtgtttgaggataaggtgttctggaccgacatcatcaacgaagccatcttttctgcgaacaggttgactggtagcgatgtgaacctgctggccgaaaatctgctttcacccgaggacatggtgctgttccacaatctgactcaaccgaggggagtcaattggtgcgaacggacgaccttgagcaacggaggttgtcaatacctctgccttccggcaccgcagattaatcctcactcgccgaagttcacctgcgcttgtccggatggaatgctgcttgcaagggacatgcggagctgtctgaccgaggccgaagcagccgtggcgacgcaggaaacttcgactgtgcggctgaaggtgtcaagtaccgctgtgcgcactcaacataccacgacccgcccggttcctgacactagccggctccccggagctactccaggactcaccacggtggaaatcgtgaccatgtcccaccaggctctgggcgatgtggccggacgcggcaacgaaaagaaaccttcatcagtgagagccctgtccatcgtgcttccgatcgtcctcctcgtgttcctttgcctgggagtctttctcctctggaagaactggagactgaagaatatcaattcaattaactttgacaacccggtgtaccagaaaaccaccgaggacgaagtgcatatctgccacaaccaggatggctactcgtacccatcccgccaaatggtgtcactggaggacgatgtggcc

SEQ ID NO: 16233 - DNA, 2580 bp, synthetic construct
  misc_feature 1..2580: note = source = /note="Description of Artificial Sequence: Synthetic coding sequence"
  source 1..2580: mol_type = other DNA
atggggccgtggggctggaaacttagatggacagttgctctcttgcttgctgccgcgggtacggctgtgggggataggtgtgaaaggaacgaattccaatgtcaggacggaaagtgcatcagttataagtgggtctgcgacggttcagctgaatgccaggacggaagtgacgaaagccaggaaacctgcctttccgttacttgcaagagcggagacttcagctgcggaggcagggtgaaccgctgcatcccacagttttggcgatgtgacggccaagtggactgcgacaacggcagcgacgagcagggctgccctcctaaaacttgttctcaggatgaatttagatgccacgatggcaagtgcatcagcagacagtttgtatgcgactccgatagagattgccttgatggctcagacgaagcaagttgcccggtgttgacctgtggtcctgccagcttccaatgcaactctagcacatgcatcccacagctgtgggcatgcgacaacgatcccgattgtgaggatggcagtgacgagtggccccagaggtgtaggggactatacgtgtttcagggagacagctctccatgtagcgctttcgaattccattgtttgtctggtgagtgtatccatagctcgtggagatgcgatggtggaccggattgcaaagataaaagcgatgaggagaactgtgctgttgccacatgcagaccagatgagtttcagtgctctgacggtaactgtatccacggttcaaggcagtgtgatcgcgagtatgattgtaaagatatgtctgatgaagtgggatgtgtcaacgttaccctgtgtgagggccccaataagtttaaatgccattcaggcgagtgtatcaccctggataaagtttgtaatatggcacgtgattgtagggactggtccgatgaacccattaaggagtgtggcaccaacgcatgcttggacaacaacggaggctgctctcacgtatgtaacgaccttaagatcggttatgaatgtctgtgccccgacggcttccagcttgtcgctcagaggaggtgtgaggacatcgatgagtgccaggatccagatacatgcagccagctgtgcgttaacttggagggagggtacaaatgtcagtgtgaggaaggatttcaactcgaccctcacacaaaggcttgcaaagctgtcggaagcatcgcctacctgttcttcactaataggcacgaagtcaggaaaatgacattggatagaagtgagtacaccagtctgatcccaaatctgaggaacgttgtggcactggacacagaggtcgcaagtaacagaatttactggagtgatctgagccaaaggatgatatgctctacccagctggatagggcccatggggtgtcatcatacgacacggttatatcccgcgacattcaagccccggatgggcttgcggtagactggatccactctaacatctactggactgatagcgttctgggcacagtaagcgtggccgatacaaagggagtgaagaggaagaccctgtttagagagaatggaagcaagcctcgggcgatcgtagtggacccggtgcatgggttcatgtactggaccgactggggcacaccagcgaagataaagaagggcggacttaacggcgtggacatttacagtctggtgaccgagaatattcaatggcccaacggcataacgctcgatctcctgagcggaaggttgtattgggtggacagtaagctgcattctatatccagcattgatgttaacggcggaaatcgcaagaccattctggaagacgagaaaaggctcgctcatccttttagcctcgctgtgtttgaagacaaggtgttttggacagacatcatcaacgaggcgatctttagcgcgaaccgactcaccggatccgacgtgaacctcttggccgagaatttgttgtctcctgaggatatggtcctgttccataacttgacccaaccacggggcgtcaattggtgtgagcgcacaaccctgagcaacgggggctgccagtatctgtgtcttcctgctcctcaaattaatccacactcacccaagttcacgtgtgcctgccccgatggcatgctcttggcaagggatatgaggagctgccttacagaggcagaagccgcagtagccacacaagagacaagcaccgtcaggctgaaggtgtcatcgaccgcggtgagaacccagcatactactactaggcctgtcccagacacaagcaggctccccggggctaccccggggttaacaacagtggagatcgtcaccatgtcacaccaagctttgggcgacgtggcgggaaggggcaacgaaaagaagccaagctccgttcgtgcactgagcatcgtgcttcctatcgtgctgttggtttttctttgcctgggcgttttcctgctgtggaagaactggagactgaagaacattaacagcatcaacttcgacaaccccgtgtatcaaaaaacaaccgaagatgaagtgcatatctgtcacaaccaggacggttactcataccccagcaggcaaatggtttccctggaggacgacgttgcc

SEQ ID NO: 16234 - DNA, 2580 bp, synthetic construct
  misc_feature 1..2580: note = source = /note="Description of Artificial Sequence: Synthetic coding sequence"
  source 1..2580: mol_type = other DNA
atgggcccgtgggggtggaagctccggtggactgtggcactcttgcttgccgccgcaggaacggccgtgggagatcggtgtgaacgcaacgagttccaatgccaggatggaaagtgcatatcctacaaatgggtctgcgatggtagcgccgagtgccaagatggctcagatgagtcccaggaaacctgcctctcggtgacgtgcaagtcgggtgacttctcgtgcggcgggcgggttaacaggtgtattccgcagttttggcgctgtgacggccaggtggattgcgacaacggatcggacgaacagggttgcccaccaaagacctgttcccaggatgagttcagatgtcatgacggcaagtgcatttcccggcaatttgtctgcgactcggatcgtgactgcctggacggctcggatgaagccagctgtccggtactgacctgcggccctgcctcgttccagtgcaactcatccacctgtatcccccagctgtgggcctgcgataacgacccggactgcgaggacggatcagacgaatggcctcaacgctgcagaggactgtacgtgttccagggagattcctctccttgctccgcctttgaattccactgcctgtcgggggaatgcatccatagctcatggagatgcgacggcggcccggactgcaaagacaagtcagatgaagagaactgtgctgtggctacttgtaggccagacgaattccagtgttcggacggaaattgtatccacggctcccgacagtgcgatcgtgaatacgattgtaaggacatgtccgacgaggtgggttgtgtgaacgtgactctctgcgagggaccgaataagtttaagtgccatagcggagaatgcataaccctggacaaagtctgtaacatggcgcgcgactgtcgggattggtcagatgagccgatcaaggagtgcggcaccaacgcgtgcctggataacaacggaggctgtagccacgtgtgcaacgaccttaagatcgggtacgagtgcttgtgcccggatggattccaactggtggcgcaacgccgctgtgaagatattgatgagtgccaggatcctgatacttgctcgcagctgtgcgtgaatctcgaagggggctacaagtgtcaatgcgaggagggattccaactcgacccgcacactaaagcctgcaaagccgtgggatcgatcgcttacctgtttttcacgaacagacatgaggtccggaagatgactctggaccggtcggagtacacttccttgatcccgaacctgcgcaacgtggtcgcgctggacactgaagtggcgtccaacaggatctactggagcgatttgtcgcagcgcatgatctgttcaactcagctggacagagctcacggagtgtcctcgtacgatactgtgatctcgagagatattcaggccccagatggcctggccgtcgactggattcattccaatatctactggactgatagcgtgctgggaaccgtgtcggtggccgacactaagggagtgaagcgcaagactttgttcagagaaaatggatccaagccgagagcaatcgtcgtggatcccgtccatggatttatgtactggaccgactggggcactcccgcgaagatcaagaaaggaggcctcaatggtgttgacatctactcgctggtgaccgagaatatccagtggccgaatggaataaccctggatctgctgtcaggtcgtctgtactgggtggattcgaaactgcactccatttcgagcatcgacgtgaatggaggtaaccggaaaactatcctggaggacgaaaagcgtctcgctcatcctttctccctcgccgtgttcgaggataaagtgttctggaccgacatcatcaacgaggcgatcttctcagccaacagactgacgggctccgacgtcaacctgctggcagaaaacctcctctcgccggaggacatggtgctcttccacaatctgacgcaaccacggggagtgaattggtgcgaaagaacgaccctctcaaacgggggatgccagtacctctgcctcccggcacctcagatcaacccacactcgccgaagttcacttgcgcttgtccggatggaatgctcctcgcccgggacatgagaagctgtttgaccgaggctgaggctgcagttgcgacccaggaaaccagcactgtgcgcctgaaggtgtcatcaactgcagtccggactcagcacaccaccacgcgcccggtgcctgacactagccgcctgccaggggctactcctggactgaccacggtcgagatcgtcactatgtcgcatcaggccttgggagacgtggcgggaagaggaaacgagaagaaaccctcgtcagtcagagcgcttagcatcgtgctcccgatcgtgctgctggtgttcctgtgccttggcgtctttctgctctggaagaattggcggctgaaaaacatcaacagcatcaattttgacaatcccgtctatcaaaagactaccgaggatgaagtgcacatttgccacaatcaggatggatactcctatccatcacgacagatggtatcactggaagatgacgtggcc

SEQ ID NO: 16235 - DNA, 2580 bp, synthetic construct
  misc_feature 1..2580: note = source = /note="Description of Artificial Sequence: Synthetic coding sequence"
  source 1..2580: mol_type = other DNA
atgggaccatggggatggaaactccgctggacggtggctctgctgctcgctgcggccggtacggccgtgggggaccggtgcgaaaggaacgaattccaatgccaggacggaaagtgcattagctacaagtgggtgtgcgacgggtcggccgagtgccaagacggatctgatgaatcacaggaaacctgtttgtcagtgacctgcaagtccggggatttcagctgcggagggcgagtgaacagatgtatcccgcagttctggagatgcgatggacaggtggactgcgacaatggatccgacgagcaaggctgcccacctaagacgtgttcacaagatgaatttaggtgccacgatggtaagtgcatcagccgccagtttgtttgcgactcggatcgagactgcctggatggatcagacgaagctagctgccctgtgctgacttgcggaccggccagcttccagtgcaactcgtccacctgcatcccgcagctgtgggcatgtgataatgacccagactgcgaggacggatccgatgagtggccacaacggtgccggggcctgtacgttttccagggcgactcgagtccgtgctcggccttcgaattccactgcctctctggagagtgcatccattcatcctggcgctgcgacggcggaccggattgcaaagacaagtccgatgaagaaaactgcgcggtcgcgacttgccgccccgatgaattccagtgctcagacggcaattgcatccatggatcgagacagtgcgaccgtgagtacgattgcaaggatatgtcagacgaagtggggtgcgtgaacgttactctgtgtgagggaccgaacaagttcaagtgccattccggagaatgtattactctcgacaaggtgtgcaatatggcccgcgattgcagagattggtcagacgaacctattaaggaatgcggaaccaacgcttgcctggataacaacggaggctgctcgcacgtttgcaacgacctgaagatcggatatgaatgtctgtgccctgatggcttccagctcgtggcacagcgccgctgcgaggacatcgacgagtgccaggatcccgacacctgttcgcaactgtgcgtgaatcttgaggggggatacaagtgccaatgcgaggagggattccagctggacccacacactaaggcttgcaaggctgtgggatcaatcgcttacctcttctttaccaaccgccatgaagtccgaaagatgaccctggatcggtctgaatacacctcgctcattccgaatctgcgcaatgtggtggccctggatactgaggtggcctcgaatcgcatctactggagcgacctctcgcagaggatgatctgcagcactcaactggatagagcccatggagtttcctcctacgatactgtcatctcacgggacatccaagcgcctgacggccttgcggtggactggatccactccaacatctactggactgattccgtgctcggtaccgtgtccgtggccgacaccaagggtgtgaagcgcaagactttgtttcgcgagaatggaagcaagccaagagccattgtagtcgatcctgtccatggattcatgtactggactgactgggggaccccggcaaaaatcaagaagggcggactcaacggcgtcgacatctactcgctcgtgactgaaaacatccaatggcccaacggaatcaccctggacctcctcagcggccgactttactgggtggactcaaagctccactcaatttcgagcatcgatgtgaacggtggaaaccgcaaaaccatcttggaagatgaaaagagacttgcccacccattcagcctggccgtgttcgaagataaggtgttctggaccgatatcatcaacgaagcaatcttctccgccaatcgcctgacgggatctgacgtcaatctgttggccgagaatttgctgtcgccggaggacatggtgttgtttcataatctgactcaaccaagaggggtgaactggtgcgaaagaaccactttgtcaaacggcggatgccagtacttgtgcctgcctgcgcctcaaatcaacccgcactcccctaagttcacctgcgcgtgtccagatggcatgctgctggcccgggacatgcggtcctgcctgacggaagcggaggctgccgtggccacccaagagactagcactgtgaggctgaaagtgagctccactgccgtgagaacgcaacacacgactactcggccggtccctgacacttcgagactgccgggagcaaccccaggcctgaccactgtggaaatcgtgaccatgtcccaccaggctctcggagacgtcgcaggacggggcaacgagaagaaaccgtcgagcgtgcgcgcactcagcatcgtcttgccaattgttctgctggtgttcctttgccttggagtgttcctgctctggaagaactggcgcctgaagaacatcaattcgattaacttcgacaatccagtctatcagaaaaccaccgaggacgaagtccatatctgtcataatcaagacggttactcgtatccgtcccggcagatggtgtcactggaggacgatgtggct

SEQ ID NO: 16236 - DNA, 2580 bp, synthetic construct
  misc_feature 1..2580: note = source = /note="Description of Artificial Sequence: Synthetic coding sequence"
  source 1..2580: mol_type = other DNA
atgggcccttggggatggaagctgaggtggactgtggccttgctactggcggcagccggcacggctgtcggcgatagatgtgagaggaacgagttccagtgccaggatggtaaatgcatctcttacaaatgggtttgtgacggcagtgcagagtgtcaagacgggtctgatgagagtcaggagacgtgcctgtcggtgacatgtaagtccggagattttagctgtgggggccgcgtcaatcgctgtataccacagttctggagatgcgacgggcaagttgattgcgataacgggagcgacgagcagggctgtcccccaaagacttgtagccaggacgaatttagatgtcatgacggaaaatgtatctccagacaatttgtctgcgattcagaccgcgattgtcttgatggatcagatgaagctagctgccccgtgctgacttgcgggcccgcttctttccagtgcaattctagcacctgtatccctcagctgtgggcttgtgacaacgaccctgattgcgaggacggctccgatgagtggccgcagcggtgcaggggactgtacgtgttccagggagactcaagtccctgttctgctttcgaatttcactgcttgtccggggagtgcatccatagcagttggagatgtgatggcggacccgattgcaaggacaaatccgacgaggaaaattgcgctgtcgccacctgtagaccagatgagttccaatgctccgatgggaattgcatccatggttctaggcagtgtgatcgggaatatgattgcaaagatatgagcgatgaagttggatgcgtcaacgtgaccctctgtgaagggccaaacaaatttaagtgccattctggcgaatgcataactctcgataaagtatgcaatatggcaagagactgtagagattggtccgatgagccaatcaaggaatgtggaacgaacgcgtgccttgataataatggggggtgttctcacgtgtgtaacgacctcaagatcggatacgagtgtctctgtcctgacggttttcagttggtcgctcagcgccggtgcgaggatatcgacgagtgccaggatccggatacgtgtagtcaactttgcgttaatttagagggtggttacaagtgtcagtgcgaggaaggtttccagctcgatcctcatacaaaggcgtgtaaggcagttggatcaattgcatatctgttcttcaccaatcgtcacgaggtgcggaaaatgacactggaccgctcagaatacacatcccttattcccaacctgcggaacgtcgtggcactggacactgaagtagcgtctaatcgcatctattggagtgacttgtcacaacgaatgatctgcagtacccagctggatcgcgctcacggggtgtcttcctacgataccgtcatctcccgtgatattcaggcacctgacggcctggctgtcgactggatccactccaatatatactggaccgacagcgtgctgggcaccgtgtctgtagcggatacaaagggtgtcaaacgcaagacactgttcagggagaatggcagcaaacctagggctattgtggtggatccagtccacgggtttatgtattggactgactggggtacccctgcgaaaatcaagaagggcggactcaacggagtggatatatatagtctggtgactgagaatattcagtggcctaatgggatcaccctggacctgctgagcggtaggttgtactgggtagacagcaaacttcactccatctcatcaatcgacgtcaatggcggcaaccgaaagactatcctggaggacgagaagcggcttgcccatcccttctctcttgccgtgttcgaggacaaggtgttctggaccgacatcatcaacgaggcaatcttcagtgcaaacagattaacaggctccgacgtgaacttactcgccgagaacctgctctcgccggaggatatggtattgtttcataatctgactcagccgaggggcgtcaattggtgcgagcggactacactgtctaatggtggatgccagtatctgtgtttgcccgcccctcagataaatccccattcgcctaagtttacgtgtgcatgcccagacgggatgctattggcacgcgatatgcggtcgtgtctcaccgaggcggaagccgccgtggccacccaggaaactagcaccgtacggctgaaagtttcttctactgctgtaagaacacaacacaccaccacgagacctgttccagacacaagcaggctgccgggggcgactccaggcctgacaaccgttgagatcgtgactatgtcccatcaggcactcggcgatgtggctggaaggggcaatgagaagaaaccctcaagcgtaagagcactcagcattgtgcttccgatcgttttactggtgttcctatgcctgggggtttttttgctgtggaaaaattggcggctgaaaaatattaactccatcaacttcgataatcctgtataccagaagaccaccgaagatgaagtacatatctgccacaaccaagatggatatagctacccatctcgacaaatggtgagcctggaagatgatgtagct

SEQ ID NO: 16237 - DNA, 2580 bp, synthetic construct
  misc_feature 1..2580: note = source = /note="Description of Artificial Sequence: Synthetic coding sequence"
  source 1..2580: mol_type = other DNA
atgggaccctggggctggaaacttagatggaccgtggcccttcttttggccgccgctggtaccgctgtcggagaccgctgcgaacgtaacgaattccagtgccaagacggtaagtgtatctcttataagtgggtgtgtgacgggtccgcagagtgtcaagacggtagcgatgagtctcaggaaacatgtctgtcggtcacgtgcaagtccggcgatttctcctgcggaggtcgtgtgaaccgctgcattccccagttctggcgctgtgacggtcaggtcgactgcgataacggaagtgatgagcagggttgtcctcccaagacatgctcccaggacgagttccggtgccatgatggtaagtgcatttcccgccagttcgtttgcgattcagaccgcgactgtctcgacggcagcgatgaggcctcgtgccccgtcctgacctgcggtccggcctcgtttcagtgcaactcttccacgtgcatccctcaactctgggcttgtgacaacgaccctgattgcgaggatggcagcgacgaatggccccaacgctgtcgtggactctacgtcttccagggtgacagttccccctgtagcgcgttcgaattccattgtctgtcaggcgaatgcattcatagtagttggcgctgcgacggaggacccgactgcaaggataagtccgacgaggagaactgcgcggtggccacgtgtaggccggatgagttccaatgcagtgacggaaattgtatccatgggtctagacagtgtgatagagagtacgactgcaaggacatgtctgacgaggttggctgcgtgaacgtcactctctgcgagggccccaacaagttcaagtgccacagtggcgagtgcatcacccttgataaggtgtgcaatatggcccgagattgccgtgactggtctgatgagcccatcaaggaatgcggaacgaacgcatgtttggacaacaacgggggctgttcgcacgtttgtaacgatctcaagatcggctatgagtgcctgtgtccggatggtttccagctggttgcgcagcgccggtgtgaagatatcgacgaatgccaggatcccgatacttgctcccagctttgcgtgaaccttgagggcggttataagtgtcagtgtgaggagggtttccagctcgatccccataccaaagcgtgcaaggctgtgggttcaattgcctacctgtttttcaccaatcgtcacgaggtccgcaagatgaccctcgaccgctccgagtatacctcgttgatccccaacttgcgcaacgtggtggcgcttgacaccgaggtcgcttctaaccgtatttactggagtgatctgagccagagaatgatctgctccacacagctggaccgtgctcacggtgtctcttcctacgacaccgttatctcgcgggacatccaggcacccgacggactagcggtcgactggatccattcaaatatctactggactgactcggtcctggggactgtgagcgtcgcggacaccaagggcgtgaaacgcaaaaccctgtttcgggagaacggttccaaaccgcgcgccatcgtggtcgaccccgtccacggattcatgtactggaccgattggggcacgcccgccaagatcaagaagggtgggctgaacggcgtggatatctactcactggtcacggagaacatccagtggcccaacggcatcacactcgacttgctcagcggcaggttgtactgggtcgattccaagctccattctatctccagcattgacgtcaacggcggcaatcggaagaccattctggaagacgagaagcgactcgcccacccttttagcctagcagtctttgaggacaaagttttctggaccgatattatcaatgaggccattttctccgccaatcgcctcacaggatccgacgttaacctgttagctgaaaacctgctgagtcccgaagatatggtccttttccacaacctcacgcaacctcgcggtgttaattggtgcgagcggaccactctgtcgaatggtgggtgccaatacctgtgtctccccgccccacaaatcaatccccactctcccaagttcacgtgcgcttgccccgatggaatgctgctcgcgcgcgatatgcgctcctgtctgacggaggcggaggcggcggttgccacccaggagacttcaactgttagactgaaggtttcgtcaacggctgtccgcacacaacacacaacaacgagacccgtgcctgacacgtcacgtctcccgggtgccacccctggactcactactgtcgagattgtcacgatgtcgcaccaggctcttggcgatgtggccggacgtggcaatgagaagaagccgagcagcgttcgagccctgtctatcgttctgcccatcgtactcctggtgttcctatgcctgggagtctttttgttgtggaaaaattggcgactcaagaacataaactccattaacttcgacaatcccgtctaccaaaagaccacagaagacgaagttcacatctgccacaatcaggacggctacagctacccgtcgcgccagatggtctctctcgaggatgatgtggcc

SEQ ID NO: 16238 - DNA, 2580 bp, synthetic construct
  misc_feature 1..2580: note = source = /note="Description of Artificial Sequence: Synthetic coding sequence"
  source 1..2580: mol_type = other DNA
atgggtccttggggatggaagctccggtggaccgtcgcactcctgctcgcagccgccggtactgcagtaggggatcgctgcgaaagaaatgaattccaatgccaagatggtaagtgcattagctacaaatgggtctgtgatggatcggccgagtgccaagacgggtcagatgagtcccaggagacgtgcctgtcagtgacctgtaagtcgggtgatttttcctgtggggggcgggtgaatcgatgtattccacaattttggcggtgcgacgggcaggtggactgtgacaatggtagcgatgaacaggggtgtccacctaagacctgcagccaggacgaatttagatgtcacgacggaaaatgcatttcaagacaattcgtgtgtgattcggatcgggattgtctggatggctcggacgaggcttcctgccctgtgctcacctgtggtccagcctcctttcaatgtaattcgagcacttgtataccacaactgtgggcctgtgacaacgaccctgattgtgaggacggatcggatgagtggccacagcggtgtcggggtttgtacgtattccaaggagattcaagcccttgttccgcatttgagttccactgtctgtcgggggaatgcatccactcgagctggcgatgtgacggtggcccggactgtaaggacaagtctgacgaggaaaactgtgcagtcgccacctgtagaccggatgagtttcaatgctcggacggaaactgcatacacggatccaggcaatgtgacagagagtacgattgcaaggacatgtcggacgaagtggggtgcgttaatgtcaccctgtgcgaaggccctaacaaattcaagtgccattccggagaatgcatcacccttgataaggtgtgtaacatggcgagagattgtcgtgactggtcggatgagcctataaaggagtgtggaaccaacgcatgcctggataacaacgggggttgctcacatgtctgcaacgatctgaaaataggatacgagtgtctctgtccagatggattccagcttgtggcccaaaggcgatgtgaagatatcgatgaatgtcaagatccagatacttgttcccagttgtgcgtcaatctcgagggaggctataagtgtcaatgtgaagaaggatttcaactcgatcctcataccaaggcgtgtaaggccgtgggttccatcgcatacttgtttttcaccaatagacacgaagtccgtaagatgactcttgaccgctcagaatacacttccctgatccctaatcttcgtaatgtggtcgcgctcgatactgaagtcgcatccaacagaatctactggagcgacctttcccagcgtatgatttgtagtacccaattggatcgggcgcatggagtgtcctcctacgatactgtgatcagccgtgatattcaagcgccagatggtcttgccgtggactggattcactccaacatttactggactgactccgtgctcggcaccgtgtccgtggctgatactaaaggggtcaagagaaaaactctgttcagggaaaatggttccaaaccaagagccattgtggtcgaccccgtgcacggttttatgtactggaccgactggggaactccagcgaagatcaaaaagggtggactgaacggcgtcgacatttactcacttgtcaccgaaaacatccagtggccaaatgggataacgctggatctgctttcgggacggctttattgggtggatagcaagctgcattccatctcctcaatcgacgtgaatgggggcaacagaaagactatactcgaggacgagaaacggctcgcgcatccttttagcctggcggtttttgaggataaggtcttttggaccgacatcatcaacgaggcaatcttttcggcaaacagattgaccggcagcgatgtcaacctccttgctgaaaacttgctgtcacctgaggacatggtcctcttccataaccttactcagcctcgaggtgtgaactggtgtgaacgcaccactctgagcaatggtggttgccagtacctgtgcctccctgccccgcagatcaacccacattcgcctaagtttacctgtgcgtgcccggatggtatgcttctggctagagatatgcgctcatgtctgaccgaggcagaggcagccgtggcgactcaggaaacctcaacggtgcgtctcaaggtgtcgtctaccgcagtccgtacccagcatactacgactcgacctgtgccagacacttcccggcttcccggcgcaaccccaggacttacgaccgtcgaaattgtgaccatgagccaccaggcactcggtgatgtggcaggacggggaaatgaaaagaagccatcctccgtgcgtgcactcagcattgtgctgcccatagtccttcttgttttcctttgtcttggagtgtttctcctttggaaaaactggcgcctcaagaatatcaactcaataaacttcgataacccagtgtaccaaaagaccaccgaagatgaagtccatatctgtcataaccaagatggctactcgtacccttccagacaaatggtgtcactcgaagatgatgtggct

SEQ ID NO: 16239 - DNA, 2580 bp, synthetic construct
  misc_feature 1..2580: note = source = /note="Description of Artificial Sequence: Synthetic coding sequence"
  source 1..2580: mol_type = other DNA
atgggcccctggggctggaagctgaggtggacagtggctctcctcctggccgccgccgggactgcagtaggcgaccgctgtgaaagaaatgagtttcagtgtcaggacggcaagtgcatatcttataaatgggtttgtgatggaagtgccgagtgtcaggacgggagtgatgaaagccaggagacttgcctgtctgtgacctgtaagtccggggatttctcttgcggcggccgggtgaatcgctgcatacctcaattctggcgctgcgacggccaagtggactgtgacaacgggagcgatgagcagggctgccctcccaaaacatgctcccaggacgagtttagatgtcatgacgggaaatgcatctccaggcagtttgtgtgcgactccgatcgcgactgcctggacgggtctgacgaagccagttgccccgtcctgacttgtggcccggctagtttccagtgcaactctagcacctgcattccacagctatgggcctgtgacaatgaccctgactgcgaggatggcagcgacgagtggcctcagcgctgccgcggattatacgtgtttcagggcgatagttctccttgcagtgcctttgaatttcactgcctctctggtgagtgtatacacagctcttggaggtgcgatggcggacccgactgcaaggacaaaagtgatgaagagaactgcgcagtggcaacatgcagacccgacgagttccagtgctccgatggcaactgcatccatgggtctcgccagtgcgatagagagtacgactgtaaggacatgtctgatgaagtcggctgcgtcaatgtcaccctgtgcgaggggcctaacaaatttaaatgtcatagcggagagtgtattacattggacaaagtttgcaacatggctcgggactgcagagattggtccgacgagcctataaaggagtgtggcaccaatgcctgtctagacaacaacggaggctgctcccatgtgtgtaacgatctgaagatcggatacgaatgcctatgcccagatgggtttcaactggtggcacagcggagatgtgaagacatagacgagtgccaggacccagacacttgtagccagctgtgcgtcaacctggagggcggttataaatgtcaatgcgaggaaggatttcagttagatcctcacaccaaggcatgtaaagcagtgggctctatcgcctacctttttttcaccaataggcatgaagtacggaagatgaccctggaccgcagcgagtatactagtctcatacctaacctgcgcaatgtggtggctctggacaccgaagtggctagcaatagaatttattggagtgacctgtcacagaggatgatttgctctactcagctggaccgtgcccacggagtgagtagttacgacacagtcatcagtcgggacatccaggcccctgacggtttggccgttgattggattcatagcaacatttattggaccgacagtgtcctgggaaccgtctctgttgccgataccaaaggtgtgaagcggaagactctgtttagagagaatggcagcaaaccacgcgccatagtggtcgaccccgttcatggttttatgtactggactgactggggtactcctgccaaaattaaaaagggggggctgaatggggtcgacatatatagcctggttactgagaacattcaatggccaaacggcatcacacttgatctcctctctggaaggctatattgggtggacagcaagttacactccataagcagcattgatgtcaacggcggcaaccggaaaaccatcctggaagacgagaagcggcttgctcacccttttagtttagccgtgtttgaggataaagtgttttggactgacatcataaatgaggctatcttcagcgccaaccgcctcactggcagcgacgttaatctgttagctgagaacctccttagtccagaagacatggtgctctttcacaatcttactcaaccaaggggggtcaactggtgcgagcggaccaccctgtcaaacggcggctgccagtacctgtgcctgcctgcacctcagattaacccacactctccaaagttcacctgcgcatgtcctgacggtatgctactggccagggatatgagatcctgtctcacagaggccgaggccgctgtggcaacacaagaaacttccaccgtccgcctcaaagtgtctagtactgcagttagaacccagcataccacaacccggcctgttccagacaccagcagactaccaggcgcaacacccggcctgacaactgtcgaaatagttaccatgagccaccaggctctcggcgatgttgctgggagaggaaatgaaaagaaaccctcctccgttcgtgctctgtctatcgtgctcccaattgtgctgctcgtgttcctgtgcctgggtgtgtttctgttgtggaagaactggagactgaaaaatataaatagcatcaatttcgataaccctgtctatcaaaaaactacagaggacgaagtccacatctgtcacaaccaggacggttatagctatccctccagacagatggtctccctcgaagatgacgtggcc

SEQ ID NO: 16240 - DNA, 2580 bp, synthetic construct
  misc_feature 1..2580: note = source = /note="Description of Artificial Sequence: Synthetic coding sequence"
  source 1..2580: mol_type = other DNA
atgggaccttggggatggaagctgcggtggactgtggctctgctgctggctgcggccggaactgctgtgggagatagatgtgagcgcaacgaattccagtgtcaggatgggaagtgcatttcctacaaatgggtttgcgacggctcagcggaatgccaagacggaagcgacgaaagccaggaaacgtgcttgagcgtgacctgcaaatccggagacttcagttgtgggggaagggtgaaccgctgcatcccgcagttctggcgttgcgacggccaagttgactgtgataatggatcagatgagcaaggatgtccgccgaaaacgtgctcacaagatgaatttcgatgccacgacggcaagtgtatttcccgccagttcgtgtgcgattccgatagagactgccttgacggatcggacgaggcttcatgcccggtcttgacttgcggtccagcatcattccagtgcaattcatccacctgcatccctcaactctgggcctgcgataatgacccggactgtgaggatggctcggacgagtggccgcaaagatgcaggggactgtacgtgttccaaggcgactcatccccgtgcagcgccttcgaatttcattgcctgtcgggcgaatgcatccattcctcttggcgctgcgacggcggacctgactgcaaggacaagtctgacgaggagaactgcgcagtggcgacctgccgacccgatgaatttcaatgctccgacggaaactgcatccacggttcgcgccagtgcgaccgcgagtacgactgtaaggatatgtcggatgaggtgggatgcgtcaacgtcaccctctgcgaaggccccaacaagtttaagtgccactccggagaatgcattactctcgacaaagtttgcaatatggctcgcgactgtcgcgattggtctgacgagccgattaaagagtgcggaactaacgcctgcctggacaataacgggggatgcagccacgtctgcaatgacctcaagatcggatacgagtgcctgtgcccggacggatttcaactcgtggcgcagcgtagatgcgaggatatcgatgaatgtcaggacccagatacttgctcccagctgtgcgtgaaccttgaagggggatacaaatgtcagtgcgaggaagggttccaactggacccgcacaccaaggcttgcaaggcggtcggatcaatcgcctatctgttctttactaaccgccacgaagtgcggaagatgaccctggaccggtccgaatacactagcctgatccccaacttgcggaacgtcgtggctcttgacaccgaagtggcctctaaccgcatctattggtccgatctgtcccaacgcatgatttgctcgacccagctggaccgcgcccacggggtgtcgtcgtacgacaccgtcatctcgcgggacatccaggccccggacggcctcgcggtggattggatacattccaacatctactggactgattccgtcctgggaacggtgtccgtcgcagataccaaaggagtcaagagaaagaccctctttcgagagaacggctcaaagccccgggccatcgtggttgacccggtgcatggatttatgtactggactgactggggcaccccggccaaaatcaaaaagggtggcctgaacggagtggacatctacagcctggtgaccgaaaacatacaatggccgaatggtatcactctcgatctgttgtcaggccggctgtattgggtggactcgaagctgcactcgatttcgtccatcgatgtcaatggcggtaatcggaaaactatcctggaggatgagaagagactggcccatccattctcccttgcggtgttcgaggacaaggtgttttggaccgacatcattaacgaggccatcttttcggccaatagactgactggctcggacgtgaacctcttggcggaaaatctgctttctccggaggacatggtcctgtttcacaatctcacccagcctaggggagtgaactggtgtgagagaaccactctgagcaacggaggatgccagtacctctgcctgccggctcctcaaatcaaccctcatagcccgaagttcacttgcgcatgcccagacggaatgctgctggctagggacatgcgtagctgtctgactgaagcggaagcggcggttgccacccaggagacttcaaccgtcagactgaaagtgagctcaaccgccgtgagaacccagcatacgactactcggcctgtgccggataccagcaggcttccgggagccaccccggggctgaccaccgtggagatcgtcacgatgtcacaccaagccctgggagatgtcgccggccggggcaacgagaaaaagccgagctccgtgcgcgcgctgtcgattgtgctcccgatcgtgttgctcgtctttctgtgcttgggcgtgttcctcttgtggaagaactggcggctcaagaatatcaactcgatcaacttcgataacccagtgtaccaaaagactaccgaggacgaggtgcatatctgtcataatcaggacggatacagctatccgtcgcgccagatggtgtccctggaggacgatgtcgct

SEQ ID NO: 16241 - DNA, 2580 bp, synthetic construct
  misc_feature 1..2580: note = source = /note="Description of Artificial Sequence: Synthetic coding sequence"
  source 1..2580: mol_type = other DNA
atggggccttggggctggaaacttcgttggaccgtggcacttctgcttgccgcagcaggcaccgccgtcggtgataggtgtgagcgcaacgaattccagtgtcaggatggaaagtgtatttcgtacaaatgggtctgcgatgggagcgcagaatgtcaagatggctcggatgaatcccaggaaacttgcctttccgtcacgtgtaaatcgggtgatttctcatgtggagggcgagtgaacagatgtattccacaattttggagatgtgacggacaagtggattgcgacaacggttcagatgaacagggctgtccccccaagacttgttcacaagatgaatttaggtgccatgatggtaagtgtatctcaaggcaatttgtgtgtgatagcgacagagattgtctggatggttcagatgaggctagctgcccagtcctgacttgtgggccggcatccttccagtgcaatagctcgacttgtatcccacagctttgggcatgtgataacgatccagattgtgaagatggatcggatgaatggccacagcgctgtaggggactttacgtgtttcagggagactcatcaccctgtagcgccttcgagtttcattgtttgtcgggagaatgcattcacagcagctggcggtgtgatggaggtcccgattgtaaggataaatcggacgaggagaactgcgccgtcgcaacttgtaggcctgatgaattccagtgcagcgatggaaactgcattcatggatcccgccaatgcgatcgcgagtacgattgtaaagatatgtccgatgaagtgggctgtgtgaacgtgaccctgtgtgagggtccaaacaaattcaagtgccattcgggcgagtgcatcaccctcgataaggtgtgtaacatggcgcgcgactgccgcgactggtcggatgagccaattaaggagtgtggtactaatgcctgtttggacaacaacggaggttgcagccatgtgtgtaatgatttgaagatcggctacgagtgtctctgtcctgatggctttcaactggtggcacagaggagatgcgaagatattgacgagtgccaggatcccgacacgtgctcgcagctgtgtgtgaatctggaaggagggtacaagtgtcaatgtgaggagggatttcaacttgatcctcacacgaaggcctgcaaggcggtgggatcaattgcatatctgtttttcactaatcgacacgaggtccgtaaaatgacccttgaccggagcgagtacacttccctgatccctaatcttagaaatgtcgtggcactcgataccgaagtcgcatctaatcggatttactggtccgatctctctcaaagaatgatctgctcaacccagctggatagggcacatggtgtttcatcgtacgataccgtgattagccgggatattcaagcacctgacggccttgcagtcgattggatccactcaaacatttactggactgactccgtgctcggaaccgtgtccgtcgcagatactaagggtgtcaaaaggaaaaccctctttcgtgaaaacggctctaagccaagagcaattgtcgtggacccagtgcatgggttcatgtactggaccgactggggaactcctgccaaaatcaagaagggagggctcaatggagtggacatttacagcctcgttaccgaaaacattcagtggccgaacggtataaccctggacctgctctcgggcagattgtactgggtggattccaagttgcatagcatttcatccattgatgtcaacggcggcaaccgaaaaacgattctggaagatgaaaagcgtctggctcatcctttttctctggcagtctttgaagataaagtgttttggactgacatcataaatgaggcaatctttagcgcaaaccgactcaccgggagcgacgtgaatcttctcgcagaaaacctgctttcccccgaggatatggtgcttttccacaatctcacgcaacccagaggtgttaactggtgcgagagaacgactctgtccaacggtggatgtcaatacctttgtctgccagcaccacaaatcaacccgcacagcccaaagtttacctgtgcatgtccggatggtatgttgctcgcacgggatatgagatcctgtcttaccgaggccgaagcagcagtggcgacccaagagacttccactgtgaggctgaaagtgtccagcactgccgttcggactcagcatactaccaccagacctgtgcctgacacttcccgtctcccaggagcaactcctggtctgacgaccgtggaaattgttaccatgtcccatcaggcactgggtgatgtggcaggacgcggaaacgagaaaaagccttcgagcgtgcgtgcactgtccatagtgcttccaattgtcctcctggtgtttctttgtctcggggtgtttctcctttggaagaactggcgtcttaagaacataaacagcattaacttcgataatcccgtctaccagaaaaccactgaagatgaagtgcatatctgccataaccaggatggctactcgtacccatcccggcaaatggtgtcactcgaagatgacgtggcg

SEQ ID NO: 16242 - DNA, 2580 bp, synthetic construct
  misc_feature 1..2580: note = source = /note="Description of Artificial Sequence: Synthetic coding sequence"
  source 1..2580: mol_type = other DNA
atgggtccttgggggtggaaacttcgctggaccgtggcattgctcctggcagcggcaggcaccgcagtcggtgatcgctgtgaacgtaacgaattccaatgccaagacggcaagtgcatctcttacaagtgggtgtgtgatggaagcgcggaatgtcaagatggatcggacgaatcacaagaaacctgtttgtcagtgacgtgtaagagcggggacttctcatgcggaggacgtgtgaacagatgtatccctcagttttggagatgtgatggacaggtggactgcgacaacggatcggatgaacaggggtgtccgcccaagacctgctcccaagatgagtttcggtgccatgacggcaaatgtatctctcggcagttcgtctgtgattccgatagagactgtctggacggttctgacgaagcatcgtgccccgtccttacttgcggacccgcatcgttccagtgtaattcctccacttgtattcctcagctttgggcctgcgataatgatccggactgtgaggacggatcagatgagtggccgcagaggtgccgtggcctttacgtgttccaaggtgattcgtcgccgtgttcggcttttgagtttcactgccttagcggcgaatgtattcactcgtcatggcgctgtgacggcgggcctgattgtaaggataagagcgatgaggaaaattgtgcagtggcaacctgtcgaccagatgaatttcagtgctcggatggcaactgcattcatggatcgcgccagtgtgatagagaatacgattgtaaagacatgtcagatgaggtgggctgtgtcaacgttactctctgcgaaggaccaaataagtttaagtgccatagcggagagtgcataaccctcgataaagtgtgcaacatggccagagattgtcgcgattggtcagacgaacctattaaggaatgtggtactaacgcctgcctcgataacaacggtggatgctcgcatgtgtgtaatgatttgaaaattggttacgaatgtctgtgccccgacggatttcaactggtggcacagagacggtgcgaggatattgatgagtgtcaagaccccgatacctgttcacaactctgtgtgaatctcgaaggcggttacaaatgccagtgtgaagaaggttttcagctcgatccccatacgaaggcgtgtaaggccgtgggtagcatcgcatacctgttcttcacgaatagacatgaggtgcggaagatgactctggatcgatccgaatacaccagcctcataccgaatctgcgcaacgtggtcgcccttgatactgaggtcgcttctaacaggatctactggtccgatctttcgcagaggatgatatgttccacccagcttgacagagcgcatggagtgtcgagctacgataccgtgatctcacgggatatacaggcaccagatggtctggccgttgattggatacacagcaatatctactggactgactcggtgcttggaactgtgtcagtggctgacaccaagggagtgaagaggaaaaccctcttccgagaaaacggttcgaaaccccgcgcaatcgtggtggatccagtccacgggtttatgtattggaccgactggggaactccagccaagattaagaaaggaggtttgaacggggtggacatttactctcttgttactgagaacattcaatggcctaatggcataactctcgaccttctcagcggaaggctgtattgggtggattcgaagctccactcgatttcttccatcgacgtgaatggcgggaatagaaagactattcttgaggacgaaaaacgtctggcgcatccgtttagcctcgcagtctttgaggacaaagtcttttggacggatatcattaatgaggcgatcttttcggcaaacagacttactggtagcgatgtgaaccttcttgcggagaacctgctttccccggaggacatggttctctttcacaacctgactcagccacgcggggtgaactggtgcgaaagaaccactctttcgaatggaggatgtcaatacctttgtctgcctgcaccacagattaacccacatagccctaagtttacctgtgcctgtcctgatggtatgctgctggcacgtgatatgcgttcctgtttgactgaggccgaagcggcagtcgcaactcaggaaactagcactgtcagactgaaggtgtcgagcactgcagtcagaacccagcacactacgacccgaccagtccccgacacgtcacggttgccaggtgctaccccaggtctgaccactgtggaaatcgtgactatgagccaccaagctcttggagatgtggcaggccgcgggaacgaaaagaaacctagcagcgtccgcgccctctccatcgtgctccctatcgtcctgcttgtctttctctgcttgggagtgttcttgttgtggaagaattggcgtctgaagaacatcaacagcattaacttcgacaaccctgtgtaccaaaagaccactgaagatgaagtgcatatctgtcacaaccaagatgggtactcctacccatcacggcagatggtgtcccttgaggacgatgtggcc

SEQ ID NO: 16243 - DNA, 2580 bp, synthetic construct
  misc_feature 1..2580: note = source = /note="Description of Artificial Sequence: Synthetic coding sequence"
  source 1..2580: mol_type = other DNA
atgggtccttggggatggaagctgcggtggaccgtggccctcctgcttgccgccgcgggtactgcggtgggagatagatgtgagagaaacgaatttcagtgtcaagatggaaagtgcatcagctacaagtgggtctgcgacggatcggccgaatgccaagacggatccgatgagtcgcaggaaacttgcctgtcagttacttgcaagtcgggcgatttctcgtgtggaggaagagtgaatcgctgcattccgcagttctggagatgcgacgggcaggtggactgcgataacggaagcgatgagcagggctgcccgccaaaaacttgttcgcaagatgagttccgctgtcatgacgggaagtgcatctctcgccaattcgtctgcgactcagatcgcgattgtctggatggctcagacgaagccagctgccccgtgctcacttgtggaccagcatcattccagtgcaattcctcaacgtgcatcccccagctttgggcgtgtgacaatgatccagattgcgaggatggttcggatgaatggcctcaacggtgcaggggcctctacgtgttccagggggattcctcgccgtgttccgcattcgagttccattgcctcagcggagaatgcatccatagctcttggcgctgtgatggaggtcccgattgcaaggataaatcggacgaagaaaactgcgccgtggcaacttgccgccctgatgaattccaatgttcggacggaaattgcatccacggatcccgccagtgcgacagggaatatgactgcaaggacatgtcagatgaggtcggttgcgtcaacgtgactctgtgcgagggtcctaataagttcaagtgtcattccggcgaatgcatcaccctggataaggtgtgtaacatggctagagactgcagagattggtcggatgaaccgattaaggaatgcggaactaacgcatgcctcgacaacaacggcggatgctcccacgtgtgtaatgacctcaaaattggatacgagtgcctgtgcccggacggattccagttggtcgcccagagacgctgcgaggacatcgacgagtgtcaggacccggatacttgctcgcagctgtgtgtgaatctcgagggcgggtataagtgccagtgcgaggaaggcttccagctcgacccacatactaaggcttgcaaggcggtgggctccatcgcatacttgtttttcactaacagacacgaggtccggaagatgaccttggaccggtcagagtacacctctctgatccccaacctgcgcaatgtggttgcacttgatacggaggtggcgagcaataggatctactggtcagatctgtcacagcgcatgatttgcagcactcagctggaccgggcacacggagtgagctcctacgataccgtcattagcagggatatccaagcacccgacggactggctgtggattggatccactcgaacatctattggacggattcggtcctcggtaccgtgtcggtggccgacaccaaaggtgtcaagcgcaagaccttgttccgggagaacggaagcaagccgagggcgatcgtcgtggacccagtgcacggattcatgtactggacggactggggcaccccagccaagatcaagaagggcggattgaacggagtcgacatatactcacttgtgactgaaaacattcaatggccaaacgggatcactctggacctcttgtcaggacggctttactgggtggattcaaaattgcactcgatctcctcaattgacgtcaacggaggaaacagaaagaccatcctcgaggacgaaaagagactggcacatccatttagcctcgcggtgttcgaggacaaagtgttctggactgacatcatcaacgaggcgattttctcggcgaaccgtctcactgggtcagatgtcaacttgctggccgagaatctgctgagcccggaggacatggtgctgtttcataatctgacccagccgcggggggtcaactggtgcgaacgcactacgctctcaaacggaggctgtcagtacctgtgtctcccagccccgcagatcaatcctcattcgccaaaattcacctgcgcctgccctgacggcatgctccttgcccgagatatgaggtcctgcctgaccgaggccgaggccgctgtggcaactcaggaaacctcgaccgtgcgactgaaagtctcctcaactgccgtgcgcacccagcacactactaccaggccggtgccggacacttcccgcctgcccggagctacgccgggactgactaccgtggagatcgtgactatgtctcaccaggcactcggtgatgtcgctggtcggggtaacgaaaagaagccgtcaagcgtgcgggcgcttagcatcgtgctcccgatcgttctgctggtgttcctgtgcttgggggtctttctgctgtggaaaaactggcggttgaagaacatcaattccatcaatttcgataatcctgtgtaccagaaaaccaccgaggacgaagtccatatctgtcacaatcaggatgggtattcgtacccatctaggcaaatggtgtcccttgaggatgacgtcgcg

SEQ ID NO: 16244 - DNA, 2580 bp, synthetic construct
  misc_feature 1..2580: note = source = /note="Description of Artificial Sequence: Synthetic coding sequence"
  source 1..2580: mol_type = other DNA
atggggccctggggctggaaactgcgctggacagtggccctcttgcttgcagcggcagggacagccgtcggggatcggtgtgagcgaaatgagtttcagtgccaggatggaaagtgcatcagctataaatgggtgtgtgacggaagtgctgagtgtcaggacggctccgacgagtcccaggaaacttgcttgtcagtgacctgtaagtcgggggatttctcttgcggggggcgggtcaatcggtgcatcccccagttttggaggtgcgacggccaggttgattgcgacaacggaagcgatgagcagggctgcccacccaaaacatgttcacaggatgaatttcggtgtcacgacggaaagtgtatctcccggcagttcgtatgtgatagcgatagggattgcctagacgggtcagatgaggcctcttgccctgttctgacatgcggacccgcctcattccagtgcaacagtagtacctgtattccccagctgtgggcctgtgataatgatccagactgtgaggacgggtctgacgagtggccgcagcgctgtcggggattatatgtgtttcagggagacagtagcccctgcagcgcgttcgagtttcactgcctcagtggcgaatgcattcacagtagttggagatgcgacgggggacccgactgcaaggacaagagcgatgaagagaactgcgcggtcgcaacatgccgtccagacgagttccagtgctcagacggcaactgtatccatgggtctaggcagtgtgatcgtgagtacgactgcaaggacatgtcagacgaagttgggtgtgtcaatgtgaccttatgcgagggaccaaacaagtttaaatgtcatagcggggagtgcatcaccctggacaaggtctgcaacatggcacgtgactgtagagattggtctgacgagccaatcaaggaatgcggaacaaacgcttgtttggataataatggtggctgctcccacgtgtgtaacgatttaaaaatcggttacgaatgcctgtgtcccgatggctttcagctcgtagcccagcggaggtgcgaagatattgacgagtgccaggacccagatacctgttcccagctatgcgttaacctggaaggaggttacaaatgccagtgcgaggaagggttccagctggatccgcatacgaaggcgtgcaaagccgtggggagcatcgcatatctgttcttcacaaacaggcatgaggtcagaaaaatgactttggatcgctctgagtacacgagtttgatccccaacctgcgaaatgtcgtcgcactagatacagaggttgcaagcaatagaatctactggagtgatctgtcacagaggatgatttgtagcacccagcttgaccgagcccacggcgttagttcttatgatacggtgatatctagggacatacaggcgccggacgggctggcagtggattggatccatagcaacatatattggacagactcggttctcggcacagtctccgtcgccgacaccaagggcgtgaagagaaaaactcttttccgcgaaaatggaagtaagccccgtgctatagttgtggatcccgtacatggttttatgtactggactgattgggggacccccgccaagatcaaaaaaggcggactgaatggagtagacatttattccctcgtgacagagaacatccagtggcccaatggtatcactctcgacctgctgtctggccgactgtactgggtagatagcaagctgcacagcatttcctccatcgatgtcaacggcgggaacagaaagacgattttggaagacgagaagaggcttgcccacccgttttccctggcagtgtttgaagataaagtgttttggaccgatatcatcaatgaagccatcttttctgccaacagactaaccggtagcgacgtaaacctgctcgccgaaaacctgctgtcacccgaggacatggtcttgttccacaatttaacgcagccccgcggcgtcaattggtgcgagcggactacattgagtaacggaggatgccagtatttgtgcctcccggcaccgcagattaacccccatagtccgaagtttacatgcgcttgccctgatggtatgctactggcacgggacatgcgttcttgtctgaccgaagccgaggcagccgtggccacacaggagacctctacagtgagactgaaggtgtcgtccaccgcggtgcggacacagcacacaaccacacgccctgtccccgacacctcaaggctgccaggggccacaccagggctcacaaccgtcgagatagtcaccatgtctcatcaggccctgggcgacgtagcagggaggggtaatgagaagaaaccctcaagcgtcagagcactgtcaattgtcctgccaattgttctgctggtttttctgtgcttgggcgtgtttctgctgtggaagaattggcgcctgaagaacatcaattcaatcaatttcgataatccagtgtatcagaaaaccaccgaggacgaggttcatatctgccacaaccaggacggttactcctacccgtcccgccagatggttagcttagaggatgacgtggct

SEQ ID NO: 16245 - DNA, 2580 bp, synthetic construct
  misc_feature 1..2580: note = source = /note="Description of Artificial Sequence: Synthetic coding sequence"
  source 1..2580: mol_type = other DNA
atggggccatggggatggaaacttcgctggaccgtggcactccttcttgccgctgcaggaaccgcagtcggagatcgatgtgagagaaacgagttccagtgtcaggatggaaagtgtatttcgtataagtgggtgtgtgatggctcagctgaatgtcaagatggttcggatgaatctcaagaaacgtgtctgtcagttacctgtaaatctggagatttctcgtgcggtggaagagtaaacagatgcatcccacaattttggagatgcgacggacaggtggactgtgataacggatccgacgagcaaggttgccctcccaaaacctgctcccaggacgagtttagatgccacgacggaaagtgtatctcgagacagtttgtgtgtgacagcgatcgggattgtctcgacggctcagatgaagcaagctgccctgtgcttacctgcggtcctgcatcctttcaatgcaacagctcgacctgtattccacagctttgggcctgtgataacgaccccgactgtgaagatggatcagacgaatggccgcagcgttgccggggactctacgtgttccaaggcgattcatcaccctgcagcgctttcgagttccattgtttgagcggtgaatgcatccattcctcctggaggtgcgatggcggtcctgactgtaaagataaatcggacgaagagaattgtgcagtggccacctgccgacctgacgaattccagtgcagcgatggcaattgtatacatggatcgagacagtgcgaccgtgaatacgattgcaaggatatgtccgacgaagtcggatgcgtgaacgtgactctctgtgaaggcccgaataagttcaagtgtcatagcggggaatgcatcactctggataaggtgtgtaatatggcaagagactgccgcgactggtctgatgagcctataaaggaatgtggaaccaacgcctgtctcgataacaacggtgggtgctcccatgtgtgtaacgacctcaaaattggctacgaatgcctctgtcctgatggatttcagctggtggcgcagcgaagatgtgaggatattgatgagtgccaggaccctgacacctgttcccaactttgtgtgaacctggaaggaggctacaaatgtcaatgtgaggaaggattccaacttgatcctcataccaaggcatgtaaggcagtgggcagcatcgcctacctgtttttcactaacagacatgaggtgagaaagatgactcttgatcggtcagaatacacttcgcttataccaaatctgagaaacgtcgtggctctggatactgaagtggcatccaataggatttactggtcggaccttagccagcggatgatttgctccacccaactcgatagagcccatggcgtgtcgagctacgacaccgttatttcacgggatattcaagcccctgatgggcttgccgtggactggatccattctaacatatactggactgattcggtcctgggtaccgtgtcagtggccgataccaaaggcgtcaagcgtaagaccctttttcgcgagaacggatccaagccacgagcaattgtggtggatcctgtgcacggattcatgtactggacggattggggcacccccgcgaagatcaagaaaggtggtcttaatggtgtggacatctattcgctcgtcaccgaaaacatccagtggccgaacggtattacgttggatctgctgtcgggacgcctgtactgggtggatagcaaacttcactcaatttccagcatcgatgtgaacgggggaaaccgcaagaccattcttgaagatgagaagcgtctggcacaccctttttccctcgcagtgtttgaagataaagtgttttggaccgacattatcaacgaagccattttctcggcaaaccgcctcacgggcagcgatgtgaatttgttggccgagaatctgctcagtccggaagatatggtcctgtttcacaatctgactcagcccagaggtgttaactggtgtgagcgcaccaccctttccaacggcggctgccagtacttgtgccttcctgccccccaaatcaatccgcacagcccgaaattcacctgtgcatgtccagatggtatgctgctggcacgtgatatgaggtcctgccttaccgaagcggaagcagccgtggccacccaggaaacctcgactgtcagactgaaagtctcctccaccgcggtgcggactcaacacaccaccacgaggcctgtccctgatacttcccggcttcccggagcaactcctggattgactactgtcgaaattgtgaccatgagccaccaggcactcggtgacgtggcaggacggggtaacgaaaagaagccctctagcgtgagagccttgtctatcgtactcccaattgtgcttcttgtgtttttgtgcctgggcgtgttccttctgtggaaaaactggcgacttaagaacataaactcgatcaattttgacaacccggtttaccaaaaaacgactgaagatgaggtgcatatttgccataatcaagatggatacagctacccttcacgacagatggtcagcctcgaagatgatgtcgca

SEQ ID NO: 16246 - DNA, 2580 bp, synthetic construct
  misc_feature 1..2580: note = source = /note="Description of Artificial Sequence: Synthetic coding sequence"
  source 1..2580: mol_type = other DNA
atggggccatgggggtggaagctcaggtggaccgtggcactgctattagctgccgccggaactgctgtgggagatcggtgtgaacgcaatgagttccaatgccaggacggcaaatgcatctcctacaaatgggtttgcgacggttctgccgaatgtcaggatggaagcgacgaaagccaggagacttgcctttccgttacatgtaaaagtggcgacttttcctgcggcggccgcgtgaacagatgcataccccagttctggcgttgcgacgggcaggttgactgtgataacggatctgatgaacagggctgtccacctaagacctgctctcaggacgaattcaggtgtcacgatggcaaatgcatttcgcggcagtttgtctgcgattctgaccgcgactgcttagacggttctgacgaggcatcctgtccagtcttgacttgtggcccagcaagttttcagtgcaactcatcgacatgcattcctcagctctgggcatgtgataacgacccagactgcgaggacggttccgatgagtggccacagaggtgtagagggctgtacgtgttccagggggactcttctccatgctccgcattcgagttccattgcctttccggagagtgtatacactcaagttggcggtgtgatgggggccccgattgtaaggacaagtctgacgaggaaaactgcgctgtggcgacctgcagaccggatgaatttcagtgcagcgacggtaattgtatccacggaagtcgccagtgcgatagagagtacgactgtaaagacatgtccgatgaggttggctgcgtgaatgttacactgtgtgaaggacctaacaagttcaaatgtcactctggagaatgtataaccctcgacaaggtttgcaacatggccagagactgtcgggattggtctgacgaacctatcaaggagtgcggaacgaatgcttgcttggataacaatggcggatgttcccatgtgtgcaatgatctcaaaatcgggtacgagtgtctgtgccccgacgggtttcagctagtggcccagcgcagatgtgaggatatcgatgaatgtcaggaccctgatacctgttcccagctgtgtgtgaacctcgagggcgggtataagtgccagtgcgaagaggggttccagctggatccccacaccaaggcatgtaaggcagtgggctctatagcctatctgttcttcacaaatcgccacgaggtgagaaagatgactctggaccggtccgagtacacctccttaataccgaacttgcggaacgtggtggcgctcgataccgaagtcgcttcaaacaggatctactggagcgatctttctcagaggatgatttgcagtacgcagcttgatcgtgctcatggcgttagctcgtatgataccgtcatctcgagggacatccaggccccagacggattggcggtggactggatccattcaaatatttattggaccgatagcgttttggggaccgtgtcagtggccgatactaagggcgtaaagcggaagaccctatttagggaaaatggctcaaaaccccgcgccatcgtggtggaccccgtccacggattcatgtattggacggactgggggacacccgccaagatcaaaaagggagggttgaatggcgttgacatttattctctggtgacagagaatatacagtggccaaacggaatcacccttgaccttcttagcggcaggctctattgggtggattccaaattacacagtatctcatcaatagacgtcaacgggggaaatagaaagacaatcctcgaagacgagaagcgcttggctcaccccttttcgctcgcagtcttcgaagataaagttttttggacagatataataaacgaagccattttttctgccaaccgattaaccggaagcgatgttaatcttctggccgagaacctgctgtcccctgaagacatggtcttgttccataatctgactcagcctaggggggtcaattggtgcgagaggacaacccttagcaacgggggctgtcagtacctgtgtttgccagccccgcagatcaatcctcactcccctaaatttacttgcgcctgccccgacggcatgctgctggctagagatatgagatcctgcctgaccgaagcggaggcggcggtcgcgacccaggaaacatcaactgtgaggctgaaagtttcatccaccgcagtgcggacccaacacacaaccacgagaccagtcccagatacatctcggctgccaggggccacacccgggctgacaacagtcgaaatagtcaccatgagccaccaggccctgggggacgtcgccggcagaggaaacgagaagaagccttcctctgtgcgggccctgtctatcgtgctgcctatcgtactgctggtgttcttgtgtttgggagtctttctcttgtggaaaaattggcgactcaagaatattaacagcattaactttgataatcccgtatatcagaagactactgaggacgaggtacacatttgtcataatcaggatggctattcatatccctcacgccagatggtgtccctggaggacgatgtcgca

SEQ ID NO: 16247 - DNA, 2580 bp, synthetic construct
  misc_feature 1..2580: note = source = /note="Description of Artificial Sequence: Synthetic coding sequence"
  source 1..2580: mol_type = other DNA
atgggaccttggggctggaaacttcgctggaccgtggcccttcttttggctgcagctggaaccgcagtgggcgatcgttgcgaaagaaatgagtttcaatgtcaggatggtaaatgtattagctacaagtgggtgtgcgatggatccgcggaatgtcaagatgggtcggatgaatcccaggagacttgtctgagcgtcacgtgtaagtcaggagatttttcgtgtggaggaagagtgaaccgatgcattcctcagttttggcgctgcgatggacaggtcgattgtgacaacggttcggatgagcagggttgtcctcctaagacctgtagccaagatgagttccgatgccacgatggtaagtgcatatcgagacaatttgtgtgtgactcagatcgggactgtcttgatggaagcgatgaagcgtcatgccctgtcctgacctgcggaccagcatcctttcaatgtaattcgagcacctgcatcccacaactctgggcatgtgacaacgatcccgattgtgaagatggtagcgatgaatggccacagcgctgtcgcggtctttacgtctttcagggagattcctcaccatgttcggcatttgagtttcactgtcttagcggagaatgcatccactcgtcgtggcggtgcgacggaggaccggattgtaaggacaaatccgatgaagaaaattgcgcggtcgctacttgtcgaccggatgaattccagtgtagcgatggaaactgcatccatggttcaaggcagtgtgacagagaatacgattgcaaggatatgagcgatgaggtgggctgtgtgaatgtaaccctttgtgaaggacctaacaagtttaagtgccattcgggcgaatgcattactcttgacaaggtttgcaatatggcacgtgattgtcgtgactggtcggacgaaccaattaaggagtgcggaaccaacgcatgcctggataacaacggagggtgctcacacgtctgcaacgatcttaagattggatacgaatgtttgtgccccgacggattccaactggtggcgcagcggcgatgtgaagatatcgatgagtgtcaagaccctgacacttgctcccagctgtgcgtcaacctcgaaggaggatacaagtgtcagtgcgaggaaggctttcaactcgatcctcatactaaggcatgtaaagcagtgggttcaatagcatacttgtttttcaccaaccgacatgaagtgagaaaaatgacccttgatcgatcggaatatacctcgctgatcccaaaccttaggaacgtggtggcactcgatactgaagtggcttccaacaggatttactggtcagatctgtcgcagcgcatgatttgctccactcaactggaccgcgcacatggagtgtcctcgtacgatactgtgatctcccgcgacatccaggcccctgacggtcttgcggtcgactggatccattcgaatatctactggaccgattccgtgctggggactgtgtcggtggccgatactaagggcgtgaagagaaagaccctttttagggaaaacggttcgaaaccgagagcgattgtggtcgacccagtgcatggctttatgtactggaccgactgggggaccccagccaagataaagaaaggtggactgaatggagtggacatctactcactcgtcacggagaacattcaatggccaaacgggatcactcttgacctgctttcgggcagactgtactgggtggatagcaagctccattccattagttcaattgacgtaaacgggggtaatcgaaaaactatacttgaagatgagaagcgactcgcacatccctttagcctggcagtgtttgaggataaggtgttttggactgacataatcaacgaagccattttctccgcaaacagactgaccgggagcgacgtgaatttgcttgctgaaaacttgctgtcaccagaggatatggtgctgtttcataacctgacccagccccgtggtgttaactggtgtgagcgaactaccctgtcgaatggaggttgccaatacttgtgcctgcctgcgccacagatcaaccctcattccccaaagttcacttgcgcttgcccggatggaatgctgctcgcacgggatatgcgcagctgtctgaccgaggccgaagcagctgtggctacccaagaaaccagcactgtgcgccttaaggtcagctccacggccgtgaggactcagcatacgactaccagaccagtccccgatacttcgagactgccaggtgccacccccggtctgactaccgtcgagattgtgacgatgagccaccaagcacttggagacgtggcaggaagagggaacgaaaagaagccatcgagtgtgcgtgcattgtccatagtcctccctattgtcctgctggtgtttctttgtctcggagtgtttctgctctggaagaattggcggctcaagaacattaactccatcaacttcgacaatccggtctaccagaaaactactgaggatgaggtccatatctgtcataaccaggacgggtattcatacccgtcccgtcaaatggttagcctggaggacgatgtggca

SEQ ID NO: 16248 - DNA, 2580 bp, synthetic construct
  misc_feature 1..2580: note = source = /note="Description of Artificial Sequence: Synthetic coding sequence"
  source 1..2580: mol_type = other DNA
atggggccttggggatggaagcttagatggacagtggctctcctattggctgccgctggaaccgctgttggagaccgttgcgaacggaacgagtttcagtgtcaggatggcaagtgtatctcttataagtgggtatgtgacggcagcgccgagtgtcaggacgggagcgatgagagccaggaaacatgcctatccgtcacctgcaaatcgggcgatttttcttgtggtggacgagtgaaccgctgtattccacagttctggcggtgcgacggtcaagtggactgtgataatggaagcgacgagcaggggtgtccccccaagacttgctctcaagacgagttccgctgccatgacgggaagtgcatttcccgtcaattcgtatgcgattcagacagggactgtctggatggatccgatgaggccagttgccctgtgctgacctgcggacccgcatccttccagtgcaactcaagcacttgcatccctcagctgtgggcctgcgacaacgaccccgattgtgaagatggttccgatgagtggccgcagcgctgtcgaggactgtatgtctttcagggtgattccagcccgtgttccgctttcgaatttcattgcctgtcaggcgaatgtattcactcctcctggcgctgtgacggcggccccgattgtaaagataagtcagatgaagagaactgcgccgttgccacttgccgcccagacgaatttcaatgttcagacggaaactgtattcacggcagcagacagtgcgatcgcgagtatgattgtaaagacatgtctgacgaggtgggttgtgttaatgtcactctctgtgagggccctaataagttcaaatgccactctggagaatgtataacactcgataaggtatgtaacatggcgcgagattgtagggattggagcgacgagccaattaaagaatgtgggaccaatgcctgtttagataacaacggggggtgttcccacgtctgcaatgatcttaaaataggatatgaatgtctgtgccctgacgggtttcagctggttgcccagaggaggtgcgaagacatcgatgaatgccaggatcctgatacctgttctcagctgtgtgtcaatctggaagggggatacaaatgtcagtgcgaagaaggcttccaattggatcctcataccaaagcgtgcaaggctgtgggatccatcgcctacttatttttcacaaaccgccatgaggttcgcaagatgacactagatcgttccgaatatacctctctgatccccaacctccgcaatgtcgtcgcgctggataccgaggttgcaagtaatcgcatatactggtctgatctaagccagaggatgatttgttcaacgcagctagaccgggcacatggcgtgagttcctacgacaccgtgatcagtagagacattcaagcaccagacggcctggccgttgattggattcatagcaacatctattggacagattctgttctcggaaccgtttcagtagcagatacaaagggcgtcaaacggaaaactctgttccgtgaaaatggatcaaaaccacgcgccatcgtggtggaccccgtgcacgggttcatgtactggaccgactggggcactcccgccaagatcaagaaaggcgggctgaacggggtggacatctattcactcgtgaccgaaaacatacagtggccaaatggaatcaccctggatttgctgtcgggtcggttgtattgggtggattccaagctgcatagcatttccagtattgatgtgaacggtgggaatagaaagacaattcttgaggacgagaagcggctggcacacccttttagcctcgccgtgttcgaggataaggttttttggaccgatatcatcaatgaggccatcttcagcgctaacagactgactggaagtgatgtgaatctccttgcagaaaatttgctgagccctgaagatatggttctctttcataacttgacccaaccaagaggcgtgaattggtgtgagcggaccaccttgagtaacggagggtgtcagtacctgtgccttcccgccccacagatcaatccgcactcacccaagttcacttgcgcatgccctgacggcatgctcctggcgcgtgacatgagatcctgtctcactgaagccgaggctgccgtagctacccaggagacatcaacagttcgactgaaggtgtctagcacggccgtgcggactcagcataccaccaccaggccagttcccgacacttctcggttgcccggcgccacacccggactgaccacagtggaaatcgtcacaatgagtcaccaggcactgggagacgtggctggcagagggaacgagaagaagccttcttctgtccgggccctatccattgtgctgcctattgtcctgctggtgttcctttgtctgggggttttcctcctgtggaagaattggagactaaaaaatataaactccattaattttgataacccagtatatcaaaaaaccactgaggacgaggttcatatttgtcataatcaggacggatactcatacccatctcggcaaatggtgagcctagaggatgatgtggct

SEQ ID NO: 16249 - DNA, 2580 bp, synthetic construct
  misc_feature 1..2580: note = source = /note="Description of Artificial Sequence: Synthetic coding sequence"
  source 1..2580: mol_type = other DNA
atgggtccttggggctggaaactgagatggactgtggcattgcttttggctgccgccggaactgccgttggcgaccggtgtgaacgtaatgagttccaatgtcaggacgggaagtgcattagctataagtgggtttgtgacggcagtgctgaatgtcaggatggctctgacgagagtcaagaaacctgtctctctgtgacttgcaaatccggagacttcagttgtgggggcagagtgaaccggtgtattccacagttttggagatgtgacggccaggtagattgcgataacggcagcgacgagcaggggtgtccaccaaagacgtgttcccaagacgagttcaggtgccatgacgggaagtgcattagccgacagttcgtctgtgactcagatagggactgtctagacggctccgacgaggcatcctgccctgtactgacatgtgggcctgccagctttcagtgcaacagtagcacctgcatcccacagctttgggcctgcgacaacgatcccgattgcgaggatgggagtgacgaatggccccaaagatgcagaggactgtacgtcttccagggcgacagtagtccttgctcagcctttgagttccactgtctgagcggcgaatgtatccactcctcatggagatgcgacggcggtccggactgtaaggacaaaagcgatgaggagaattgtgcagtcgcaacttgtaggcctgatgagttccagtgtagcgacggaaactgcattcacggttcccgacagtgcgatagggagtatgactgcaaggatatgtccgatgaggttggttgcgtgaacgttacactgtgcgagggcccgaataagtttaaatgccattcaggagagtgtataaccctggataaggtgtgcaatatggcccgtgactgccgtgattggagtgatgaacctattaaggaatgcggtaccaacgcctgtctggacaacaacggagggtgtagtcatgtctgcaacgatttgaagattggttatgagtgcctgtgccccgacgggtttcagctggttgctcaacgccggtgtgaggatatcgatgaatgccaggatcccgatacttgtagccagctttgtgtcaatcttgagggcggatacaagtgtcagtgcgaggaaggttttcaactcgatccgcacaccaaagcctgtaaggcggtgggcagcattgcttacctgttcttcaccaaccgacacgaggtacgcaaaatgaccctcgaccgaagtgagtacacctccctgatcccaaatctgagaaacgttgttgcactcgacacggaggtggctagcaatcggatttattggagcgacctctcacaacgcatgatatgtagtacccagttggacagagcccatggcgtcagttcgtacgacactgtgatatcccgcgacatccaggctccagatgggctggccgttgactggatacattcgaacatatattggactgatagcgtgctcggtacagtctccgtagccgacacgaagggcgtcaaacggaagaccctatttagagagaacggctctaaaccacgcgcgattgttgttgatccggtgcatgggttcatgtattggacggattggggaacccccgccaagatcaaaaaggggggcttgaatggagtcgatatttactctctagtgacagaaaacatacaatggcctaacgggattacactcgacctgctctccggccggctgtattgggtcgactccaaacttcacagcatctcttctatcgacgtcaacggtggtaataggaagactatcctggaggacgagaagcgtctagcacacccattttcccttgctgtgtttgaagataaagtattctggactgatataattaacgaggccatttttagcgccaacaggctgaccgggtccgacgtgaatttgctggccgagaacttgttgagtccagaagatatggtgcttttccataatttgacccagcctagaggggtcaactggtgcgagcgcaccacgctgtcaaatggtggctgccagtatctgtgtttgcctgccccacagatcaatcctcactcccctaaatttacctgtgcttgccctgacggaatgctcctggcgcgagatatgcggagctgcctaactgaggccgaagccgctgtggccacccaggagacctcaacagtgaggctgaaagtgtcatccaccgccgtgcgcacacagcacactaccaccagacccgtgcccgacaccagcagattacctggcgctactcctggcttgaccacagtggagatagtaacaatgagccaccaggccctgggcgatgtagccggcagagggaatgagaaaaagccttcctcagtgcgggccctctctattgtactcccaatagtcctgctcgtttttctctgtttaggggtgttcttgctgtggaagaactggaggctcaagaatattaattccatcaacttcgataacccagtgtaccaaaagaccacagaggatgaggtgcatatttgccacaaccaagacggttattcctatccttcgagacagatggttagccttgaggatgacgtggcc

SEQ ID NO: 16250 - DNA, 2580 bp, synthetic construct
  misc_feature 1..2580: note = source = /note="Description of Artificial Sequence: Synthetic coding sequence"
  source 1..2580: mol_type = other DNA
atggggccgtgggggtggaagttgagatggacggtagccctgctgctggctgctgcaggaacagctgtaggagataggtgcgaaaggaatgagtttcagtgccaggatggcaagtgcatttcctataagtgggtgtgcgatggcagtgccgagtgtcaggacggcagtgacgaatctcaggagacttgtctctctgttacttgcaaaagcggagacttcagttgtggcggacgagttaatagatgcataccacagttctggagatgtgacggccaggtggactgcgacaatggaagcgacgaacagggctgcccaccaaaaacgtgcagccaggacgagtttcgttgccacgacggcaagtgtatcagcagacagtttgtgtgcgattccgaccgggactgtcttgacgggagcgacgaggcttcctgccctgtgctaacatgtggccctgctagcttccagtgtaactcctccacatgcatcccacaattatgggcctgtgacaatgaccctgactgcgaggatgggtccgatgagtggcctcagcggtgccgcggattatacgtgttccagggcgactcatccccctgttccgccttcgaatttcactgcttaagcggggagtgcattcactcaagctggcgctgtgacggggggccggattgcaaggacaaatccgacgaggaaaactgtgcagttgctacttgccggcctgacgaattccagtgctccgatgggaactgtatccatggttcgagacaatgtgatagagaatacgattgcaaggacatgtcagatgaggtgggatgcgtgaacgtcaccttatgcgaaggaccaaataaatttaagtgtcacagcggggagtgcatcactttggacaaagtctgcaatatggcgagggactgccgggattggagcgacgaacctataaaagagtgcggcacgaatgcatgtctcgataacaatggggggtgtagccacgtctgcaatgatttaaagataggttacgaatgtttgtgtcctgatggattccagctggtggcacagcgtcggtgtgaggacatcgacgagtgtcaggatccggacacatgctcacagctgtgtgtaaacctggagggagggtataagtgccagtgcgaggagggattccaattagatccgcataccaaggcctgcaaagctgttgggtctattgcctaccttttttttacgaaccgccacgaagttcgcaagatgacattggatcgatccgaatatacaagccttattcccaacttacgcaacgtagtggctctggacacagaagtagcctcgaataggatctactggtccgacctcagccaacgaatgatttgcagtacacaacttgaccgcgcccacggggtaagctcttacgacacagtgatatcacgggatatacaggcacctgatggactagcggtagattggatccatagcaacatttattggaccgattctgttctggggacagtttcggttgccgacaccaaaggagttaagagaaagactttgttccgtgaaaatggatccaagccccgggcgatcgtcgtggatcctgtgcacggatttatgtattggacagattggggcacccctgccaagatcaaaaagggaggtctgaacggtgtggacatatactcactggttaccgaaaatattcaatggcctaatggcatcacgctcgacctattaagcggtcgcctatactgggttgattccaagctccactcgatcagctccatcgatgtaaacggcggaaatcggaaaaccattctagaagacgagaaacgcttagcccacccattcagtctggctgtgttcgaagataaagtgttttggaccgatatcatcaatgaagcgatcttcagtgcaaataggctcacggggtctgacgtcaacctgcttgccgaaaaccttctgagtccagaggacatggtcctgttccacaacctaactcagccccggggagtcaattggtgcgaacgtactacattgtctaatggcgggtgtcagtatctgtgtctgccagcgcctcagattaatcctcactctccaaagttcacatgcgcctgccccgatggtatgctgttggcccgtgacatgcgctcttgtcttacagaggccgaggccgctgtggccacacaggagacctccacagtccggcttaaggtctccagtacagctgtgagaactcagcacacaacaaccagaccggtgccagacacctctaggctccccggagctactccaggactaactacagtggaaattgtgacgatgagccatcaagctcttggagacgtggctgggcgtggaaatgagaagaaaccatcgtcggttagagccctctctattgtactacctatcgtcctgctcgtcttcttgtgcctcggagtgttcttactttggaagaactggaggcttaaaaacattaacagcattaactttgacaatcccgtctaccagaaaaccactgaagacgaagtgcatatctgtcacaaccaggatgggtattcctacccctccaggcaaatggtgtccctggaagacgacgttgct

SEQ ID NO: 16251 - DNA, 2580 bp, synthetic construct
  misc_feature 1..2580: note = source = /note="Description of Artificial Sequence: Synthetic coding sequence"
  source 1..2580: mol_type = other DNA
atgggaccgtggggatggaaacttaggtggacagttgcacttctgttagccgcagcaggaactgctgttggagatcgttgcgaacgaaatgaatttcaatgtcaagatggaaagtgtatttcatataaatgggtgtgtgacggatcagccgaatgccaggatggctccgatgagtcacaggaaacatgtttgagtgtgacctgtaagtcaggagatttctcttgcggaggaagagttaacaggtgcatcccccaattttggagatgcgatggacaagtcgattgtgataatggatctgacgagcaaggatgtccaccaaagacttgctcccaggacgaatttcggtgtcatgacggaaaatgtattagtcgccaatttgtttgcgattcggaccgtgattgcctcgacggaagtgacgaggcatcatgtcccgttttgacgtgtggaccagcgagtttccagtgcaatagttccacatgtattcctcaattgtgggcttgcgataacgatccggactgcgaggatggttctgatgaatggccgcagcgatgtcgaggactatacgtattccagggtgatagctcgccatgctcagccttcgaatttcactgtttaagtggagaatgtattcatagttcatggcgatgcgatggaggaccagattgcaaagacaagtccgatgaggagaactgcgccgttgcaacgtgtcgaccggacgaatttcagtgttcagacggaaactgtatccatggatcacgacaatgtgaccgagaatacgattgcaaagatatgtccgatgaggtgggctgtgtgaatgttaccctctgtgaaggaccaaacaagttcaaatgccatagtggggaatgtattacgttggacaaggtttgcaacatggcaagagattgccgagattggtctgatgaaccgatcaaagagtgtggcacaaacgcttgtctggataacaacggaggttgttcgcatgtttgcaacgacttgaagataggctatgaatgcctctgtcctgatggatttcaacttgtcgctcaaagacgttgcgaggatatcgacgagtgccaggacccagatacatgttcacaactttgtgtcaacttggaaggaggatataagtgtcagtgtgaggaaggattccagttggacccacatacaaaagcttgtaaggcagtcggtagtattgcatacctattttttaccaatcgtcatgaagtgcgaaagatgacgctggatagaagtgaatacacatcccttattccgaatttgcgtaatgtagttgctcttgatactgaggtggcttcaaaccgcatctattggtcagacctctcacaacggatgatctgtagtacacaattggaccgtgctcatggtgttagctcatacgatactgttattagccgggatattcaggctccagacggattggcagtagactggatccattctaatatttattggaccgattccgttctaggaacagttagcgtcgcagatacaaaaggagtcaagagaaagactctttttcgagagaatggctcaaagccccgagctattgtagttgatccagtgcatggatttatgtactggactgattggggcacaccagctaaaatcaagaagggaggcttgaatggagttgacatttacagtttggttacagagaacattcaatggcctaatggaataactctggatcttctttcaggaaggctgtattgggtggattcgaaactccatagtatttcttctatcgacgttaatggaggaaatcgaaaaactattctcgaagatgaaaaaagacttgctcacccattctcccttgctgtgtttgaagacaaggttttttggacagatattattaacgaagcaatcttttcagcgaatcgcttgactggctctgatgtgaatttactggcggaaaatctgctttcgccagaagatatggtactttttcacaatctcacccagccacgtggagtcaattggtgcgagcgaacaacactgtcaaatggtgggtgtcaatatttgtgcttgcccgcccctcaaattaatcctcactctccgaagtttacatgtgcctgtccagatggaatgctcctggcccgtgatatgaggagttgccttactgaagcagaagctgcggtggcaacacaagagacgtcaactgtcagattaaaagtttcaagcacagctgttcgaacccagcatactactacgaggccagttccagatacttcacgtttgccgggagcgaccccaggtcttacgactgtcgagatagttacgatgtcccatcaggctttaggagatgtcgccggacgcggaaatgaaaaaaaaccatcatcagtgcgtgccctgagtatcgtgctgccaattgtcctactggttttcctgtgtctaggtgtatttttattgtggaaaaattggcgtctcaaaaatattaattcgattaattttgataatcctgtttaccaaaaaacgacggaggatgaggtgcatatctgccacaatcaagacggctactcatacccatcgaggcaaatggtttctttagaagacgatgtcgct

SEQ ID NO: 16252 - DNA, 2580 bp, synthetic construct
  misc_feature 1..2580: note = source = /note="Description of Artificial Sequence: Synthetic coding sequence"
  source 1..2580: mol_type = other DNA
atgggaccttggggatggaagctgagatggaccgttgccctgctgctcgccgcagctgggactgctgtgggcgataggtgtgagagaaatgaatttcaatgtcaggacggtaagtgcatttcatacaagtgggtgtgtgacggaagcgccgaatgccaagatggtagcgatgagtcccaggaaacttgtcttagcgtcacttgtaagtctggagattttagctgtggaggacgggtcaatcggtgtatccctcaattctggcgatgtgacggtcaggtcgattgcgataacggttccgacgaacaggggtgccctcctaagacctgctcgcaagatgagttccgatgccacgatggtaaatgtatctcgagacagtttgtctgcgatagcgacagagattgtttggacggatcagatgaggccagctgccccgtcttgacttgtggaccagcttcctttcaatgtaacagcagcacttgtataccacaactgtgggcatgtgataacgatcctgattgtgaggatggatccgatgaatggccccaacgctgccgcggactctacgtgtttcagggcgattcgtcaccttgttccgcattcgaattccattgcctctccggcgaatgtattcactcttcctggcgttgcgacggtggcccagactgtaaggataaatcggacgaggaaaactgcgcagtggcaacttgtcgacccgatgagtttcagtgtagcgatggtaactgtattcacgggtcacgccagtgcgaccgggagtacgactgtaaggacatgtccgatgaggtggggtgcgtgaatgtcaccctgtgtgaagggcctaacaagtttaagtgtcattcgggagaatgtattacgctggataaagtgtgtaacatggcccgggactgccgcgattggtccgatgaaccgatcaaggaatgtggaactaatgcatgcctggataacaatggggggtgtagccatgtgtgtaacgatctgaaaattggatacgaatgtctctgccctgatggatttcagcttgtggcgcagagacggtgtgaggacattgatgaatgtcaggatccagatacttgctcgcagctgtgcgtgaacctggaaggcggttataagtgccaatgcgaagaaggttttcaactggatcctcataccaaggcatgtaaggcagtggggtcgatcgcctaccttttctttaccaaccgccacgaagtgagaaagatgactcttgacagatcagaatacacctcactgatccctaacttgcggaacgtggttgcgctcgatactgaagtggcatccaaccgcatctactggagcgacctgtcgcaacgaatgatctgctcgacgcaactggacagagcccatggggtatcgtcctacgacacggttatatctagggatattcaagcaccagatggactggcagtcgattggattcattcgaacatttactggactgattccgtcctgggaactgtgtccgtggccgacactaaaggagtgaagagaaaaaccctgttcagagagaatgggtcgaagcctcgggcaatcgtggtggatccagtccatgggtttatgtactggacggactggggcactccagccaagattaagaagggtggactcaacggcgtggatatctactcccttgttactgagaacattcagtggcctaacggtatcaccctggacctgctttccggaaggctctattgggtcgactcaaagctgcattcgatcagctcgattgacgtgaacgggggcaataggaaaacgatactggaagatgaaaagagacttgcacaccccttttcccttgcggtgttcgaagataaggtgttctggactgacattatcaacgaggccattttctcggcaaatcgcctgaccggctccgatgtcaacctgcttgcagagaacttgttgtcccccgaggatatggtgctgttccataacctgacccagccacgtggggtgaactggtgtgaaaggactactctctcaaacggtggctgtcagtacttgtgtctgccagcacctcagattaatcctcattcgcccaagttcacctgtgcgtgcccagatggaatgcttctcgccagagatatgcgctcttgtcttactgaagcagaagcagcggtggccactcaggaaacctctaccgtgcgcctgaaagtttcgtcgactgccgtgcggacgcaacacactaccaccagaccggtgcctgatactagccggctgcctggtgctactcctgggctgacgaccgtggagatcgttactatgtcacaccaggcactcggtgacgtggcaggtaggggaaatgaaaagaagccttcctcggttcgtgcactctcgatcgtgcttcccattgtccttcttgtttttctgtgtctgggcgtgttcctcctttggaagaactggaggttgaagaacattaactcgattaacttcgacaacccagtgtaccaaaagacgaccgaggacgaagttcacatctgtcataatcaggatggttactcctacccctcgcggcaaatggtcagcctggaggacgatgtggca

SEQ ID NO: 16253 - DNA, 2580 bp, synthetic construct
  misc_feature 1..2580: note = source = /note="Description of Artificial Sequence: Synthetic coding sequence"
  source 1..2580: mol_type = other DNA
atgggcccctgggggtggaagctgcggtggaccgtggccttattgcttgcagctgctggaacagcagtgggagatagatgcgagcgaaacgagttccagtgccaggacggtaaatgcatttcctataagtgggtgtgcgatggaagtgccgaatgccaggatgggtctgacgagagccaggagacatgtctgtccgtgacctgtaaatccggtgatttctcctgcggcggaagagtgaatcggtgcattccgcagttctggcgttgcgacggtcaagtggactgtgataatggtagtgatgagcaaggctgcccccccaaaacctgctcccaagacgaatttcgctgccatgatggaaaatgtatctcaaggcaattcgtgtgtgacagtgatagggactgccttgacgggtccgacgaagccagctgccctgtgttgacctgcggccccgcatctttccaatgcaactccagcacctgtatcccacaactgtgggcttgtgacaatgaccctgattgcgaagatggatcagatgaatggccacagaggtgtcgtgggctgtatgtgtttcaaggagatagcagcccttgctccgctttcgaatttcattgcctgagcggcgaatgtatccacagcagttggcgatgtgatggaggacctgactgtaaagataagtcagacgaggaaaactgcgctgtcgcaacatgtagaccagacgagttccaatgctccgatggaaactgtatccacgggagccgccagtgtgacagggaatacgactgcaaagacatgtcagatgaagtgggatgtgtcaacgtcaccctgtgcgaggggcccaataaattcaagtgccacagtggagagtgcatcacacttgacaaggtgtgcaatatggctagggattgtagggactggagcgacgaaccgataaaagagtgcgggactaatgcatgccttgacaacaacggtggatgttcccatgtgtgtaacgatctcaaaattgggtacgagtgcctgtgtcccgacggatttcaactggtggcccagcgcaggtgcgaagacatagacgagtgccaggatcctgacacttgtagccaactctgcgtgaacctggagggaggctataagtgccagtgcgaggagggatttcagcttgacccacatacaaaggcttgtaaagcagtcggctccatcgcatatctgttttttaccaaccgccacgaggtcagaaaaatgacactagataggtcagaatatacctctttgattcccaacctccggaacgtggtcgcactggacaccgaggtcgcctcaaacaggatttattggagcgacctgtcacaaaggatgatttgttctacgcagctggacagagcccacggcgtaagttcttacgacacagtcattagcagagatatccaagcaccggacggtctggcagttgactggatccatagcaacatttactggactgacagcgtgctgggaacggtgtcagtcgcagacaccaagggggtgaaacggaaaaccttgttccgcgagaacggatctaaacccagggcgatcgtggtggatccggtacacggatttatgtattggacagattggggcacccccgccaagatcaaaaaaggcgggcttaacggcgtggacatatatagtttggtaaccgagaacatccagtggccgaatggcatcacattggacctcctcagcgggaggctttactgggtggactctaagctgcatagcatctcttctattgatgtgaatggcgggaaccggaaaactattctggaggacgagaagagactcgcacacccattcagcctggccgtcttcgaagataaggttttttggaccgatattattaacgaagccatcttttctgctaataggctcaccggatcagatgtcaatctcctggctgagaacctgctgagtccagaagacatggtgctgttccataatcttacacaacctaggggcgtcaactggtgcgagagaacaacacttagcaacggaggctgccaatacctgtgtctccccgctccccagataaacccccactcgccaaaatttacttgcgcttgtccagatggaatgctgctggcaagggatatgagatcgtgcctaactgaggcagaagcggctgtggctacacaggagactagcacagtgcggttgaaggtgtcctcaaccgctgttaggactcagcacaccactacaaggccagttccggatacctcacgtctacccggagccactccaggtctgaccaccgttgagatcgtaactatgagccatcaggctcttggcgatgttgccggccgaggtaacgaaaaaaaacccagctcagtgagagcattgagcattgtgttaccaatcgtcctgttagtctttctttgtttgggcgtctttcttttgtggaagaactggagactcaaaaatatcaattccatcaactttgacaatcccgtttatcaaaaaaccaccgaggacgaagtccatatctgccacaatcaagacggatactcctacccaagcagacagatggtgagcttggaagatgacgttgcg

SEQ ID NO: 16254 - DNA, 2580 bp, synthetic construct
  misc_feature 1..2580: note = source = /note="Description of Artificial Sequence: Synthetic coding sequence"
  source 1..2580: mol_type = other DNA
atgggcccttggggatggaaactgaggtggaccgttgccttgcttcttgccgcagccgggaccgccgtgggagaccgttgcgagcgtaacgaattccagtgccaggatgggaaatgtatatcttataaatgggtgtgcgatggcagcgcagaatgccaggacgggagtgatgaatcacaggaaacttgtctgtccgtcacctgtaagtcgggcgatttttcctgtggtgggagggtgaaccggtgtattccccagttctggcgctgcgatggccaggtggactgtgataacggctctgacgagcagggctgtcctcctaagacctgttcccaggacgagtttagatgtcacgatgggaagtgcattagcaggcagttcgtctgcgattctgaccgtgattgcctggatgggtcagatgaggccagctgtcctgtattgacttgtggtccagcctcctttcagtgtaatagttctacctgtattccccagctgtgggcttgtgacaacgatcctgactgcgaggacggttctgatgagtggccccaacgatgtagaggcctgtatgttttccagggtgacagctctccctgctcagcctttgagttccactgcctatccggggaatgtatccactcttcatggagatgcgacggggggccagactgcaaagacaagagcgacgaggagaactgcgctgtggccacttgcaggccagatgaattccaatgctcagatggcaactgcattcacggtagccggcagtgcgaccgcgagtatgactgtaaggacatgagtgatgaggttgggtgtgtcaatgtaactttgtgcgagggtccgaacaagttcaagtgtcatagtggagagtgtatcacactggataaggtctgcaatatggcccgagactgtagggattggtcagatgaacccatcaaagagtgtggtacgaatgcgtgcctggataacaacggagggtgcagtcacgtgtgtaacgacctcaaaatcggatatgaatgcctttgtcccgatgggttccaactggtggcccagaggaggtgtgaagacattgacgagtgccaggaccctgatacttgcagtcagctgtgtgtgaacctggagggaggttataagtgccagtgtgaggaaggattccaattggacccacatacaaaagcatgcaaggcggtaggatcgatagcttatctgttcttcacgaaccgccacgaggtgcggaaaatgacactagatcggagcgagtatacatccctaatcccgaacctgaggaatgtcgtagcattagacacagaagtcgctagtaatcggatctattggtccgatctgtctcagcggatgatctgcagcacgcagctcgatcgggctcacggggtgtcttcctacgataccgtgatctctcgcgacatccaggccccggacggactggccgtcgactggattcactcgaatatctattggaccgacagcgtgctaggtacagtcagcgtggctgacaccaagggcgtgaaaagaaaaacactatttcgggagaacggatctaagcccagagctattgtcgttgatccagtccatggcttcatgtattggactgactggggcaccccagccaaaatcaagaaaggggggctcaatggtgttgatatatatagcttggtgactgaaaacattcaatggccaaacggaatcacactcgacctgctatccggaagactgtattgggtggactcaaaactgcatagcataagtagcatcgatgtcaacgggggcaacagaaaaactatattggaagatgagaaacgcttggcccaccctttcagcctggcggtctttgaggataaggtgttttggactgacattataaacgaggctatcttctccgcaaatagactcactggatctgacgtgaacctgctagccgaaaacctcctttcacccgaagatatggtcctctttcataacttaacacagccccgaggtgtgaattggtgtgagcggaccaccctgtccaacggcggatgccagtacctgtgtctgcccgcaccccaaattaacccacatagtcccaagtttacttgtgcatgccctgacgggatgcttctggccagagatatgagaagctgtcttactgaggcagaggccgccgttgcgacccaggagacttccactgtgcgtctgaaggtcagttctacagccgtgcggacccaacataccactacccgaccagtacctgatacatctcggttgccaggcgcgacccccggcctaaccactgtggaaatcgtcactatgtcacaccaggctcttggagatgtggctggtagaggaaacgagaaaaagccctcgagtgtgagggctctgtctattgtgcttcctatagtcttgctggtcttcttatgcttgggcgtgttcctgctgtggaagaattggaggctgaaaaatatcaactctattaacttcgacaatcctgtgtatcagaagacaacagaagacgaggtgcacatatgccacaaccaggacggttatagttatcctagtcgccagatggtgtcgttagaggatgatgtcgcc

SEQ ID NO: 16255 - DNA, 2580 bp, synthetic construct
  misc_feature 1..2580: note = source = /note="Description of Artificial Sequence: Synthetic coding sequence"
  source 1..2580: mol_type = other DNA
atgggcccttggggatggaaacttcggtggacggtggcactgctgctcgcagccgcgggaactgccgtcggggaccggtgcgaacgcaatgaattccaatgccaagatggaaagtgtatcagttacaagtgggtgtgcgacgggagcgcggaatgtcaggatggaagtgacgagagccaggaaacttgcctttcagtcacgtgtaaatcaggcgacttcagctgcggtggccgagtcaacaggtgcatcccgcagttctggcggtgcgacgggcaggtggattgtgacaacggcagcgacgagcagggttgtcctcctaagacgtgctcgcaggacgaattcaggtgccatgatggaaaatgcatcagccggcagttcgtctgtgactccgaccgggattgcctggacggctccgacgaggcaagctgcccagtgttgacttgtggaccggcctccttccaatgcaacagctccacttgcatcccccagctgtgggcgtgcgacaacgatcctgactgcgaggatggttcagatgagtggccgcagcgctgccgcggactgtatgtgttccagggggatagttcgccatgttccgccttcgaattccattgcttgtccggagaatgtattcactcgtcctggcgctgcgacggaggaccagattgcaaggacaaatcggacgaggaaaattgcgctgtggctacctgccggcccgacgaattccagtgctccgacggaaattgcatccacggatcgcgccaatgcgatagagaatacgactgcaaggatatgtctgacgaagtgggatgcgtgaacgtgactctgtgcgagggtccgaataagttcaagtgtcactccggagagtgcatcacgctggacaaggtgtgtaacatggcgagagattgtagagactggagcgacgaacctatcaaagagtgcggcactaacgcatgcttggacaataatggcggatgttctcacgtctgcaatgatctgaaaatcggttacgagtgtctctgcccagacggcttccagctggtcgcgcagcgccgctgcgaggatatagacgaatgtcaggacccagacacctgttcgcaactctgtgtgaacctcgaaggaggctacaagtgccaatgcgaagagggctttcagctcgatccgcataccaaggcgtgcaaggcagtgggtagtatcgcctacctgtttttcactaaccggcatgaagtgcgcaaaatgactctggacagaagcgagtacacctccctgatcccgaacctgcggaacgtggtcgccctggacaccgaggttgcatccaataggatctactggtcggacctgagccagagaatgatctgctccacccaattggatagagcgcatggagtctcctcctacgatactgtgatctcgagggatatccaagctccagacggactcgctgtcgactggattcactcgaacatctactggactgattcggtgcttggcaccgtgtccgtggcagataccaagggcgtaaagcggaaaactctcttccgcgaaaacgggtcgaagccgcgcgccattgttgtggacccagtccacgggttcatgtactggaccgactggggaaccccagccaagatcaaaaaaggcggattgaatggagtggacatctacagccttgtcaccgaaaacatccaatggccgaatggaatcactctggatcttctctcagggcgcctgtactgggtggactcgaaactccactcgatttcctcaatcgacgtgaacggtggcaaccgcaagaccatcctcgaggacgaaaagcgcctggcacatccgtttagccttgccgtgtttgaggataaggtgttctggaccgacatcattaacgaggccatctttagcgccaataggctgactggatcggatgttaatcttctggcggaaaaccttctgtcacctgaggacatggtcctctttcataatcttacccagccgcgcggtgtgaactggtgcgaacgaaccactctctcgaatgggggatgccagtacctctgcctgccggcgccacagatcaacccgcatagcccaaagtttacttgcgcttgcccggacggtatgctgttggctcgggatatgcgctcttgcctgactgaagccgaggccgcggtggcgactcaagaaacctccacggtgcggctgaaggtatcatcaaccgccgttagaactcaacacactaccacccgccccgtgccggacacctcacggttgccaggagccacccccggactgaccaccgtggaaattgtgactatgtcacaccaggcactcggagatgtggccgggcggggaaacgaaaagaagccgtcatccgtcagggctctgagcattgtgctccctatagtgctgctggttttcttgtgcctgggagtgttcctgctgtggaagaactggcgactgaagaacatcaactcgatcaacttcgacaaccccgtctatcagaaaaccacggaggacgaagttcacatctgccacaatcaagacggctactcgtaccctagtagacagatggtatcgctcgaggatgatgtcgcc

SEQ ID NO: 16256 - DNA, 2580 bp, synthetic construct
  misc_feature 1..2580: note = source = /note="Description of Artificial Sequence: Synthetic coding sequence"
  source 1..2580: mol_type = other DNA
atgggaccttgggggtggaagttgaggtggacggtagcacttctcttagcagctgctggaaccgctgtgggggatagatgcgagcgtaatgagtttcagtgtcaggacggcaagtgcatctcatacaagtgggtctgtgacgggagcgcagagtgccaagatggctcagacgagtcccaggagacgtgtttatctgtgacttgtaagagtggtgacttttcctgcggcgggcgcgtcaatcgatgtattcctcagttctggaggtgcgacggtcaggttgactgcgataacgggtcggacgagcagggatgtcccccaaaaacttgttcacaggatgaattccggtgccacgatggaaagtgcatcagccgtcagttcgtgtgtgactcagaccgcgactgtctggatgggtcagacgaagcatcatgccccgtcttgacttgtggaccagctagtttccagtgcaactccagcacatgtattccccagctatgggcctgcgataacgatccagattgcgaggatggatccgatgagtggccccaaaggtgcaggggcctgtatgtgttccaaggagactctagcccttgtagtgcattcgagttccattgcttgagtggggagtgcattcatagcagctggcgatgcgacggcggtcctgactgtaaggacaaatccgatgaggagaactgcgcagtagccacgtgccggccagatgagtttcagtgctccgatggaaactgtatacatggaagccggcaatgtgatcgggaatacgattgtaaggatatgtctgacgaggtgggttgtgtgaatgtgactctctgcgaaggcccaaataagttcaaatgccatagcggcgaatgcatcacattggacaaagtctgtaatatggcccgagactgccgagactggagtgatgagcccattaaggaatgcggcaccaacgcatgcctggacaacaacggagggtgttctcatgtgtgtaacgacttaaagatcggttatgaatgtttgtgccccgatggcttccagttggtggcccagcgccgatgtgaggatatcgatgaatgtcaggaccctgatacctgcagccagctgtgcgttaatctagaaggtggatacaaatgccagtgtgaggaaggctttcaattggacccacacacgaaagcatgcaaagcagttgggtcaattgcgtatctgtttttcacgaatcggcatgaggttagaaagatgacgctggaccgaagcgagtacacaagcttaatcccgaatttgcgcaacgttgtcgcgctggatacagaggtcgcatccaataggatttactggtctgacctgagtcagaggatgatctgcagcacacagttggaccgcgctcacggagtttccagctacgacacggtgatctcgagagacatacaagctcctgatggcctagctgtcgattggatccattctaatatttactggactgacagtgtgctcggaacagtctcggtggctgacaccaagggggtcaaacgcaaaaccctcttccgcgaaaacggctctaagccaagggctatcgtggtggaccccgtccatggcttcatgtactggaccgattggggcacccctgccaaaattaagaaggggggcctgaacggggtggacatttactccttagtgactgagaatattcagtggcctaatggcattacgttggacctgctgtctgggcggctatactgggtggacagcaagctgcatagcatcagcagcatcgatgtgaatggtggaaatcggaaaacaatcttggaggatgaaaagcgcttggcacacccgttcagtctcgccgtgtttgaagacaaggtgttttggacggacattatcaatgaggccattttctcagccaacaggttgactggtagtgacgtgaatctcctcgccgagaacttgctttcacctgaagacatggtccttttccacaatcttacccagccccgcggagtgaactggtgcgagagaactaccctcagtaatggtggctgtcagtatctttgcctacccgcaccacaaataaaccctcatagtcccaaatttacctgcgcttgccctgacgggatgttattggctagggacatgcgcagctgtttgacagaagctgaggcagccgtcgctacacaggagactagtactgtgcggctgaaagtcagcagcactgcggtgagaacccagcacaccacaacacggccagtaccagatacaagtaggctccccggcgccactcctggtctgaccaccgtggaaatcgtcaccatgtcccaccaggcactgggagatgtggcaggccgcggtaacgagaagaaacccagtagcgttagggccctgagcatagtgctgcccatcgttttactggtgtttctgtgtttgggcgtttttctcctgtggaaaaattggaggctcaaaaatatcaattctatcaatttcgataaccccgtgtatcagaagacaacagaggacgaggtccacatttgtcacaatcaagatgggtactcatacccctcacgacagatggtctccttagaagacgacgtggct

SEQ ID NO: 16257 - DNA, 2580 bp, synthetic construct
  misc_feature 1..2580: note = source = /note="Description of Artificial Sequence: Synthetic coding sequence"
  source 1..2580: mol_type = other DNA
atgggcccatggggatggaaactgagatggacggtcgccctcctgctagctgccgccggcactgctgtgggggaccggtgtgagcggaacgaattccagtgccaggatggcaaatgtatatcctataagtgggtgtgcgacggcagtgctgagtgccaagacgggagcgacgagtctcaagagacctgtctaagtgtcacctgcaagagcggcgatttcagctgtggcggccgagtgaaccgctgcataccacaattctggcggtgcgatgggcaggtcgactgcgacaacggatccgatgaacagggatgcccaccaaagacctgttcccaggatgaattcaggtgtcatgatggtaaatgcatttcgagacagtttgtgtgtgactctgatcgagactgcctcgatggctccgacgaggcatcctgccccgtgctgacatgtgggcccgcatcctttcaatgcaatagtagcacttgtatacctcagctgtgggcatgcgataacgacccagattgtgaggacgggagcgatgaatggccgcagaggtgtaggggactgtacgtgttccaaggagatagctccccctgctccgccttcgagttccactgtctcagtggggagtgtatccactcgagctggaggtgcgacggcggtcccgactgtaaggacaaatcggatgaggagaattgcgcggtggccacctgtagacccgacgaattccagtgctccgatgggaactgtatacacgggtcgcgacagtgtgaccgggagtatgactgcaaggacatgtctgacgaagtggggtgcgttaacgtgactctgtgcgagggtcctaacaagttcaagtgccacagcggcgaatgcattacgctggacaaagtatgcaatatggcgagagattgtcgagactggtccgacgagcccatcaaggagtgcggcactaatgcctgtctagataataatggcgggtgttcccatgtctgcaatgatctcaaaattggctatgaatgtttgtgtcccgatggatttcagttggtggcccaaagaaggtgtgaagacattgatgagtgtcaggatccagacacatgttcccaactctgtgtgaatttggagggcgggtataagtgtcagtgtgaggagggcttccagctcgacccccacacgaaggcttgcaaagccgtcggcagtatcgcctacctgttttttacgaaccgtcacgaagttagaaagatgacactagaccgctcagagtacacttccctgattcctaatttacgtaacgtagtagctctggacacggaagttgcttccaacaggatctattggagtgacctgtcccagaggatgatatgttccacccagctcgaccgtgcccacggggtgtcctcatatgacacagtaatatcccgggacattcaggccccagatggcctggccgtcgattggattcactcaaacatatactggactgactcggtgcttggcaccgtgtctgtggcagataccaagggagtgaagcgaaaaaccctgtttagggagaatggatcaaaacccagggccatcgtcgttgaccctgtgcatgggttcatgtactggacagactggggcacacccgctaaaatcaaaaaagggggcttaaacggagtggacatctactccctcgtgaccgagaacatacagtggcctaacggtataacacttgacctattatctgggaggctctattgggtggattctaaactgcactctatttccagcatcgatgtcaacgggggaaacaggaaaaccatcctggaagatgaaaagcggttggcccaccctttttctctcgctgtgttcgaggacaaggtattctggactgatattatcaacgaggccatctttagcgcaaatcgcctgaccggatctgatgtgaatcttctggcagagaatctgctctcccccgaggatatggtgctctttcataacttaacacagccgcgcggtgttaactggtgcgagcggacaactctgtctaacgggggctgtcagtatctttgtctgccggcaccacagatcaacccgcactcccctaagttcacgtgcgcatgtcccgatgggatgttgctcgcccgggacatgcgctcctgcctcaccgaggccgaagctgcagttgctactcaggagacctcgacagtgagacttaaagtcagcagcacagccgtgcgcacccagcacacaacaactagacccgtgcctgacacttctcgactcccaggtgcaacgcccggcctgacaactgtcgagatagtgaccatgagtcaccaggcccttggggacgtcgccggacgggggaacgaaaagaagccctctagcgtcagggcactgtcaatcgttctgccaatcgtgctgctggtgtttctgtgcctgggcgtcttcctattatggaagaactggcgcctgaagaacatcaactctataaattttgacaaccccgtctaccagaagacgacagaggacgaggttcatatctgccacaatcaggatggctattcttatccctctaggcagatggtgagcctcgaggacgacgtggcc

SEQ ID NO: 16258 - DNA, 2580 bp, synthetic construct
  misc_feature 1..2580: note = source = /note="Description of Artificial Sequence: Synthetic coding sequence"
  source 1..2580: mol_type = other DNA
atgggaccctgggggtggaagctgcgctggacagttgctcttctactggctgctgctggaactgcagtgggagaccggtgtgaacgaaacgagtttcaatgccaagacggcaaatgcatatcctacaaatgggtttgtgacggctccgccgagtgccaagacgggtcagacgaaagtcaggaaacatgcctaagcgtgacatgcaagtcaggggatttcagctgcgggggccgagtaaaccgctgtattccacaattctggaggtgcgacgggcaggtggattgcgacaacggatccgatgagcaaggatgtccccccaaaacatgctctcaggacgagttcaggtgccatgacggcaagtgcatctcgcgacagtttgtctgcgactccgatagggactgcttggatgggtcagacgaggcttcctgtcctgttttgacttgtggaccagcctcgtttcagtgcaacagttcaacttgtataccccagctatgggcctgtgacaacgatccggattgcgaagatggcagcgacgaatggccccagaggtgcagaggcctatatgttttccaaggagactcctccccttgctccgcttttgagtttcactgcctgagcggggaatgtatccattccagctggagatgcgacggtggtcctgactgtaaggacaaaagcgatgaagaaaactgtgccgttgctacgtgccgccccgacgaatttcaatgcagtgatggaaattgtatccatggctcacgccagtgcgatcgagagtatgattgcaaggatatgtctgatgaggtggggtgcgtgaacgtaactctgtgcgagggccccaacaagtttaagtgccatagcggggagtgtatcacgcttgataaggtatgtaacatggcccgagactgccgagactggagcgatgaacctattaaagaatgcggtactaacgcctgcctcgacaacaacggaggctgtagccatgtgtgtaatgacctgaagatcggctacgagtgtctgtgtcctgacggattccagttggtggctcagcgacgatgcgaagatatagatgagtgccaagaccccgacacttgtagccagctctgcgtcaatttggaaggggggtataagtgccagtgtgaagaaggctttcagctggatccccacacaaaagcttgtaaggccgtgggatccatcgcgtatctgttcttcaccaacaggcacgaagtcaggaagatgaccctcgatcggtctgagtacacctcacttattccaaacctgaggaacgtggtagccttagataccgaggttgcctcaaatcggatatattggagtgacctgtctcagagaatgatctgctcaactcagctcgacagagcacacggtgtttccagttatgacaccgtgatctcgagagacatccaagcccccgatggcctggccgtggactggattcactcgaatatctactggacagactcggtgctggggacggttagtgtggccgacaccaagggtgtgaaacgaaagaccttgtttagggagaatggctcaaaaccacgggccatagttgtcgatcctgttcatggattcatgtactggaccgactgggggacgccggcgaagataaaaaagggcgggctgaacggcgtggacatctactctctggtcactgaaaatatacagtggccaaacggaatcaccctggatctgttgagcggccgactctattgggtggatagtaaactccattccattagttcaattgacgtcaatggaggaaacaggaaaaccatcctggaggatgagaagcgactagcccatcccttcagcctagcggtgtttgaagataaggtgttttggactgacatcattaatgaggctattttttccgccaaccgactgaccgggagcgatgtcaatttgctggccgaaaacttgctgagtcccgaagatatggtactgttccacaacctcacccagcctcgtggagttaactggtgtgaaaggactaccctgtccaacggtggttgccagtatctgtgcctccccgcaccccagataaacccccactctcccaaatttacttgcgcatgcccagacggtatgcttctggcaagggacatgaggtcttgtctgaccgaggccgaggcggccgttgccacacaagaaacctctaccgtgcgactgaaagtctcctccacggcagtgcgaactcagcatactacaacaaggcctgtccccgacacaagccgactgccaggcgcaacccccgggttgacgactgttgagattgtcaccatgtctcaccaggccttgggggacgttgccggaagaggcaacgaaaagaaaccaagctccgtccgagctctgtcgattgtgttaccaatagtgctcctggtgtttttgtgcttgggcgtttttctgctgtggaagaattggcggctgaaaaacataaatagcataaacttcgacaatccggtgtaccagaagaccacagaagacgaagttcacatctgccacaatcaagacggatattcctaccctagccggcagatggtctcgttggaggacgacgtggca

SEQ ID NO: 16259 - DNA, 2580 bp, synthetic construct
  misc_feature 1..2580: note = source = /note="Description of Artificial Sequence: Synthetic coding sequence"
  source 1..2580: mol_type = other DNA
atgggcccttggggctggaagctgcgctggacggtggcgctgctgttggcggcagccggtacggctgtgggggacagatgtgagcgcaacgagttccagtgtcaggacggaaagtgtatctcgtacaaatgggtctgcgacggaagcgctgaatgccaggatggcagtgatgaatcacaggaaacctgcctcagtgtcacttgtaagagcggcgacttcagctgcgggggacgcgtgaacagatgcattcctcagttttggcgttgcgacggacaggtggattgcgataacggcagcgatgagcaaggatgcccgccgaaaacgtgtagccaggatgagttcagatgccacgacgggaaatgcatctcaaggcagttcgtgtgcgactcggaccgcgactgtctcgatggctccgatgaagcaagctgccctgtattgacctgcggaccagcatcctttcaatgcaactcgtccacctgcatccctcaactgtgggcctgcgacaacgatccggattgtgaggacggatccgacgaatggccccagcggtgtaggggactttacgtgttccagggggactcgtccccgtgctcagcattcgaattccactgcttgtcaggagagtgcatccacagttcatggcgctgcgatggaggtccggactgcaaggataagtcggatgaagagaattgcgccgtggccacctgcagaccggacgagtttcaatgctccgacggcaattgcatccacggttcccggcagtgcgatcgagagtacgattgcaaggacatgtccgacgaggtgggatgtgtcaatgtcaccctctgtgagggtccgaataagttcaaatgccattcgggtgaatgtatcactctcgataaagtttgcaacatggcccgcgactgccgcgattggtcagacgaacctatcaaggaatgcggaaccaacgcttgcctggataacaacggagggtgttcccatgtctgcaacgacctgaagattggatatgaatgtttgtgccccgacggattccagctcgtcgcccaacgcaggtgtgaggatatcgacgagtgccaggacccagacacctgttcccagctctgcgtgaacttggaaggaggatacaagtgccaatgtgaagaaggatttcaactcgacccgcacaccaaagcctgtaaggcggtggggtccatcgcttatctctttttcactaaccggcatgaggtccggaagatgaccctggatcgcagcgaatacaccagcctcattccgaacctcaggaacgtcgtggcactggataccgaggtggcttccaaccggatctactggtcggacctctctcaacggatgatctgttctacccaattggaccgcgcgcatggcgtgtcgtcgtatgacacggtgatcagccgtgatattcaggcacctgacgggctggcggtggactggatccactcgaacatttactggaccgatagtgtgttgggaactgtctcggtagccgatactaagggagttaaacgtaagactctcttccgggaaaatgggtcgaaaccgcgggccatcgtggttgatcccgtgcatgggtttatgtactggactgactggggcacccccgccaagatcaaaaagggagggctgaatggagtcgacatttactctctcgtcactgagaatatccagtggccaaacggcattactctcgacctgctgtcgggtcggctgtactgggtggattccaaactgcattctatttcgagcatcgacgtgaacggtgggaatcgcaagactatcctggaagatgagaaacggcttgcccacccgttcagtctggccgtgtttgaggacaaagtcttttggactgacataatcaacgaagccatcttctcagccaatagacttaccggaagcgacgtgaatcttctggccgaaaatcttctgtccccggaagatatggtgttgttccacaatctcacccagccgcgaggcgtcaactggtgtgaacgcactaccctgagcaacggaggctgccaatacctgtgcctgcctgcgccgcaaatcaacccacacagcccaaagttcacttgcgcatgcccagatggaatgctgctggcccgggacatgcggtcctgcctgaccgaagctgaagcggccgtggcgacccaggaaacttctaccgtcagactgaaggtgtcctccactgcggtgcggacgcagcatactaccactagaccagtgcctgacacttcgcggctgccaggagccaccccgggtctgacgactgtggaaatcgttactatgtcacaccaggctctgggcgacgtggcaggtagaggaaatgagaagaagccctcctcagttcgcgcgctgtccatcgtgctgccgatcgtgctgcttgttttcctctgcttgggagtgttcctcctctggaagaactggcgcctgaagaacatcaactccatcaatttcgacaacccagtgtaccaaaagacgactgaggacgaggtacacatctgtcataatcaggacggttactcctacccatcgcgccaaatggtgagcctggaggatgatgtcgca

SEQ ID NO: 16260 - DNA, 2580 bp, synthetic construct
  misc_feature 1..2580: note = source = /note="Description of Artificial Sequence: Synthetic coding sequence"
  source 1..2580: mol_type = other DNA
atgggaccgtggggctggaagctgcgctggactgtggccctccttttggcggctgctggaactgccgtgggggaccggtgcgaaagaaacgaatttcaatgccaagacggaaaatgcatctcgtacaaatgggtgtgcgatggatccgcagaatgccaggacggctcagatgagtcacaagaaacctgcctgagcgtgacctgcaagtcgggagacttctcgtgcggcggtcgcgttaataggtgcatcccgcaattctggcggtgtgatggacaggtcgattgcgacaacggctcggacgaacagggttgcccgccaaagacgtgttcacaagacgaatttcgctgccatgacggcaagtgcatctcgcggcagtttgtctgcgatagcgacagagattgtcttgacgggtccgacgaagcatcgtgcccggttctgacctgcgggccagcctcattccagtgcaattccagcacctgtattccgcaactgtgggcttgcgataacgaccccgattgtgaagatggaagcgacgaatggcctcagagatgcaggggcctgtacgtctttcagggcgactcctccccgtgctcggcgttcgaatttcactgcctttcgggagagtgtattcattcctcgtggcggtgcgacggaggacctgattgtaaggataagtcggacgaggaaaattgcgcggtggcgacctgccggcctgatgaattccagtgcagcgatggaaactgcatccacggatcgcgccagtgtgacagggagtacgactgcaaggatatgtctgatgaagtgggatgcgtgaatgtgaccttgtgcgaaggcccaaataagttcaaatgccattccggagaatgtatcaccctcgacaaggtgtgcaacatggccagggactgtcgggattggagcgatgagccgatcaaagagtgcggaaccaatgcttgtctggacaataacggaggatgctcgcacgtgtgcaacgacttgaaaatcggctacgagtgcttgtgcccggacggatttcagctcgtggcccagcggcgctgcgaggatatcgacgaatgccaagacccggacacctgcagccaactgtgcgtgaacctggaaggcggttacaagtgccaatgcgaagaaggatttcaactggacccacatactaaggcctgtaaggccgtgggctcaattgcgtacctgttcttcactaaccggcacgaagtgagaaaaatgaccttggatcgctcagagtacaccagcctcatcccgaacctgcgcaatgtcgtggccctcgacaccgaagtggcatcgaataggatctactggtccgacttgtcgcagagaatgatttgtagcacgcagctggatagagcacacggagtctcatcatacgacactgtgatttcccgggacatccaggccccggatggccttgctgtagactggatccactccaacatctattggactgactcagttctgggaactgtgtcggtggctgacaccaagggcgtcaaacgcaagaccctgttcagagagaacgggagcaagccacgggcgatcgtggtggatccagtgcacggtttcatgtactggactgattggggaactccggcgaagatcaaaaagggaggcctgaatggagtggatatctactcactcgtgactgagaacatccagtggccaaacggcatcaccttggacctgctgtccggtaggctctactgggtggactccaagctgcactcaatcagctcgatcgacgtgaacggaggtaaccgaaagacgatcttggaggacgaaaagaggctcgcccacccattcagcctcgccgttttcgaagataaagtgttctggaccgacatcattaatgaggccatcttctcagccaacaggctcacgggatctgatgtgaacctgcttgctgagaatttgctgtcacccgaggatatggtgctgtttcacaatctgacccagcctcggggagtgaattggtgcgaacggactactctctccaatggcggatgccagtacctgtgcctgccggctccccagatcaatccccatagccctaagttcacgtgcgcgtgtccggacggaatgctgcttgccagggatatgcgctcgtgcctcactgaagcggaggcagccgtggctactcaggagacgtcgaccgtcagattgaaagtatcttcaactgcagtgcggacccagcacaccaccacccggccggtgccagatacctcccggctgccgggtgcaaccccgggactgactacggtggaaatcgtgactatgtcgcaccaagcactcggggatgttgccgggaggggaaacgaaaagaaacctagctccgtgcgggcactgtcgatcgtgcttccaattgtgctgctggtgttcctgtgcctgggggtgttcttgctttggaagaattggcgcctgaaaaacattaactcgatcaattttgacaatccagtgtatcaaaagaccaccgaggatgaagtgcacatctgccacaaccaggacggctactcctacccttcgagacagatggtgtcccttgaggatgatgtggcc

SEQ ID NO: 16261 - DNA, 2580 bp, synthetic construct
  misc_feature 1..2580: note = source = /note="Description of Artificial Sequence: Synthetic coding sequence"
  source 1..2580: mol_type = other DNA
atgggcccgtggggatggaagctgagatggaccgtggcactgctcttagctgcggccggaacagccgtcggagataggtgtgagagaaatgaattccaatgccaagatggaaaatgcatttcgtacaagtgggtgtgcgatggatcagcggaatgccaagatgggtccgacgaatctcaggaaacttgccttagtgtcacatgtaagtctggcgacttttcctgcggaggccgcgtgaaccggtgcataccccagttctggcgctgtgacggacaggtggactgcgataacggaagtgacgaacagggatgtccgcctaaaacctgtagccaggacgaattcagatgtcacgacggcaaatgcataagcagacagttcgtatgcgactcggaccgcgactgtctggatggatcggatgaagcatcctgccctgtgctgacatgcggccctgcaagtttccaatgcaattcaagcacctgcattccccaattgtgggcatgtgacaatgacccagactgtgaggacgggtcggatgagtggccgcagcgatgtcgtggcctgtatgtgtttcagggcgattcatcgccatgctccgcctttgagtttcactgtctttcaggcgagtgcattcattcttcatggaggtgcgacggaggacccgactgtaaggacaagtccgacgaggagaactgcgcagtggcaacctgtaggcctgatgaatttcaatgtagcgacggcaattgtattcatggcagtaggcaatgtgatagggaatacgactgcaaggacatgtctgacgaggtcgggtgtgtcaatgtaacactctgtgagggccccaataagtttaaatgtcactcaggcgagtgcatcacactggacaaggtgtgcaacatggcgcgcgactgccgggactggagtgacgaacctatcaaggaatgtgggactaacgcatgcctggacaataacggcggatgttcacacgtctgcaacgatttgaagatcgggtatgaatgtctctgccccgacgggttccagcttgtggctcagagacggtgtgaggacatcgacgagtgtcaggatccggatacgtgctcccagctttgcgtcaatctagagggcggctataaatgtcagtgtgaggaggggttccagctcgaccctcataccaaggcttgtaaagctgtgggtagcatagcttacctgttcttcactaacagacatgaggtaagaaagatgactctggacagatctgagtacaccagcttgataccgaacttgcgaaacgtcgtggctctggacaccgaggtggcctctaatcgcatttactggtcagacctgagccagagaatgatttgttcaacccagctcgaccgggcccatggcgtgtcatcctacgacactgtgatatcaagggacatacaagcgccagatggattggccgtggactggatccactcaaacatttattggaccgatagtgttctgggcacagtttccgtggcagacaccaagggagtgaagcgaaagacactgttccgggagaacgggagcaagccacgagccattgtggtggaccccgtgcatgggttcatgtactggacagattggggaactcctgctaagattaagaagggaggcttgaatggcgtagatatttactccctggtgaccgagaatatccagtggccaaacggaatcaccttggacctgctgtccggtagactttactgggtggattcgaagcttcatagtatttctagcattgatgtgaacggaggcaatagaaagaccattctggaagacgaaaaacgccttgctcatcctttttctctcgccgtcttcgaggataaggtattctggacagatataattaatgaggccatattctcagccaaccgtttgaccggaagtgatgtcaacctgcttgctgaaaatctgctatccccggaggacatggtgctgttccacaatctgactcagccacgaggagtgaactggtgcgagcgcaccaccctgtccaacggtgggtgccagtacctctgtctgcccgctcctcaaatcaacccccatagccctaagttcacttgcgcctgccctgacgggatgctcctggcacgggatatgaggagttgtctgacagaagccgaggccgcggtcgccactcaagagacgtctaccgtgaggctcaaggtcagctcaaccgccgtccggacgcagcacactacaacccggcctgtgccggatacatctagacttcctggtgcgacccccggcctgacaacagtcgagattgtgactatgagtcaccaagctctcggtgatgtggccggaagaggaaatgagaaaaaaccctcttccgttagagccctaagcattgtgttgccgatagtgctgctagtctttttgtgcctgggtgtattcttattatggaagaattggcgcctgaaaaatattaattccatcaactttgacaacccagtataccaaaaaaccactgaagatgaggtccacatttgtcataaccaggacgggtatagctacccctcaagacaaatggtgtctctggaagatgacgttgcc

SEQ ID NO: 16262 - DNA, 2580 bp, synthetic construct
  misc_feature 1..2580: note = source = /note="Description of Artificial Sequence: Synthetic coding sequence"
  source 1..2580: mol_type = other DNA
atgggaccttggggatggaaattaagatggactgttgcattattactcgcagcagcaggaacagctgtcggggatagatgtgaaagaaatgaatttcaatgtcaggacggaaaatgtatttcatataaatgggtttgtgatggatcagcagaatgtcaggatggaagtgacgaaagtcaggaaacatgcttgtctgtaacgtgtaaatcaggagattttagttgtggagggagagttaatcgttgtattcctcaattttggagatgtgatggacaagtagattgtgacaatggatctgatgaacaaggatgtccaccaaaaacttgttctcaagatgaatttagatgtcatgatggaaaatgtatttctagacaatttgtttgtgatagtgatagagattgtttagatggatcagatgaagcatcttgtccagttttaacatgtggaccagcatctttccaatgtaattcttcaacttgtattccacaattatgggcttgtgataacgatcctgattgtgaagatggttcagatgaatggccacaaagatgtagaggtttatatgttttccaaggagattcatcaccatgttcagccttcgaattccattgtctttcaggagaatgtatacattcatcatggcgttgtgacggaggacctgactgtaaggataaatcagatgaagaaaattgtgctgttgcaacttgtagaccagacgagtttcaatgttcagatggaaactgtattcatggatcaagacaatgtgatcgtgaatatgattgtaaggatatgagtgatgaagttggatgtgttaatgtaacattatgtgaaggtcctaataaatttaagtgtcattcaggagaatgtattacattagataaagtttgtaatatggctagagattgtagagattggtcagacgaaccaataaaggaatgtgggacaaatgcatgtttagataataatggaggttgtagtcatgtatgtaatgatttaaaaattggatatgaatgtttatgtccagatggatttcaacttgtagctcaaagaagatgtgaagatatagatgaatgtcaagatcctgatacctgttcacaattatgcgttaatttagaaggtggatataaatgtcaatgtgaagaaggttttcaattagatccacatactaaagcatgtaaagcagtaggatcaattgcttatttattctttacaaacagacatgaagttagaaaaatgacattagatagatcagaatatactagtcttatcccaaatttgagaaatgtagttgctcttgatacagaagtcgcttctaatagaatatattggtcagatctttcacaaagaatgatttgttcaacacaattagatagagctcatggagttagtagttatgatactgttatttctagagatatacaagcaccagatggattagcagttgattggattcattctaatatctattggacagatagcgttcttggaactgtatcagttgcagacacaaaaggagttaaaagaaaaacacttttcagagaaaacggaagtaaaccaagagctattgtagttgatcctgttcatggatttatgtattggacagattggggaacacctgcaaaaattaaaaaaggaggattaaatggagttgatatttattccttagttacagaaaacattcaatggccaaatggaattacattagatttattgagtggtagactttattgggttgattctaaattgcattctatttcatcaattgatgtaaatggtggaaatcgaaaaactattcttgaagatgaaaagcgtctcgcacatccattttcattggcagtatttgaagataaagttttttggactgatattattaacgaagcaattttctctgccaatagacttacaggtagtgatgttaatttattagctgaaaatcttcttagtccagaagacatggtattatttcataatttaactcaaccaagaggagttaattggtgtgaaagaacaacacttagtaatggaggttgtcaatatctttgcttaccagcaccacaaattaatccacattctccaaagtttacatgcgcatgtccagatggaatgttattagctagagatatgagaagttgtcttactgaggctgaagctgcagtagccacacaagaaacttcaactgttagattaaaagtttcatcaacagcagttagaacacaacacacaacaacaagaccagtaccagatacttcacgtctaccaggagcaacaccaggattaaccactgttgaaattgttactatgagtcatcaagctttgggagatgtcgctggaagaggaaatgaaaaaaaaccatctagtgttagagctttatccattgttttacctattgtattattggtttttttatgtttaggagtttttcttttatggaagaattggagattaaaaaatataaattctataaatttcgataatccagtctatcaaaaaacaacagaagatgaagttcatatatgtcataatcaagatggatattcttatcctagtagacaaatggttagtcttgaagatgatgttgca

SEQ ID NO: 16263 - DNA, 2580 bp, synthetic construct
  misc_feature 1..2580: note = source = /note="Description of Artificial Sequence: Synthetic coding sequence"
  source 1..2580: mol_type = other DNA
atgggtccctggggatggaagttaagatggaccgtggcccttctgctcgccgctgccgggaccgctgtgggagacaggtgtgagagaaacgagttccagtgtcaagatgggaagtgtatatcgtataagtgggtatgcgacgggtctgcggagtgccaggacggttcggacgagagccaggaaacttgcttgtccgttacatgtaaatctggagacttctcctgcggcggccgggtgaatcggtgcataccccaattttggcggtgcgacggccaggtggactgtgacaatggctcggacgaacaggggtgtccgccaaagacttgttcacaggacgaattcaggtgtcacgatggtaagtgtatcagccgccagttcgtgtgcgattctgatcgggactgcctggatgggagtgatgaggcctcgtgccccgtattaacttgcggaccggccagcttccagtgtaatagttccacctgcattccacagctctgggcatgtgataacgacccggattgcgaggacgggtcagatgaatggccccaaagatgccggggactgtacgtgtttcagggcgacagtagtccatgtagtgcatttgagtttcactgtctgagtggagagtgcatccatagctcgtggcgctgcgacggcgggccggactgtaaagataaaagcgacgaagagaactgcgctgttgccacgtgccgccctgatgagttccagtgcagcgatgggaactgtattcacggctcgcgtcagtgcgatcgagagtatgactgtaaagacatgtctgatgaggtagggtgcgtgaatgtaacactgtgtgagggaccgaataaatttaaatgtcattctggggaatgcatcaccctggataaggtatgtaacatggcacgggattgtagggattggtccgatgagcccatcaaggagtgtggcacaaatgcttgcctcgacaataatggcgggtgcagccatgtgtgtaatgatcttaagattgggtatgagtgtttgtgcccggacggcttccagctggtcgctcagaggcggtgcgaggatatagatgaatgccaggatcccgacacttgttcgcaactgtgcgtgaatctagaggggggatacaagtgtcaatgtgaggagggctttcagctggacccccacaccaaggcttgtaaagccgtgggtagtatagcctatctgttcttcaccaaccggcacgaggtccggaaaatgacactggataggagtgaatacacgagcctcatcccaaatcttcgcaatgtggttgcgctagatacggaagttgccagcaacaggatatattggtctgatctgtctcagcggatgatctgttcaacccagcttgaccgcgcacacggcgttagttcatatgataccgttattagccgagacatccaagcccctgacggtcttgccgtagactggatccacagtaacatttactggacggactccgtactgggaaccgtttcagtggctgataccaagggcgtcaagcggaaaacactttttcgcgagaatggaagcaaaccaagggcaattgtggtagatccggtgcatgggtttatgtactggacagactggggaaccccagcgaaaatcaaaaagggcggcctgaatggtgtggatatatatagcctcgttaccgagaatatccagtggccaaacggcatcactcttgatctgctttcgggacggttgtattgggtggactctaagctccactccatatcctcaatcgacgtaaatggggggaatcgcaagactattctagaagatgagaaacgtctagcccatcccttctctctggctgtcttcgaagataaagtcttctggaccgatattatcaatgaggccatctttagcgccaacagactcaccgggtcagacgtgaacctgctcgctgagaacttgctgagtcctgaggatatggttctctttcacaacttgacccagcctcgaggagtaaattggtgtgaaagaaccacgctttccaatggtggctgccagtacctctgtctcccagctccacaaattaatccccatagtcctaagttcacctgcgcttgtcccgacgggatgctgctagctcgggatatgaggtcatgcctaaccgaggctgaggccgccgtagccacccaggagacatcaaccgtgcggctgaaagtgagttctaccgcagtccgaacacagcacactactaccagacccgtgccagacacctctagactgccgggggctacaccaggtctgacaaccgtggaaattgtgacaatgtcccatcaagcgttaggggatgttgccggacggggcaatgagaagaaaccctcatccgtgcgcgccctctccattgtcttgcccattgtcttattagtattcctgtgtctaggcgtttttctgttatggaaaaattggagactaaaaaacatcaacagtattaattttgacaacccggtttatcagaagacaaccgaggacgaggtccatatctgccataatcaagatggttactcataccctagccgccagatggtgtcactggaggacgatgtggcc

SEQ ID NO: 16264 - DNA, 2580 bp, synthetic construct
  misc_feature 1..2580: note = source = /note="Description of Artificial Sequence: Synthetic coding sequence"
  source 1..2580: mol_type = other DNA
atgggcccgtggggatggaaacttcggtggacagtcgctcttttgctcgcagctgcaggcacggccgtaggagacaggtgcgagagaaatgaattccagtgtcaggacgggaaatgcatttcatataagtgggtgtgcgacggctccgctgagtgtcaagacggatcggacgagagccaggagacgtgcctgagcgttacttgcaagtcgggagacttttcatgtgggggacgcgtgaaccggtgcattccccagttctggcggtgcgacggtcaggtggattgcgataatggttctgatgagcagggttgcccgccgaagacctgttcccaggatgagttccggtgccatgatggaaaatgtataagcaggcagttcgtttgcgactcagatcgggattgtcttgacgggtccgatgaagccagctgccccgtgttgacatgcggcccggccagtttccagtgcaattcctcaacatgcattccccagttgtgggcctgtgacaacgaccccgactgcgaagacgggtcagacgaatggccccagaggtgtaggggcctttacgtgttccagggtgattcttctccttgctccgccttcgagttccactgcctgtctggcgaatgcatacattcttcctggcgttgcgacggcggccctgactgcaaagacaaatctgacgaggagaactgcgccgttgcaacttgcagaccggacgaattccaatgttccgatggcaactgtattcacggtagcagacaatgtgaccgcgaatacgactgtaaggacatgtcggacgaagtcggctgcgtcaacgtgactctgtgtgagggcccaaataagtttaagtgccacagtggggagtgtatcacgctggataaagtgtgtaatatggccagggattgtcgcgattggtcagatgagcccataaaggaatgtggaacgaatgcttgcctggataacaatggcggatgtagtcatgtgtgtaacgatttgaaaattgggtacgagtgtctgtgtcctgacgggtttcagcttgtggcccagcggaggtgcgaggacatagatgagtgtcaggaccctgatacttgctcgcaactgtgcgtgaatctagaaggcgggtataagtgtcaatgtgaagagggctttcaattggaccctcatacaaaggcctgcaaggcggtgggaagcatcgcttacctgttttttactaaccggcacgaggtgagaaagatgacactggaccggagcgagtacaccagtcttattccgaacctgaggaacgtggtcgcccttgatacggaggtggcctctaatcggatctattggtccgatctatctcaacgcatgatttgcagtacccagttggatcgcgcacacggcgtgagttcgtacgacacggtgatctcgagagacatacaggccccagatggactagccgtggattggatacacagcaacatctactggacagatagcgttctggggaccgtgtctgtcgccgatacaaaaggcgtgaagagaaagacgcttttccgggagaatggctctaaaccacgggctatagttgtggacccagtccatggcttcatgtactggaccgattggggaacacccgcgaagatcaagaagggaggcctcaacggggtggatatatactccctggtgactgaaaatatacagtggccaaatggcattaccctggacctcttatcaggtagactgtattgggtcgactcaaagctgcactccatttctagcattgatgtgaatggtggcaaccgtaagactattctcgaagacgagaagagactggcacatcctttctcacttgcggttttcgaggacaaagtcttctggacagacatcatcaatgaagctattttctccgctaatagattaacaggttccgacgttaacctgttggccgaaaatctgctgtcacctgaggacatggtgcttttccacaaccttacccagcctcgcggtgtcaactggtgcgagcggaccaccttgtcgaatggaggatgtcaatatctctgtttaccagccccacagatcaatccacacagccctaagtttacgtgcgcatgtccagatgggatgctactcgcacgagatatgagatcttgtttgacggaagctgaggctgctgtggcgacccaagaaacaagcaccgtgcgtctgaaagtgtccagtacggccgtgcgcacacaacatacaactacacgtcctgttcctgacacaagcagactccctggggccacacctggactgaccaccgtagaaatcgtgacaatgagccatcaggcgctgggcgatgttgccggacgtgggaacgaaaagaaacctagctccgtccgtgccttgagcatcgtgttacctatagttctgctggtgtttctatgtttgggcgtattcctgctttggaagaattggcgcctgaagaacattaactctattaactttgacaacccagtgtaccagaaaactactgaggacgaagtccacatttgtcacaatcaggacggatacagctacccatcgcgccagatggtgtctctggaagacgacgtggct

SEQ ID NO: 16265 - DNA, 2580 bp, synthetic construct
  misc_feature 1..2580: note = source = /note="Description of Artificial Sequence: Synthetic coding sequence"
  source 1..2580: mol_type = other DNA
atggggccctggggatggaagttgcggtggacagttgccctgcttctggctgcggcggggacggccgtgggcgaccggtgtgaacgaaatgagttccagtgccaggacggaaaatgtattagctataagtgggtatgcgatgggagtgctgaatgccaggacgggagtgacgagtctcaggagacatgtcttagtgtgacctgtaaaagtggcgatttcagctgtgggggccgcgtgaataggtgcatccctcagttctggcgatgcgatggacaggttgattgcgataatggatccgacgagcaggggtgtcctcccaaaacatgcagccaagacgagtttagatgccatgacggcaagtgtattagtcgccaattcgtgtgtgactcagatagggattgtcttgatggctctgatgaagcctcctgccctgtgttgacatgtggaccggcgtcattccagtgcaactcctctacctgcatacctcagctgtgggcttgtgataacgatcctgattgtgaggacggatcagacgagtggccgcagcggtgtcgcgggctgtatgtctttcagggagactcctcaccgtgctccgctttcgaattccactgtttgtctggcgagtgtatccactcatcatggcgatgcgatggaggccctgattgtaaagataagagcgacgaagagaactgcgccgtggccacctgtagacctgatgaattccaatgttccgacggcaattgtattcatggtagtcggcagtgcgacagggaatacgactgcaaggacatgtcagacgaggtgggatgtgttaacgtaaccctgtgcgagggccctaataagtttaaatgtcactcaggagaatgtatcactctggataaagtgtgtaacatggctagagactgcagagactggagtgacgaaccgataaaggagtgcggcacgaatgcgtgtctggacaacaatggtggctgttctcacgtgtgtaacgacctgaagatcgggtacgagtgtctgtgtcctgatggctttcagttggtagcacagcggcggtgtgaggacatcgacgagtgccaggaccccgacacttgctctcaattgtgcgtaaaccttgagggggggtacaagtgccagtgtgaggaaggcttccagctcgatccccacactaaggcttgtaaggccgtgggcagtattgcttacctgttttttaccaaccgacatgaggtccgcaagatgaccctggaccgaagcgagtatacatccttgatcccaaatctccggaacgtggtggctttggatacagaagtggcttccaaccgaatctattggagtgatctcagtcagagaatgatttgctcaactcagcttgatagagcccatggggtgtcttcctatgataccgtcatttccagggacatccaagccccagatggcttggccgtcgattggatccatagtaacatatactggacagattccgtgctcggaacagtatctgtggcggacacaaaaggtgtgaaacggaaaaccctgttccgggaaaacggatccaagcctcgcgcaattgttgtcgatccagtgcatggctttatgtactggaccgattggggtacccccgccaagattaagaaggggggactgaacggagtcgacatttatagcctggttaccgagaatatccagtggcccaatgggattaccctcgacctgctgagcggacggctctactgggtagactcaaaactgcatagcattagtagcatcgatgtgaacggagggaaccggaaaaccattcttgaagacgagaaacgactcgcccacccgtttagtcttgccgtgtttgaagataaggtcttctggaccgatatcattaatgaagctattttcagcgctaacagacttactggaagcgacgtgaatctgttggcagagaatctgctgtctcccgaggacatggtcctctttcacaatctcacacagccccgaggagtgaactggtgtgaaaggaccactctcagtaatggtggttgccagtacctctgcctgccagccccacagattaacccccattcccctaaattcacctgcgcttgccccgatggtatgttgctggcccgggatatgaggagctgtctgaccgaggcagaagccgcagtggctactcaggagacaagcaccgtacggcttaaggttagttccaccgcggtcaggacccaacacacaactactaggcctgtaccagataccagtcggcttccaggagccacacccggccttactacagtagagatcgttacaatgagtcaccaggcgcttggtgacgttgccggaagggggaatgagaaaaaaccctcctccgtgcgcgcactcagtatcgtcctccctatagtgctcctggtgttcctgtgtctgggagtcttccttctgtggaaaaattggcgcctgaagaatatcaactccatcaactttgataacccagtgtatcagaagactacggaggatgaggtgcacatctgccacaatcaggacgggtatagttacccatccagacagatggtgagcctggaggacgatgtagct

SEQ ID NO: 16266 - DNA, 2580 bp, synthetic construct
  misc_feature 1..2580: note = source = /note="Description of Artificial Sequence: Synthetic coding sequence"
  source 1..2580: mol_type = other DNA
atgggtccctggggctggaagctccgctggaccgtggcactcctcctggcagctgccggaacagcagtcggagaccgctgtgagagaaacgagttccagtgccaggacggtaagtgtatctcctacaagtgggtgtgcgatggaagtgctgaatgtcaggacggtagcgacgagagccaggagacttgcctgagtgtgacctgtaaatctggagacttctcctgcggcggccgcgtcaataggtgcataccacaattctggaggtgcgacggacaggtcgattgcgacaatggatcagatgaacagggatgtccacctaagacttgtagtcaagacgaattcagatgtcatgacggtaagtgtatttccagacaattcgtctgcgatagcgacagagattgtctggacggctctgacgaagcttcctgtccagtacttacctgcggcccagcatcttttcaatgtaactcttcaacttgcatccctcagctgtgggcctgcgataacgatcctgattgcgaggatggtagcgatgagtggcctcaaaggtgccgcggtctgtacgtatttcagggagactctagcccctgctcagcctttgaattccactgtctctccggcgagtgtattcatagctcctggaggtgcgatggaggtcccgactgtaaggacaagtcagacgaggagaattgcgccgtagctacctgccgccctgatgaattccagtgttccgacggcaactgcattcatggttccaggcagtgtgatagagagtacgactgcaaggacatgagcgatgaggtcggttgcgtcaatgtgaccctgtgcgaaggcccaaacaagttcaaatgtcacagcggcgagtgtatcacactcgataaggtctgtaatatggccagagactgcagagactggtcagacgagcctattaaggagtgcggcacaaacgcctgcctggacaacaacggcggttgcagccacgtgtgtaatgatctgaaaattggttatgagtgcctctgtcctgacggattccaattggttgctcagaggcgttgcgaagacattgacgagtgtcaagatccagacacatgctctcagttgtgcgtgaacttggagggcggctataagtgtcaatgcgaagagggttttcaacttgatcctcataccaaggcatgcaaggctgtcggcagtattgcatacctgttcttcacaaaccgccacgaggttcgcaagatgaccctcgaccgttctgagtacaccagtttgatccccaacctgagaaatgtggtggctctcgataccgaggtagctagtaacaggatctactggagtgacctgtctcagcgtatgatttgttccactcaactcgatcgcgcccacggcgttagtagctatgataccgtcatctctcgtgacattcaggcccctgacggcctggccgtcgactggatccactcaaacatctactggaccgattcagttctgggtaccgtaagtgtcgccgacaccaaaggtgtgaaacgcaagactctttttagggagaatggaagcaagccccgtgcaatcgtcgtggatcccgtacacggtttcatgtattggactgactggggaactcccgcaaagatcaaaaaaggcggtctgaacggagtcgatatctacagtctcgtgacagagaatattcaatggcccaacggtatcacactcgatctgctgagtggacgcctgtactgggtggactccaagctgcacagtatcagcagtattgacgtgaacggcggcaaccgtaaaacaattctcgaagatgaaaagcgcttggctcacccattcagcctcgctgtctttgaagacaaagtgttctggacagatatcatcaacgaagctatcttttcagccaatcgtctgaccggttccgacgtgaatctcctggcagagaaccttctgtcccccgaggacatggtcctgttccacaacctgacacaaccaagaggagtcaactggtgcgaaaggaccaccctgtctaatggcggctgtcagtacctgtgccttcctgctcctcaaatcaatccacactctcctaaattcacctgcgcatgccccgatggaatgttgcttgcccgtgatatgaggtcatgtctgaccgaagccgaggccgctgtggctacccaggagacatccaccgtgcgcctgaaggtctccagcactgctgtgagaacccaacatactacaacccgtcctgttcctgacacatccaggctgcctggtgcaacacctggactcactacagtagagatagtcacaatgagccatcaggcactcggcgatgtagctggacgtggtaatgagaaaaagcccagctccgtgcgcgccctttctatcgtgctgccaatcgtgctcctggttttcctgtgcctcggcgtcttcctgctttggaaaaattggcgtttgaagaatattaactctataaatttcgacaatcccgtttaccagaagaccacagaggatgaggtacacatatgccacaatcaagatggttattcttacccaagtcgtcagatggtgtcactcgaggacgatgtagca

SEQ ID NO: 16267 - DNA, 2580 bp, synthetic construct
  misc_feature 1..2580: note = source = /note="Description of Artificial Sequence: Synthetic coding sequence"
  source 1..2580: mol_type = other DNA
atgggaccttgggggtggaaactccgatggactgttgctctgttgctcgctgcagctgggacagcagttggggatcggtgcgaacggaacgaattccagtgtcaggatgggaaatgcatatcatacaagtgggtctgtgatgggagtgctgaatgtcaggatgggagtgatgaatcccaagaaacttgtctgtctgtgacttgtaaaagtggagacttttcttgcggaggacgcgtcaacagatgcatcccacagttttggaggtgtgatggacaggttgattgtgataatgggagtgatgagcagggatgcccacctaagacatgctcccaagatgaatttaggtgccatgatgggaaatgcatctctaggcaatttgtgtgcgacagtgatcgagattgtttggacggatctgatgaagcttcttgtcccgtgctcacatgtgggcctgcatccttccagtgcaattcctcaacttgcatcccccagctttgggcttgtgacaatgatcccgattgtgaggacggatctgatgagtggccacagcgctgtcggggattgtatgtttttcagggggattccagtccttgctctgctttcgaatttcactgcttatctggagaatgcatacacagttcttggaggtgtgacgggggacctgattgcaaagataaatctgacgaagaaaactgtgctgttgcaacatgtagaccagatgaattccagtgtagtgatgggaactgcattcacggatcgcggcagtgcgaccgagagtacgattgtaaggatatgtctgatgaagttgggtgcgttaatgtcacactgtgtgaagggcctaacaaattcaagtgtcactctggagagtgtatcactctcgataaagtttgcaatatggctagagattgtcgcgattggtcagatgaacctataaaagagtgtggaactaatgcttgcttagacaacaatggggggtgttctcatgtgtgtaacgatctaaagatagggtatgaatgcttatgtcctgatgggttccagttagttgctcagcggcgttgtgaggatatagatgaatgtcaggaccccgatacatgtagtcaattgtgtgtcaacctcgaaggggggtacaaatgccagtgtgaagagggatttcagctcgatcctcacactaaagcctgcaaagccgtggggtccatcgcctatctcttttttactaatagacatgaagtgaggaaaatgacactcgatcggtctgaatacacttcattaatacccaacctaaggaatgttgttgctcttgatactgaagtcgctagtaacaggatctattggagtgatctgtcacagaggatgatctgttcaacacagttggatcgggctcatggagtgtcatcatatgatactgtgatctctcgggatatccaagccccagatggactcgctgtggattggatacatagtaacatttactggacagatagtgtactcggaacagtctccgtggcggatacgaaaggagttaaaagaaaaactctctttcgggagaatgggtcaaaaccccgggcgatcgtggttgatcctgttcacggattcatgtattggacagattgggggacacctgccaaaatcaagaaagggggactcaatggagtcgatatttatagtctggtcactgaaaacatacaatggcccaacggaataacactcgatcttctttcagggaggctctattgggtcgattctaaactccactctatctcatccattgatgtgaatgggggaaatagaaaaacaatcctcgaagacgaaaagcggcttgctcaccctttctcactcgcggtgttcgaagataaagtattttggacagacataataaacgaagccatcttcagtgctaatcggttgactgggtctgacgtgaacttattagctgaaaacttgctcagtccagaagatatggtgctattccacaacctgactcaaccacggggagtgaactggtgtgaacggactacattatcaaatggagggtgccagtatctctgcctgcccgcgcctcaaatcaacccccatagtcctaaattcacgtgtgcctgcccagatggaatgctgttagcacgagatatgagatcctgtctgacagaagccgaggccgccgtagcgactcaggaaactagtacagtaaggctcaaagtgtcatccactgctgtgcgcactcagcacacaacaactcgaccagtacccgatacaagtcggctgcccggggcaacacccgggctaactactgtagaaattgtgactatgtcacatcaggctctgggagatgtagctggacgggggaacgagaagaaacctagttcggtgagggctctttccatagttctccctatcgttctcctcgtgtttctgtgtttaggagtatttttactgtggaaaaattggaggctaaaaaacataaacagtattaacttcgacaatccagtctatcagaagacaacagaagacgaagtccatatctgtcataaccaggatggatattcttatcccagtcggcagatggtctccctcgaggatgatgttgca

SEQ ID NO: 16268 - DNA, 2580 bp, synthetic construct
  misc_feature 1..2580: note = source = /note="Description of Artificial Sequence: Synthetic coding sequence"
  source 1..2580: mol_type = other DNA
atggggccctggggctggaagttgcgttggaccgtagcacttctgctcgccgcagcaggcactgctgtaggagaccgatgcgagcgaaacgaattccagtgtcaggatggcaagtgtatcagctacaagtgggtgtgcgacggatccgctgaatgccaggatgggtctgacgagtctcaggagacatgtctttccgtgacctgtaagagcggtgacttttcgtgtggagggcgggttaacagatgtattccacagttctggcggtgtgacgggcaggttgattgcgacaatggatcagacgagcagggttgcccacccaaaacctgcagccaagatgaatttaggtgccacgatggtaagtgtatttcacgccagtttgtctgcgattcggatcgagactgcttagacggctcagatgaggcatcatgtcctgtgttaacatgtggccctgcttcatttcagtgcaattctagcacctgcatcccccagctctgggcttgtgacaacgatcctgattgtgaggatgggtcagatgagtggcctcagcgatgcaggggcctttacgtcttccagggcgatagttcgccctgctcggcattcgagtttcattgcctgagtggagagtgcatccactctagctggcgatgcgacggcgggcctgattgcaaagacaagtcagacgaagagaactgtgctgtggccacctgcagacctgatgagtttcaatgctcagacggaaattgcatccacgggagtcggcaatgcgaccgtgagtacgactgcaaagatatgagtgacgaagtgggatgcgtgaatgtcaccctatgcgaaggcccgaacaagttcaagtgtcactctggagaatgtatcaccctcgataaagtgtgtaatatggctagagattgtcgagattggtcggacgaacctatcaaagagtgcgggaccaatgcctgcctcgataataatggggggtgttctcacgtctgcaatgatttaaagattggctatgagtgcctgtgccccgacggctttcaacttgtagcacagaggcggtgcgaagacatcgacgagtgtcaggaccctgacacatgttctcagctctgtgtgaacttggaaggcgggtataaatgtcagtgtgaggagggctttcaacttgacccacataccaaggcgtgcaaagcagtcgggtccatcgcctatctgttcttcaccaaccggcacgaggtaagaaagatgacactcgaccgatccgagtatacatctttgattcccaatcttcgcaacgttgtggctctcgatacggaagtggcatccaaccggatatattggtcagacctgtcgcagcgtatgatctgtagtacccagcttgaccgggcccacggcgtcagctcatatgatactgtgatcagccgggatattcaggcccccgatggtctcgctgtcgactggatacactctaatatatattggacggattccgtgcttgggactgtctcagttgcggacacaaagggagtgaagcgcaagacactctttagagagaacggctccaagccccgcgctattgtggtggaccctgtacatggctttatgtattggacagactggggcacgcccgctaaaattaagaaggggggactcaacggagtggatatctactcgctcgtgacggagaacatccagtggcccaacggcattactctggacctgttgagcggacggctctactgggttgactctaaacttcattcgatttcttctattgacgttaacggtggtaaccgtaaaacgatcctcgaggatgagaaacggctagcccacccgttttctcttgccgttttcgaggataaagtgttttggacagacatcatcaatgaggcaatttttagcgcaaatcgcctaaccgggtctgacgtgaacttgctggccgaaaatctgcttagccctgaggatatggtgctattccataacctcacgcagccccgcggcgtgaactggtgtgaaagaactaccttgagcaacgggggctgccagtacctgtgtctgcccgcaccacaaattaatccacatagcccaaaattcacttgcgcctgtccggatggcatgctcctcgctcgggacatgcgcagctgtctcactgaggctgaggcagcggtcgcgacacaggaaacctctaccgtgagactcaaggtaagttccaccgcagtgcgaactcagcatacaacgacaaggcccgtgccagatacttcccggctgccgggagcaacacctgggctgacaactgtggaaatcgtgacaatgagccatcaggcactgggtgacgtggcggggcggggtaatgaaaagaagccctcttcagtgcgagcactttccatcgtgttgccgatcgtgcttctggtttttttatgtctaggcgtctttctgctctggaaaaattggcggctgaagaatattaatagtatcaatttcgacaatccagtctatcaaaaaacaacggaagacgaggtgcacatctgtcacaatcaagatggctactcttatccatcaaggcaaatggtgagcctggaagatgatgtcgcc

SEQ ID NO: 16269 - DNA, 2580 bp, synthetic construct
  misc_feature 1..2580: note = source = /note="Description of Artificial Sequence: Synthetic coding sequence"
  source 1..2580: mol_type = other DNA
atgggaccttggggatggaaactgcgatggactgttgcactcttgcttgccgctgcgggtaccgcagtgggagatcggtgcgagagaaacgaatttcagtgtcaggatggaaagtgcatttcgtacaagtgggtttgtgatggttccgccgaatgtcaagacggttccgacgaatcccaagagacttgcctgtcggtgacgtgcaagagcggcgacttttcatgcggcggaagagtgaacagatgtattccccaattctggaggtgtgacggacaggtggattgtgataacgggtccgacgaacaaggttgccccccaaagacgtgttcacaagatgagtttagatgtcacgatggcaagtgtatctcgcgacagttcgtgtgtgatagcgatcgcgactgtctggatggttcggatgaggcctcgtgccctgtcctcacgtgtggacctgcgtcgttccagtgtaattcctcgacctgtattccccagctgtgggcttgtgacaacgaccccgattgcgaagatggatcggacgaatggcctcagcgctgtcgcggactgtacgtgttccaaggggacagcagcccatgctcagcgtttgagtttcactgtctctccggcgaatgtatccactcgtcctggcggtgtgatggtggccctgactgtaaggataagtcggacgaggagaactgtgcagtcgcaacttgtagacccgacgagtttcagtgttcggacggaaactgtattcacggttccagacaatgtgatcgagaatacgattgtaaagatatgtcagacgaagtgggttgtgtgaacgtgaccctgtgtgaaggaccaaataagtttaagtgccatagcggagaatgcatcactctggataaggtgtgtaatatggcaagagactgccgagactggtccgatgaaccaatcaaggaatgcggaacgaacgcctgccttgacaacaacggaggttgctcgcacgtgtgtaacgatttgaaaatcggatacgagtgtctttgtccagacggttttcaacttgtcgcacaaagaaggtgtgaagatatcgatgaatgccaagatcctgatacctgtagccaactgtgtgtgaatctggaggggggctacaagtgccaatgtgaagaaggttttcagctcgatcctcatactaaggcatgcaaggcagtgggttcaattgcatacctgtttttcaccaatcgccacgaggtccgaaagatgactttggatcgctccgaatacaccagcctcattcctaaccttcgcaacgtcgtggccttggataccgaagtcgcatccaaccgaatttactggtccgatctttcgcaacgcatgatttgctcgactcagcttgatagggcacatggggtgtcctcatacgataccgtgatctcgcgagacattcaggcgcccgacggactggcagtggactggattcactcgaacatttactggaccgattctgtcctgggtaccgtttccgtcgcagataccaagggtgtgaaacgtaaaacgctctttcgcgaaaacggttcaaagccgcgggcaattgttgtcgatcctgtgcatggctttatgtactggactgattggggcactcctgctaagataaagaaaggaggtcttaatggagttgacatttactcgcttgtgactgagaatattcagtggccgaatggaataacgctcgatcttctgtcagggagactgtattgggtggattcaaagctccatagcatttcgtctatcgacgtgaacgggggtaatagaaagaccatcttggaagatgaaaaaagacttgcacatcctttttctctggcagtgttcgaagataaagtgttctggaccgatatcatcaacgaggctatcttttctgccaaccggttgactggtagcgacgtgaacttgctggcagaaaatctgctttcaccggaggatatggtgctcttccataatctcacccaaccaagaggggtcaactggtgtgagaggactactctctcgaatggtggatgccagtatctttgccttccagcaccccagataaatccacatagcccaaagttcacttgtgcgtgtccggatggcatgcttctggctcgggatatgcgtagctgcctgactgaagcagaggcagcagtggcgactcaagaaacttcaactgtgaggctgaaagtgtcatcgacggcagtgcgaactcaacataccactactaggcctgttcctgacacgtcgagattgccaggcgcgactcccgggcttaccactgtcgagatagtcaccatgtcgcatcaagcattgggcgacgtggcaggacgcggtaatgagaaaaaaccatcttccgtccgcgccctctccatagtcctgcctattgtgttgctcgtctttctgtgcctgggcgtctttctgctgtggaagaactggcggctgaaaaacattaactccatcaacttcgataaccctgtgtaccagaaaaccaccgaggacgaggtccacatatgccacaatcaagacggttacagctacccctctcgccaaatggtgtcacttgaagatgacgtggcg

SEQ ID NO: 16270 - DNA, 2580 bp, synthetic construct
  misc_feature 1..2580: note = source = /note="Description of Artificial Sequence: Synthetic coding sequence"
  source 1..2580: mol_type = other DNA
atgggtccatggggttggaagctgcgctggactgtggccctgctgcttgccgccgctggcaccgccgtcggcgaccggtgcgagcgcaacgaattccagtgccaggacggaaagtgcatctcgtataagtgggtgtgcgacggcagcgccgagtgtcaggacggatcggacgaatcgcaggaaacctgcttgtcggtgacctgcaagagcggtgacttctcgtgcggcggacgggtgaacaggtgtatacctcaattctggcggtgtgacggacaagtcgactgcgacaatggctcggacgagcaaggatgcccccctaagacctgctcccaggatgaatttagatgccacgacggcaagtgcatttcacgccaatttgtctgcgactccgacagagattgcctcgatggatccgacgaagcgtcctgcccggtcctgacttgcggcccagcctctttccaatgcaacagctcaacgtgtatccctcagctctgggcatgcgacaacgacccggactgtgaggacggaagcgacgagtggccacaacgctgccgggggctgtacgtgttccaaggagattcctcgccttgtagcgcgttcgaattccactgtcttagtggcgagtgtattcatagctcgtggaggtgtgacggcggaccggactgcaaggacaagtctgatgaggaaaattgcgccgtggcgacttgccggccggacgagttccagtgttcggatggtaactgcatccatggctcaagacagtgcgaccgcgagtacgactgtaaggatatgtcagatgaagtgggatgcgtcaatgtcaccctctgcgagggaccaaacaagtttaagtgccacagcggagagtgtatcactcttgacaaggtgtgtaatatggcccgggactgccgcgactggagcgatgagccaattaaggaatgtggcactaacgcatgtcttgacaacaatggaggatgttcgcatgtgtgcaacgatctgaaaatcggttacgaatgcctgtgcccggacggatttcagctggtggcgcagcgccggtgtgaagatatcgatgaatgccaagacccggacacctgttcccaactctgtgtgaatctggaaggggggtacaaatgccaatgtgaggagggattccagctggatccgcacaccaaggcgtgcaaggcagttggatcgattgcgtacctgttctttactaataggcatgaggtcagaaagatgactctggaccggagcgagtacactagcctgatcccaaatctgcgcaatgtggtggccttggacacggaggttgcgtcgaatcggatctactggtcggacctctcacagcgcatgatctgctcgacccaactggaccgggcccatggtgtgtccagctacgataccgtgatcagcagggacatacaagctccagatgggctcgctgtggactggattcattcaaacatctactggacggattccgtgctcggaaccgtgtcggtcgctgacactaagggagtgaaacgtaagactctgttcagggaaaacggatcaaagccacgcgcaatcgtggtggaccccgttcatgggttcatgtactggaccgactggggaaccccggcgaaaatcaaaaagggcggcctcaatggtgtggacatctacagtctcgttactgaaaacatacagtggcccaacggaatcaccctcgatctcttgtctggacggctttactgggtagattccaagctgcactcgatcagcagcatcgacgtgaatggcggaaaccgcaaaaccatcctggaggatgaaaaacgcctggcccacccattttccctcgctgtgttcgaggataaggtgttctggactgacatcatcaacgaagccatcttctcggcgaatcgcctgacgggctccgatgtcaatttgttggccgagaacttgctgtcgccagaggatatggtgctgttccacaatctgacccagccacgcggagtcaactggtgcgaacgcaccaccctgtcaaacggcggctgccagtacttgtgcttgccggccccgcaaatcaacccgcacagcccgaagtttacgtgcgcatgtccggacggaatgctcctcgcccgcgatatgcgctcgtgtctcacggaggccgaagcagccgtggcgacgcaggaaacttcgactgtgagactgaaggtgtcatcgactgccgttcgcacccagcacactactacgcgtcccgtccctgatacttcgcggctgccgggcgcaaccccgggactgaccaccgtggaaatcgtgaccatgtcccaccaggcgctgggagatgtggcaggaagaggaaacgagaaaaagccatcgtcagtccgcgcactgtccatcgtgctgccaattgtcctgctcgtgtttctgtgcctgggagtctttctgctgtggaagaactggaggctcaagaatatcaattccatcaatttcgacaaccctgtgtaccaaaagactacggaggacgaagtccacatctgtcacaatcaagacggatactcgtacccaagccggcaaatggtgtcgctggaagatgatgtggcg

SEQ ID NO: 16271 - DNA, 2580 bp, synthetic construct
  misc_feature 1..2580: note = source = /note="Description of Artificial Sequence: Synthetic coding sequence"
  source 1..2580: mol_type = other DNA
atgggtccttggggctggaaacttcggtggacagtcgctttacttctggcggctgctggcacggcggttggagataggtgtgagcgcaacgaatttcagtgccaggatggcaaatgtatttcctataaatgggtatgcgacggctctgcggaatgccaggatggatctgatgaatcacaagaaacatgtttaagtgtgacatgcaaatcaggagacttctcatgcggcggcagggtaaatagatgcatcccgcagttttggaggtgcgatgggcaagtagattgcgataatggatctgacgaacaaggatgccctccgaagacttgttcgcaggacgaatttcgttgtcatgacggcaaatgcatttccagacaatttgtgtgtgattctgatagggattgtttggatggttcagacgaagcaagctgtccggtattgacctgcggccctgcatcatttcaatgcaatagctctacctgcattccgcagctctgggcttgtgacaacgatccagattgtgaagatgggtctgatgagtggccgcagcgctgcagaggtctttacgtttttcagggggacagctccccttgttctgcctttgaattccattgcctgagtggcgaatgcatccatagcagctggcggtgcgacggcggcccggactgcaaagataaaagcgatgaagagaactgcgcagttgccacatgtaggccggatgagtttcagtgctctgatggcaattgcatccatggcagccgtcaatgtgatcgtgaatatgattgtaaagatatgtcagatgaagtcggatgcgttaatgtcacattatgcgagggcccgaataaatttaaatgtcattctggtgaatgcattacactcgacaaagtttgtaacatggcaagggattgtagagattggtcggacgaaccaatcaaagaatgtggaactaacgcttgccttgacaacaatggaggatgtagtcatgtttgcaacgatttaaagatcggatacgaatgtttgtgtccggacgggtttcagcttgtagctcagcgccgctgtgaagacattgatgagtgccaggatccagatacttgcagccaactgtgcgttaatctcgaaggcgggtataagtgccagtgcgaagaaggctttcaattagaccctcataccaaagcttgtaaagcagtcggtagcattgcctacttatttttcacaaaccgtcacgaggtccgaaaaatgacactggaccgctccgaatatacgagcttaattcctaatttgcggaacgttgtggcactggataccgaggtcgctagcaaccgtatttattggtccgacttaagccagcgtatgatttgtagtacacaattggacagagctcatggcgttagctcatatgacacggtcatatccagggatatccaggctccagacggattagcagtagattggatccattcaaatatctattggacggactcagtgcttggcactgtatctgttgccgatacgaaaggggttaaacgcaaaaccctttttcgggaaaatgggagcaaacctcgcgcgattgttgtggatccagttcacggttttatgtattggactgattggggtacaccagctaaaatcaagaaaggaggccttaacggggtggacatctactccctggtgacagagaacattcagtggcctaacggaatcactctggatcttttatccggtcgcctttattgggttgatagcaagcttcattcaatctccagcattgacgtaaacggagggaatcgcaaaacaattctcgaagacgagaaacgacttgcgcatccattttcacttgctgtctttgaggataaggttttttggacagatatcattaacgaagccattttcagcgcgaatcgacttaccggctctgatgtgaatttgctggcagaaaatctcctgagtcccgaagatatggttttgtttcacaatttaactcaacctagaggtgtcaattggtgcgaaagaacaaccctaagtaatggcggctgccaatacctttgtttgccggccccccaaatcaacccgcattcccccaaatttacatgtgcctgtccggatggtatgcttttagcccgcgacatgcggtcttgcttgacggaagcagaagcggcagtggctacacaggaaacatctacagttagattgaaggtctcctctacagcggttaggacacagcatacgaccacgcgcccagtcccggacacctcgcggctaccgggagcgacccctggtttgacaacagtcgaaattgttactatgtctcatcaggccctcggagatgtggctgggcgtggcaatgaaaaaaagcctagttcggtcagggcactctctatcgttttgccgattgtcttactggtgtttttatgcctaggggtctttctgctttggaaaaattggagattgaaaaatataaattctattaactttgataatccggtgtatcaaaaaacaacagaggatgaggtgcatatatgccataatcaagacgggtactcctatccaagccgccaaatggtgtcattggaggatgatgtcgct

SEQ ID NO: 16272 - DNA, 2580 bp, synthetic construct
  misc_feature 1..2580: note = source = /note="Description of Artificial Sequence: Synthetic coding sequence"
  source 1..2580: mol_type = other DNA
atgggcccgtggggctggaaactgaggtggacagttgcactgctcttagctgctgctggcacggccgtgggcgaccggtgcgaaaggaatgaattccagtgccaggacggaaaatgcataagctataaatgggtgtgcgacggctcggctgaatgccaggatggaagtgatgagagtcaggaaacctgcctttcagtgacgtgtaaaagcggcgacttcagctgcggaggaagggtaaaccgctgtatcccacaattttggaggtgtgatggtcaagtcgattgcgacaacgggtctgacgagcagggatgccctcccaaaacgtgctcccaggatgagtttagatgccacgacggcaagtgcatttccagacagttcgtgtgtgactccgatcgggattgccttgacggctccgacgaagcatcctgccccgtcctgacctgtgggcctgctagtttccagtgtaacagttccacctgcatccctcagctttgggcctgtgataacgatcctgattgcgaggatggctcagacgaatggccacagcggtgcaggggcctgtacgttttccaaggggatagctcaccctgtagcgcttttgagttccactgtttatctggtgagtgcatccattcgtcctggaggtgcgacggtggacccgactgcaaagacaagagtgacgaagagaactgtgcagtcgctacctgccggcctgacgagttccaatgtagtgatggaaattgcatacatggctcaagacagtgtgaccgggagtacgattgtaaagacatgagtgacgaggtggggtgcgtgaatgtgactctgtgcgaaggtcctaataagtttaagtgtcattccggagagtgtattacacttgacaaggtatgcaacatggctcgagactgccgagattggagcgacgagcccatcaaggagtgcggcacaaatgcctgtctcgataataatggggggtgctcacacgtatgcaacgacctcaaaatcggctatgagtgtttgtgcccagacggttttcagctggtcgcccagcggcggtgtgaagacatagatgaatgccaagatcccgatacctgctcccaactttgcgtgaatctcgagggaggatataagtgccagtgcgaagagggttttcaactcgacccccacaccaaagcctgcaaagctgtggggtctatcgcctacctattctttaccaacaggcatgaagttcgtaaaatgaccctcgatcgcagtgagtacacatctttgattcccaacttgcgaaacgttgtcgcactcgatactgaggtcgcctctaaccgaatatactggtctgacctctcccagcgaatgatttgcagcacacagctggaccgcgcgcatggcgtgtccagctacgatacagtgatcagcagggacatccaagctccggatggactggctgtggactggatccatagcaacatttactggaccgactcggtgctggggactgtttcagtcgcagacaccaagggggtgaagcgcaagaccttgtttagggagaatggcagcaaacccagagcaattgttgtagatcccgtgcatggatttatgtattggactgattggggcactccggccaaaatcaaaaaaggtggcctcaatggggtggatatttactcactggtaacagagaacatccagtggcccaatgggattacactggatctactatcggggaggctctactgggtggacagcaagctacatagcatatcctccatcgacgtcaacggggggaatcgtaagacgatcctggaagacgagaagcggctggctcaccctttcagtttggccgtgttcgaggacaaagtgttctggactgacattatcaatgaagcaattttcagcgcaaatcgtttaaccgggtctgacgtgaatttgttggcagaaaacttgctgagcccagaggatatggttctgttccacaaccttacgcagccgaggggagtcaactggtgcgagaggacaaccctctctaacggcggctgccagtatttgtgtctgcccgcccctcagatcaacccacattccccgaagtttacctgcgcctgcccagacggcatgctcctagccagggatatgagaagctgccttactgaagccgaggcggcggtggcgacgcaggagacatctaccgtgcgcctcaaggtttctagcaccgctgtgcgtacccaacacaccactacaagacctgtaccagacacctcccgcctaccgggagcaaccccaggtctgaccactgtggaaatcgtaaccatgtcccatcaggccctaggtgacgtggccgggagaggtaacgaaaaaaagcctagtagcgtgcgagcactgtctatagtgcttcccattgtactgcttgtttttctatgtctcggggtctttctactttggaagaattggagattgaaaaatataaattctattaatttcgataatcccgtgtatcagaagacaaccgaagacgaagtgcatatctgccataatcaggatggatactcgtaccctagtcggcagatggtgtccctcgaagatgatgtggcc

SEQ ID NO: 16273 - DNA, 2580 bp, synthetic construct
  misc_feature 1..2580: note = source = /note="Description of Artificial Sequence: Synthetic coding sequence"
  source 1..2580: mol_type = other DNA
atgggaccctgggggtggaaactgagatggactgtagctctacttctcgccgcagctgggacagctgttggagatcgctgcgagaggaacgaatttcagtgtcaggatggaaaatgtatctcatataaatgggtgtgtgacgggtccgcagaatgccaggatggaagtgatgaatctcaggaaacatgcctttccgtgacttgcaaatccggggatttttcctgtggaggaagggtgaacaggtgtataccccagttttggaggtgtgatgggcaggtcgattgtgacaatggatcagatgaacaggggtgtcctcctaaaacttgctcccaggatgaatttaggtgtcacgatgggaaatgtatttcccggcagttcgtatgtgattcagatagggactgcttggatggatccgatgaagcctcttgtccagtgctcacttgtgggcccgcctcttttcaatgtaatagttccacttgcatcccccagctatgggcctgtgataacgatcccgattgcgaggacggaagtgatgaatggcctcagcgatgtcgggggctttacgtatttcagggagattctagtccctgctctgcatttgaattccactgtttatccggagaatgtattcattcatcatggcgctgtgatgggggacccgattgcaaagataaatcagatgaagaaaattgcgcagtggccacttgtcggccagatgagttccagtgttccgatggaaattgcattcacgggagtaggcagtgtgatagagaatatgattgcaaagatatgtcggacgaggttggatgtgtaaatgtgactctctgtgaaggaccaaataaattcaagtgtcactctggagaatgcattactttggacaaagtatgcaatatggctcgtgattgcagagattggtctgatgaaccaataaaagaatgtgggacaaacgcttgtctcgataacaacgggggatgctctcatgtttgcaacgacctaaaaatcgggtatgaatgcctctgcccagacggattccagttggtggcccagcggagatgcgaagacatcgatgaatgccaggatcctgatacttgctcccagctttgcgtcaatctcgagggagggtataaatgccagtgtgaagaaggattccagctggaccctcatactaaagcttgtaaagccgtgggatcaatcgcctacttatttttcacaaatcggcacgaagtgcgaaaaatgactctagataggtcggagtatacatcactcatccccaacctccggaacgttgtagccttagatactgaggtagcctccaaccggatctattggtccgatctgtcacagagaatgatatgctctacacagcttgatcgggcacatggagtgtcttcttatgacacagttatttctagagatatacaggctccagatggactcgcagtagattggattcactctaacatctattggacggattctgtcctgggaacagtgtctgtagcagatacaaaaggagtgaaaaggaaaactctcttccgggaaaatggatccaaacctagggccattgtcgtggatcctgtccacgggttcatgtactggacagactgggggacaccagctaagatcaaaaaagggggacttaacggggtggatatatattcactcgtgacagaaaatattcagtggccaaatgggataacactggacctactatcggggcgcctttactgggtggatagtaaactacactcaatctcttcaatcgatgtcaacggagggaaccgaaagacaatacttgaagatgaaaaacggctggcacatccattttcattagctgttttcgaagataaagtattttggactgacatcatcaacgaagcaatcttctctgcaaaccggcttactgggagtgatgtgaatctgctcgcagagaatttgctttcccctgaagatatggtgctcttccacaaccttactcagccacggggggtaaattggtgtgaacgcactacgctcagtaatgggggatgtcagtatctgtgtcttcctgcacctcagatcaacccccattcgcccaaatttacttgtgcctgtccagatggaatgctgttggcccgggatatgaggtcttgtctgactgaagccgaagcggctgtagcaacacaagagacatccactgttaggctcaaggtcagtagtacagcagtaagaactcagcatactacaacacgcccggtgcctgatacatctagacttccaggggcaactcctggactaactacagttgaaattgtgactatgtcccatcaggcactgggagatgttgctgggcgcggaaacgaaaaaaaaccctctagtgtccgagctctatctatagtactacccattgtcctcctagtattcctttgtcttggagtctttcttctctggaaaaattggagattgaagaacattaactcaattaactttgataaccccgtgtaccagaaaactacagaagatgaagtgcatatctgtcacaaccaggatggatactcatatccttcacggcagatggtgtctttagaggatgatgtggcc

SEQ ID NO: 16274 - DNA, 2580 bp, synthetic construct
  misc_feature 1..2580: note = source = /note="Description of Artificial Sequence: Synthetic coding sequence"
  source 1..2580: mol_type = other DNA
atgggaccctggggatggaaactgcgctggaccgtggctctgctgctggccgccgccggcactgcggtgggggatcggtgtgaaagaaatgaattccagtgccaggacggaaagtgcattagctataagtgggtgtgcgatggtagtgcagagtgtcaggatgggtccgatgaatctcaggagacttgtctgagcgtgacttgtaagtcaggcgatttttcctgcggaggacgggttaaccgttgcataccacagttttggagatgtgacggccaggtggattgcgacaatgggagcgacgagcagggttgtcccccaaaaacatgctcccaggacgagttcagatgccatgacgggaagtgcatttctagacagttcgtctgcgactccgaccgagattgtctggatgggagtgacgaagcatcatgtcccgtcttaacatgcggacctgcctcttttcagtgcaacagctctacatgtatacctcagttgtgggcatgtgataatgatcctgactgtgaggacggtagcgacgagtggcctcagaggtgtagaggcctctacgtgtttcagggcgactcttcaccatgcagtgcttttgagttccattgcctctccggggaatgtattcacagttcctggcgctgcgacggggggccagactgcaaagataaatccgacgaagaaaattgcgctgtggctacatgccggccagatgaatttcagtgcagcgatggaaattgtattcacggctcccgccaatgtgatcgcgaatacgattgcaaggacatgagcgatgaggtcggatgcgtcaatgtgaccttatgcgaaggtcctaacaagttcaaatgccactcaggagagtgcatcaccctggataaagtttgtaatatggcgagagactgccgtgattggtccgacgagcctatcaaagagtgcggcacgaatgcttgcctggataataatggagggtgttcacacgtctgtaatgatctgaaaataggctacgagtgtttgtgtcctgatggtttccaactagtggcccagcgcaggtgcgaggacattgatgaatgtcaggatccagatacatgctcacaactgtgcgtgaatttagaaggcggttataagtgccagtgcgaagaaggcttccagctcgatccgcacacaaaggcctgcaaggcggtggggagtatcgcctatcttttctttacgaaccggcatgaagtcagaaagatgactctggaccgctccgagtacacatccctcatcccgaacctgagaaacgtggtggcactcgatacggaggtggcttctaatagaatctactggagtgacttgtcccaaagaatgatctgtagcacccagcttgatcgtgcccatggcgtgagctcgtatgacaccgtgatctcacgggacatccaggcacccgatggattggctgtggattggatacattcaaatatttactggacagattccgtgctggggaccgttagtgtggcagatacaaaaggggtgaagagaaagaccctcttcagagaaaatgggtctaaaccgagagctatcgtggtagaccctgtgcacgggttcatgtattggaccgattggggaacaccggccaaaatcaaaaagggcgggttgaacggtgtggatatttactccctggtgactgaaaacattcagtggcctaatggcatcaccctggatctgttgtcaggccgcctctactgggttgactctaagctgcactcgataagttcgatcgacgtgaacgggggcaaccgaaagacaattctggaagacgagaagcgtttggcccatcccttctccctcgctgtgttcgaggataaggtgttttggactgatattattaatgaagctatattttccgctaatcggctgacaggcagcgatgttaacctcttagcggagaatctgttatcacccgaggacatggttctgtttcacaatctgacacaaccccggggtgttaactggtgtgagcgcacaacgctaagtaacggcggctgtcagtacctctgccttccagcgccccagattaatcctcactccccgaagttcacatgcgcgtgccccgatggcatgctattggcgcgagacatgcgatcttgtctgaccgaagctgaagcggccgtggcaacccaggagacctccactgttcggttaaaagtgagttccacagccgtgcgaacccagcataccaccacccgccctgtgcccgataccagcaggctacccggtgctacccccgggttgactaccgtggagatcgtgaccatgagccaccaggcgctcggtgacgtggccggacggggcaatgagaagaagccttccagtgtgcgagctctctcaattgttctgccaatcgttttgctagtgttcctctgcctcggggtatttcttttgtggaagaactggcggctcaagaatatcaattcgattaattttgataacccagtgtatcagaagactacagaagacgaggtacacatctgccacaatcaggacggatattcatacccgagcaggcaaatggtgtctctggaggacgacgttgcc

SEQ ID NO: 16275 - DNA, 2580 bp, synthetic construct
  misc_feature 1..2580: note = source = /note="Description of Artificial Sequence: Synthetic coding sequence"
  source 1..2580: mol_type = other DNA
atgggaccttggggatggaaactgcgttggacagtggctttgctccttgccgctgccggaactgcagtaggcgatcgttgtgagcgcaatgaattccaatgccaggacggtaagtgcatctcctacaaatgggtctgtgacggctctgcggagtgccaagacggatctgatgagagccaggaaacatgcctgtctgtgacttgcaagtccggcgacttttcatgcggaggtcgtgttaatagatgtattccccaattctggagatgtgacggacaggtcgattgtgataatgggtcagatgaacagggttgtcctcctaaaacctgttctcaggatgaatttcggtgtcacgatgggaaatgcattagcagacaattcgtatgtgattcagacagagactgccttgatggttccgatgaagcaagttgcccggtcctgacttgcggtccggcttcatttcagtgcaatagttccacatgtatccctcagctgtgggcgtgtgacaatgaccctgattgtgaagatggtagtgatgaatggccgcagcgctgccgcgggctgtacgttttccagggagactcttccccctgctcagccttcgaattccattgcctctctggtgaatgcatccacagctcgtggcgatgtgacggaggacctgattgcaaagacaagtcggatgaggagaattgcgcagtggctacatgtcgcccagacgagttccagtgctctgatggtaattgcatacacggatctcgtcagtgtgatcgagaatacgactgcaaagatatgtcggatgaggtgggctgtgtgaatgttaccctgtgcgagggtccaaacaagtttaagtgtcactcaggtgagtgtatcaccttggataaggtgtgtaacatggcgcgcgactgtcgtgattggtcggacgaaccgatcaaggaatgcggaactaatgcatgccttgataataatggtggatgtagccatgtttgtaacgatcttaagattggctatgagtgcctgtgtcccgatgggtttcaattagttgcgcagcgccgctgcgaggatatcgacgaatgccaggatcctgacacctgcagccagctatgtgtgaacctggaaggcgggtacaagtgccagtgcgaagaaggttttcaattggaccctcatacaaaagcttgtaaagcggtggggtcgatcgcgtacctgttctttaccaatcgccacgaggtgcggaagatgactctcgatcgcagcgagtacacaagcctcattcctaacttgcgtaatgtagttgccctcgacaccgaggttgcatccaaccgcatctactggtccgatttgtcccagcggatgatctgctcaactcagttggatcgagcccacggtgtctcaagctatgacactgttatttctcgggatatacaagcccctgacgggctagcagtggactggatccattctaatatctattggactgatagtgtacttggtacggtttctgtggccgacacaaagggagtcaagcgaaaaacattattccgagaaaacggatctaaaccaagggccattgtggttgacccggtgcacggtttcatgtattggactgactggggtacgccggcgaaaattaagaagggtggcctcaacggtgtggacatatattcgctggttaccgagaatatccagtggcctaacggcatcacactggatctcctttcgggtcgcttgtattgggtggactccaaactgcatagcatatctagtattgatgtgaacggtggaaaccgtaaaaccattctcgaggatgagaaacggctagcccaccctttcagcttagctgtgttcgaggataaagtgttttggacagatataatcaatgaggccatattttccgcgaatcggctcaccggttccgatgtcaatctcttggctgaaaatcttctttcgcctgaggacatggtccttttccacaatcttacacagcccaggggggtgaactggtgcgaacgcaccacacttagtaacggcggctgccaatatctctgtctcccagcgccccaaattaatccgcatagtccaaaatttacctgtgcttgccccgacggcatgctactcgcacgagatatgcggagttgtttaacagaagcagaggccgccgtcgctactcaggagacaagtacggtccgtcttaaggtcagttccacggcagtacggacacagcatacgactacccgtcccgtgccagacacgagcaggctgcctggtgccacgccaggtctaacaacggtcgagatcgtgactatgtcgcatcaagccctaggagacgtcgcaggcagaggtaatgaaaagaagcctagctctgttagggctttgtccatcgtcctccccattgtactcttagtcttcttatgcctaggagttttcctgctttggaagaactggagactgaagaacatcaacagtatcaattttgacaatcctgtctatcagaagacgactgaggatgaggtacacatctgccataaccaggacggctattcttatccaagccggcagatggttagtctcgaagatgatgtcgct

SEQ ID NO: 16276 - DNA, 2580 bp, synthetic construct
  misc_feature 1..2580: note = source = /note="Description of Artificial Sequence: Synthetic coding sequence"
  source 1..2580: mol_type = other DNA
atgggaccctggggttggaaactgcgttggacagtcgctcttctcctcgctgccgctgggaccgcagtcggcgaccgatgtgagagaaatgagttccagtgtcaagatggcaagtgtatcagttacaagtgggtctgtgacggtagtgctgaatgtcaggatggctcagacgaatcacaggagacatgcctatctgtcacgtgtaagtctggcgatttctcctgcggcggtagagtcaaccgctgcatcccccaattttggcgatgcgatggccaggtcgattgtgacaacgggtctgacgagcaggggtgtccccctaaaacatgtagccaggacgagttcagatgccacgatggaaaatgcatctcacgacaatttgtctgtgactccgatcgtgactgccttgatggatccgatgaggccagctgccctgtactgacctgcggtcctgcttccttccagtgtaacagctctacgtgtatcccccagctttgggcatgtgataacgacccagactgcgaggacggctctgacgagtggcctcagcgctgccgaggtctttatgtttttcaaggggatagctcaccttgctccgcctttgaattccactgcctgagcggggagtgtattcatagctcctggaggtgtgacggggggccggattgcaaggacaaaagcgacgaagaaaactgtgccgttgcgacctgccgccctgacgaatttcagtgtagcgacggcaattgcatacatggttctcggcagtgtgatagagagtatgactgtaaggacatgagcgatgaggtaggctgcgtcaacgtcacactgtgcgaaggccctaataagttcaagtgtcattctggcgagtgcataacactggacaaagtgtgcaatatggcccgggattgccgggattggagcgacgagcctatcaaagaatgtgggacaaacgcttgcctcgacaataatggcggatgcagccacgtttgcaacgaccttaaaatcggatacgagtgcttgtgcccagacgggttccagttagtcgcccagcgtaggtgtgaagatattgatgagtgccaggatccagacacctgttctcagctgtgcgtgaacctcgagggcggttataagtgccaatgtgaagaagggtttcagctcgacccccacacaaaagcatgcaaagccgtgggctccatcgcatacctcttcttcacaaaccgacacgaagtcaggaagatgacactggaccgatccgagtacaccagtctcatccctaacctgcgaaatgtggtggctctagacacagaagtggcgtccaaccgcatctattggtccgacctctctcagagaatgatctgctctactcagctagaccgagcacacggagtgagttcatatgatacagtcattagcagagatatacaggccccggacggccttgctgtggactggatacactcaaacatctattggaccgattccgtactcggaaccgtgtctgtagcagacaccaagggagtgaaacgtaagaccctgttccgggagaacggctcaaaaccaagggctattgtggtcgaccctgtgcatggcttcatgtattggaccgactgggggacccctgcaaagatcaagaaaggcggattgaacggcgtggatatctactcactcgtgaccgagaacattcagtggcctaatggtatcacattggatctgttgagtggtcggttgtactgggtagactccaagctgcattcaatctcatccatcgatgtcaacggtggtaatcgcaagacgatacttgaagacgagaaaaggcttgctcacccgttctctctggcagtgttcgaagacaaagtgttctggacagatatcatcaacgaagcaatcttctcagcaaatcggctgacaggatctgacgtgaatttgctcgcagagaatctgctgagccccgaggacatggtcctgttccataacctgacccagccccggggtgtgaattggtgtgagcgcactactctgtcaaacggaggatgtcagtacctgtgtctgccagctccccagatcaacccgcacagcccaaagttcacctgcgcgtgccccgatgggatgctgctcgccagggatatgcggtcttgcttgactgaggcggaagcggccgtggcgacgcaggagacctcaaccgtcagactgaaggtgagctccacagccgtgagaactcagcatacgacaacgcgaccagttccagatacctcccggctgcctggagcgacacccggcctaactaccgtggaaatcgtgaccatgtcacaccaggcactgggagacgtggccggccggggcaacgaaaagaagcccagcagcgtgcgggcactgagcatcgttcttcccattgtgctgctggttttcctatgtttaggtgtgtttctgctgtggaagaactggcgccttaaaaatatcaatagcatcaatttcgacaaccctgtgtaccagaagactaccgaggatgaagtgcacatctgccataatcaggacggctactcttacccatcaaggcagatggtaagtctcgaggacgacgtggca

SEQ ID NO: 16277 - DNA, 2580 bp, synthetic construct
  misc_feature 1..2580: note = source = /note="Description of Artificial Sequence: Synthetic coding sequence"
  source 1..2580: mol_type = other DNA
atggggccctggggatggaagctccggtggactgtggccctcctcctggccgcagctgggacagccgtcggagacaggtgtgaacgcaatgagtttcagtgccaggacggaaagtgcataagctataagtgggtgtgcgatggatcagctgagtgccaggacgggtccgacgagagccaggagacatgcctgtccgtgacctgcaagtctggtgatttcagttgcggtggtagagtcaatcgatgcatcccacagttttggcgctgtgacggtcaggtcgactgcgacaatggcagtgatgagcagggctgtccacctaagacgtgttctcaggacgaatttcgctgccacgatggaaagtgcatatcaaggcagttcgtgtgcgactcagacagggactgtttagacgggtcagacgaggcttcctgtccggtgctaacttgtggccctgcttcctttcagtgcaactcaagcacctgcattcctcaactatgggcctgcgacaacgatccagactgtgaggacggttcagatgagtggccacagaggtgtaggggactgtacgtcttccaaggggacagctccccctgctctgccttcgagtttcactgtctctcaggtgaatgtatccattcaagttggaggtgtgacggcgggcccgactgcaaggataaatcagacgaagaaaattgcgcagttgccacttgccggcccgatgagttccaatgcagtgacggcaattgcatacacgggtctcggcaatgcgatagagaatatgattgtaaggacatgagtgatgaggtgggttgcgtaaacgtaacactgtgtgagggtcccaataagtttaaatgtcattctggagagtgcatcacgctagacaaggtgtgcaatatggcaagggattgccgtgactggtccgacgaacctatcaaagagtgcgggacgaatgcatgtctggataataatggcggctgctcccatgtctgcaacgatctcaagatcggctatgaatgcctgtgccctgacggatttcaactggtcgcccagcgaagatgcgaggatatcgatgaatgccaagacccagatacctgctcacaactttgtgtcaacctggaaggtggctataagtgccagtgtgaggaaggcttccaattagacccccacaccaaggcttgcaaggccgtcggtagcatcgcctatttgtttttcaccaatcgccacgaggttagaaaaatgacattagaccgcagcgaatatacttctctaatacccaacttgcggaatgtggtggccctcgacaccgaggtggcaagtaatagaatctactggtcagatctgtcccagcggatgatatgtagcacacagctcgaccgggcgcacggcgtgtcatcctacgatactgtcatctctcgggacatccaggccccagacggtcttgcagtggactggattcatagcaacatctactggaccgattccgttttgggtaccgtatccgttgcggataccaagggggtgaaacggaagaccctgttccgcgagaatggttcaaagccaagagctattgtcgttgacccagtacacgggtttatgtattggacggactggggcacccccgccaagataaagaagggcggtctcaacggggtggatatatatagtctggttaccgagaacattcagtggccaaatggcataacactggacctgctgtcaggcagactgtattgggtcgactccaagttgcattcgatttcaagtatcgatgtgaacggtggcaaccgcaagaccattctcgaagacgaaaaacgccttgcccatcccttttcacttgcggtgtttgaggacaaggtattttggactgacataattaatgaagcaattttctccgccaacagactgacgggctcggacgtgaacttgctcgcagagaacttgctatcacccgaggatatggtgctgttccacaacttaacacaaccccgcggggtaaactggtgtgaaagaactaccttatccaacggcgggtgccagtacctctgcctgcctgcccctcagattaatccgcactccccaaaatttacatgcgcctgccctgatgggatgctgcttgccagagatatgcgcagctgtctgacagaagccgaggctgcggtggcgacccaagaaacatcaaccgtgcgcctgaaagtgtcgtctactgcagtccgcacacagcacactacgacacgaccggtaccagatacatcgcgactgcctggagctaccccaggtctcactaccgtggagatagtgactatgtcacatcaggctctcggtgacgtcgcgggacgcggcaacgaaaaaaagccttcctcggttagagcactatccatcgtcttgcctattgtgctgctggtgttcctttgtctgggggtgttcctgctctggaagaattggagactgaaaaacatcaattcaattaatttcgataacccagtgtatcagaagaccaccgaagacgaggtgcatatctgccataaccaggacggttattcgtaccccagcagacagatggtctcccttgaggacgacgtagct

SEQ ID NO: 16278 - DNA, 2580 bp, synthetic construct
  misc_feature 1..2580: note = source = /note="Description of Artificial Sequence: Synthetic coding sequence"
  source 1..2580: mol_type = other DNA
atgggtccttggggatggaaacttcggtggacagtggcattgctgctcgccgccgccggcacagccgtcggagatcgctgtgagaggaatgagtttcaatgccaggatggaaagtgtatatcctacaagtgggtgtgtgatggttcggctgaatgccaggacgggtctgatgagagtcaggaaacttgtctgtccgtgacttgtaagtcaggcgattttagctgtggcgggcgcgtgaatagatgcattccacagttctggcgatgtgacggccaggtggattgcgacaacggcagtgatgaacagggttgtcccccaaagacctgtagccaggatgaattcaggtgtcatgacgggaagtgcattagccggcagtttgtgtgcgacagcgatagagactgtttggacgggtccgacgaggcttcctgtcctgtgcttacatgcggccccgcctcgtttcagtgtaattcgtcgacctgtatacctcagctctgggcttgcgacaacgaccccgattgcgaggacgggtccgacgagtggccacagcgttgtcgcggcttgtatgttttccagggagattcatcaccttgttccgcatttgaattccattgtttgagcggcgagtgtatccatagtagctggcgatgtgatggcggtcccgattgtaaggataagagcgacgaggaaaattgcgcggttgccacatgccgaccagatgagtttcagtgtagtgacggcaactgcatccatggaagtcgccagtgcgatcgtgagtatgattgtaaggacatgtccgatgaggttggttgtgttaacgttacactgtgtgagggaccaaacaagttcaaatgccactcgggagagtgcatcactctggacaaggtatgtaatatggcccgcgattgtagagactggagcgatgagcccatcaaggagtgcggaacaaacgcctgtctggacaacaacggaggatgcagtcatgtgtgcaatgatctgaaaatcggctacgagtgtctgtgtcctgatggcttccagctcgtggcccaaagaaggtgcgaggatatcgacgaatgtcaagacccagacacttgcagtcagttgtgtgtaaacctcgagggaggatacaagtgtcagtgcgaggaaggcttccagctcgacccacatacaaaggcatgcaaggcagtggggtcaatcgcctacctgttcttcaccaacaggcatgaggtgagaaaaatgacactggataggtccgaatatacatcccttattcctaatctgaggaacgtcgtggcactggatacagaggttgcaagtaacaggatctattggtcagacttaagccagcgcatgatctgcagcacccagctcgatcgcgcccatggggtctccagctatgacacagtgatctccagggacatccaggcccccgacggcctggccgtggattggattcactccaatatctattggacagattcggtgctgggaactgtgtcagtcgccgatactaagggcgtgaagcgcaagacactgtttcgcgagaatgggtccaagccgcgggctattgtggtcgaccctgtgcacggcttcatgtactggacagactggggtactcccgccaaaattaagaaggggggactgaatggcgtcgacatctactcattagtaactgaaaacatccaatggcctaatgggataaccctagatctcctgagtggcaggctttactgggtggacagcaaacttcattcaatttcttctatagacgtaaatggtggcaataggaagaccattttggaagacgagaagaggctcgcccaccccttctccctggccgtcttcgaagataaggtgttctggactgatataatcaacgaagcaattttcagtgcaaaccgactgacaggatctgatgtgaacctcctggccgagaaccttctgtcaccggaggatatggtacttttccataatctgacccagcctagaggagtgaattggtgtgagagaacaacgctcagcaacggtgggtgtcagtacctgtgtctgccagcaccccagatcaatccgcatagccccaaattcacgtgtgcatgccctgacggaatgttactggcgagggacatgcgcagctgtttgaccgaagctgaggccgccgtggccactcaggagacctctaccgtgaggttgaaggtgtcatccacagccgtgagaactcagcacactacaacccggcccgtacctgacaccagccgactgcctggagcaacccccggcttgacaaccgtggagattgtaaccatgtctcaccaggccctgggggatgtggctggtagaggcaatgagaagaagccctcatccgtgcgggccctctcaattgtgttgccaatagtgctcttggtcttcctgtgcctcggcgtgttccttctgtggaaaaattggcgactcaagaacatcaattccattaactttgataaccctgtctaccagaaaaccaccgaagatgaggtgcacatttgccacaaccaggatggctactcttacccttcccggcagatggtgtcgctggaagacgacgtggcc

SEQ ID NO: 16279 - DNA, 2580 bp, synthetic construct
  misc_feature 1..2580: note = source = /note="Description of Artificial Sequence: Synthetic coding sequence"
  source 1..2580: mol_type = other DNA
atgggaccttggggctggaagctcagatggacggtcgctctcctcctcgcagcagccggaaccgcagtcggggataggtgtgagaggaatgaattccagtgtcaggatggaaagtgtattagctacaagtgggtgtgtgacggatcggctgaatgccaagatggctccgatgaatcgcaagaaacttgtctctcggtcacctgtaagtccggcgatttttcgtgtgggggccgggtcaatcgttgtattccacaattctggagatgcgacggacaagtggattgtgacaacggttcggacgaacaaggatgtcccccaaagacttgcagccaagacgagttccgatgccatgatggaaaatgtatatccagacaatttgtgtgtgactcagatcgtgactgtcttgatggttcagatgaggccagctgccctgtgcttacttgcgggccggcatcctttcaatgtaactcgtcgacctgtatacctcagctttgggcatgtgacaatgatcccgattgcgaggatgggtccgatgagtggcctcagagatgtagaggactctacgtttttcaaggcgatagctccccgtgctcggcttttgaatttcactgtctttccggagagtgcatccattcctcatggcgctgtgacgggggccctgactgtaaggacaagtcagacgaggaaaattgcgcagtggcaacttgccgaccggatgaattccaatgctcggatggaaattgtatccatggtagcagacagtgtgatcgcgagtacgactgtaaagatatgtcggatgaagtgggatgcgtcaacgttactctgtgcgaaggtccaaacaagttcaaatgccactcgggcgaatgcattactcttgataaggtctgtaacatggccagagattgtcgagactggtccgacgagccgattaaggaatgtggtactaacgcatgtctggacaataatgggggctgtagccatgtgtgcaacgatctcaagattggttacgaatgcctttgtccagatggattccaactggtggcacaacgaagatgcgaggacattgacgaatgtcaagatcctgatacttgctcccaactgtgcgtgaacctggagggcggctataagtgccagtgtgaagaaggtttccaactggaccctcatactaaggcatgtaaggccgtgggtagcatcgcatacctcttcttcaccaaccgacacgaagttcggaagatgactcttgatcgttcggaatacacctctctgatccctaatttgagaaatgtcgtggcacttgataccgaagtggcaagcaaccggatctactggtccgacctttcgcagcgtatgatttgctccacgcagctcgaccgggcacatggtgtgtcgtcgtacgatactgtcatctcacgggacattcaggctcctgacggactcgccgtggattggattcatagcaacatttactggactgactcggtgctgggaacggtgtcagtggctgacaccaagggcgtgaagcggaaaaccctctttcgggaaaacgggtcgaagccgcgggctatcgtggtggacccagtccatggattcatgtattggaccgactggggaactccagccaaaatcaaaaaaggtgggctgaatggggttgatatctacagtctcgtgaccgagaatatacaatggcctaatggaataacccttgatctgctctccggaaggctgtactgggttgattccaaactccatagcattagctcaattgatgtgaatggcggtaaccgcaagactatcctcgaagatgaaaagagacttgcacatccattcagccttgccgtatttgaggacaaagtgttctggactgacattatcaacgaggcgatcttttcggcaaaccggcttaccggttcggatgtgaacctgcttgcagaaaacttgctgtccccggaagatatggtcttgtttcataatcttactcagccacggggagtgaactggtgcgaaaggactactctgtccaatggaggctgccagtacctgtgccttcccgcacctcagatcaacccacattcccccaagttcacttgcgcgtgtccagacggaatgctgctggcaagggatatgaggagctgcctgactgaagcagaggcagccgtggcaactcaagaaacttcgaccgtgaggctcaaggtgagctcgactgcagtgagaactcaacataccaccacccgcccagtgcccgatacttcgcgccttccaggagccactccagggctcaccactgtggaaattgtgaccatgtcgcatcaagcgctcggagacgttgcgggaagaggtaacgagaagaaaccatccagcgtgagagcactctcgatcgtccttcctattgtgcttttggtgtttctctgccttggagtgttcctcctgtggaagaactggagactcaaaaacatcaacagcataaactttgacaaccctgtgtaccaaaaaacgaccgaagatgaagttcacatctgccacaaccaggatggttacagctacccttcgcggcagatggtgtctcttgaggacgacgtcgcg

SEQ ID NO: 16280 - DNA, 2580 bp, synthetic construct
  misc_feature 1..2580: note = source = /note="Description of Artificial Sequence: Synthetic coding sequence"
  source 1..2580: mol_type = other DNA
atgggaccctgggggtggaaattgcggtggaccgtcgccctgctgcttgcagcagccggtaccgccgtgggagatagatgcgaacggaatgagttccaatgccaagatggtaagtgcatctcgtacaaatgggtctgcgacggctcagcggagtgtcaagacggctccgatgagagccaggagacttgcctttcggtcacgtgtaaatcgggtgatttctcgtgcggaggacgggtgaatagatgtatcccccaattctggaggtgtgatggtcaggtcgactgtgacaacggttctgacgagcaaggttgcccaccaaagacttgtagccaggatgaatttagatgtcatgacggtaaatgtatctcacgacagtttgtgtgtgattccgaccgcgactgtctggatggatcggacgaagcatcctgcccagttctgacctgtggacctgcttcgtttcaatgtaactcatcgacttgcatcccgcaactttgggcctgcgacaacgatcctgattgtgaagatggttcagatgagtggccccagcgttgtagaggactgtatgtgtttcagggcgactcctccccatgctcggcattcgaatttcattgcctgtcgggagagtgcatccactcgtcctggagatgtgacggaggtcctgactgtaaagataagagcgatgaagaaaattgtgctgttgcaacttgcagaccggacgaatttcaatgctcggacggaaattgtatacatggatccagacagtgcgatcgagaatatgattgcaaggacatgtcagacgaagtgggatgtgtcaacgtcaccctgtgtgagggacctaataagtttaagtgtcactcgggagaatgcattacgctggacaaagtatgtaacatggcacgcgactgtcgcgattggtcggatgaaccaatcaaagaatgtgggactaatgcgtgtctggacaataacgggggttgtagccacgtctgtaatgatctgaagataggatacgagtgtctgtgtccagacggcttccaattggtggcacaacggcggtgtgaggacattgacgaatgccaagaccctgatacgtgttctcaactctgtgtgaacctcgaaggaggctacaaatgtcaatgcgaggaaggatttcaacttgatcctcacaccaaagcatgtaaggcagtgggttcgatcgcatacctcttcttcactaacagacatgaggtgagaaaaatgaccctcgaccggtccgaatacacttcgctgattcctaatctgcgcaatgtggtcgcgctggataccgaggtcgcttccaacagaatttactggtcagatctttctcaaagaatgatttgctccacccaactggatagggcgcacggagtgtcctcctacgatactgtgatcagtcgtgatatccaggccccagacggtctggcagttgattggattcattcaaatatctactggaccgattcggtgttgggtactgtcagcgtggcagatactaaaggcgtcaaaagaaagacccttttccgggagaacggtagcaagcctcgggcaatcgtggtcgatcctgtgcatggatttatgtactggactgattggggtactcctgcaaagatcaaaaaaggaggcctcaacggcgtggatatctactcgctggtgaccgagaatattcagtggccgaacggcattactctggaccttctgtccggtaggctgtactgggtggacagcaagctccatagcatttcttcaattgatgtgaacggtggtaaccgaaagactatcctggaagatgaaaagagattggcccatcccttttcacttgcggtctttgaggacaaggtgttttggaccgacatcattaatgaagcaatcttctccgccaaccggctgacgggctcagatgtgaaccttctggcggagaacctgctgtctccggaagatatggtcctctttcacaatcttactcaaccacgaggagtcaactggtgtgagagaacgaccctgtcaaacggaggttgtcagtacctttgtctgccagcacctcagatcaatccgcattccccaaagtttacctgtgcctgtcctgatggaatgttgctggcacgcgatatgcgctcgtgtcttacggaagcagaagccgcagtggctacccaggagacttcaaccgtccgacttaaggtgtcctccactgcggtgcgtacgcagcatactaccacgcgtcctgtgccagacacctcgcgcctgccgggggcaactcccggcttgactactgtcgaaattgtgaccatgtcccatcaggctctgggagatgtggcaggccggggaaacgagaaaaagccatcctcggtgcgtgcgctgtccatcgtcttgccaatcgtcctcttggtgttcctttgcctgggagtgttccttctctggaagaattggagactcaagaacattaactccattaactttgataacccggtgtaccaaaagacgaccgaagatgaagtgcacatctgtcacaaccaagatggctactcatacccctcgcgacagatggtgtcgctggaagatgatgtggca

SEQ ID NO: 16281 - DNA, 2580 bp, synthetic construct
  misc_feature 1..2580: note = source = /note="Description of Artificial Sequence: Synthetic coding sequence"
  source 1..2580: mol_type = other DNA
atgggtccgtggggatggaaacttcgctggactgtggctctgctgctcgcggcagcagggaccgccgtgggagacagatgtgaacgcaacgaattccagtgtcaagatgggaagtgtatttcatacaagtgggtctgcgatggatccgcagaatgtcaagacggcagcgacgagtcgcaggaaacttgtctctcagtgacttgtaagagcggagatttttcctgtggcggacgggtgaaccgatgtatcccgcagttttggcgatgtgatgggcaggtggattgcgataacggatccgatgaacagggctgcccgccaaaaacctgtagccaagatgagttcaggtgtcatgatggaaagtgtatttcgaggcagtttgtgtgtgattctgaccgcgactgtctcgatggaagcgacgaggcctcctgtcctgtgctgacttgcggcccggcaagtttccagtgtaacagcagcacttgcattccccaactttgggcatgtgacaatgatccagattgcgaagatggttccgacgaatggcctcaaagatgtagaggactttacgtgtttcaaggtgactcgtccccttgttccgcgtttgaatttcattgtcttagtggagagtgtatccactcgtcctggcgctgtgatggaggtccagattgtaaagacaagtccgatgaagagaactgtgcagtggccacttgccgacccgatgagtttcaatgttctgatggaaactgcatccacggttcacgccaatgcgatagagaatacgactgtaaggacatgtcagatgaagtcggctgcgtcaacgtgacgctctgcgagggtcctaataagttcaagtgccattcaggagagtgcattactctggataaggtgtgtaatatggcaagggattgtagggattggtcggatgagcctataaaggaatgtggcaccaatgcctgccttgacaacaatggcggatgcagtcatgtttgtaatgacctgaaaattggttacgaatgcctgtgcccagatgggtttcaattggtcgcccaacgccgctgtgaggacatcgacgagtgccaggatcccgacacgtgctcacaactgtgcgtgaacctggaaggtgggtacaagtgccagtgcgaagaaggatttcagcttgatcctcatactaaagcatgcaaggcagtgggctcgattgcatacttgttctttaccaatcggcacgaagtgcgtaaaatgacgctggacagatcggaatacacctccctcattcctaaccttagaaatgtggtggcacttgatactgaagtggccagcaacagaatttactggtccgatctttcacagcgtatgatatgtagcacccaactggacagagcacatggggtatcgtcatatgatacggtgatttcgagggacatccaggctccggatggacttgcggtcgattggattcacagcaacatttactggaccgactctgtgcttggtacggtgtcggtggcagataccaaaggcgtcaagcgtaagacgcttttcagagagaatgggtccaagcctcgagcaattgtggttgacccagtccatgggttcatgtactggactgactggggaactcccgctaagattaagaagggtggtcttaatggagtggacatctacagcctggtgaccgagaacatccaatggcctaatggcatcaccctcgatcttctttctgggagattgtactgggtagatagcaaactccactcgatctcatcaattgacgtgaacgggggtaatcgcaagactatactcgaagatgaaaaaaggttggcccatccattctcccttgcggtgtttgaggataaggtcttttggaccgatatcataaacgaagcgatcttttcggcaaaccggcttactggatcagatgtcaacctgctggcagaaaatcttctctcgcccgaggatatggtgctgtttcacaaccttactcaaccacgaggagtcaactggtgcgagaggaccacgctttccaacggtggttgtcaatacctctgtctgcctgcaccccagataaacccacattcgccaaagttcacctgtgcatgccctgatggcatgttgctggcaagggacatgcggtcgtgtctgaccgaagcggaagcggccgtggcaacccaggaaacttcgaccgtcagactgaaggtgagcagcactgctgtcaggacccagcataccactacccgtcccgtccctgacacctcgagactgcctggtgccacccctggtcttactaccgttgaaatcgtgactatgtcgcatcaggcccttggagatgtggctggacgcgggaatgaaaagaaaccaagttcggtgagagcgctgtcgattgtgcttccaatcgtcctccttgtgttcctttgtctgggcgtgtttttgctctggaagaattggcgcctcaaaaacattaacagcatcaatttcgacaaccctgtataccaaaagaccactgaagatgaggtgcatatttgtcacaaccaagacgggtactcctatccatcccgtcaaatggtatcgctggaggatgacgttgca

SEQ ID NO: 16282 - DNA, 2580 bp, synthetic construct
  misc_feature 1..2580: note = source = /note="Description of Artificial Sequence: Synthetic coding sequence"
  source 1..2580: mol_type = other DNA
atgggcccatggggctggaagctccggtggactgtcgccctgctgctcgccgcagccggtaccgcagttggggatagatgcgaacgcaatgagtttcaatgtcaggatggcaagtgtataagctacaagtgggtgtgcgacgggtcagccgaatgccaggacggctctgacgagtcgcaggagacatgcctgtccgtgacgtgcaagtcgggcgatttttcctgtggtggacgggttaatcgctgtattccacagttctggcggtgtgacgggcaagtggactgtgataatgggtctgatgagcagggctgtcctccaaaaacttgttcgcaggacgaattcagatgccacgatggcaagtgcataagtaggcagttcgtatgcgacagcgatagggactgcttggacggaagcgacgaagcctcttgtcctgtgttgacatgtggaccagctagtttccagtgtaactcatctacctgcatccctcagctgtgggcctgcgacaacgaccccgactgcgaggatggtagcgacgaatggcctcagcgctgtcggggtctttacgtttttcagggggattcgagcccatgctctgcttttgagtttcattgcctgtctggagaatgcattcatagcagctggaggtgcgacggcggccccgattgtaaagacaagtctgacgaagaaaattgtgctgtggctacttgcagacctgacgaatttcagtgctctgatggcaattgtattcatggcagtcggcagtgcgatagggaatatgattgtaaggatatgtctgacgaggtgggttgtgttaatgtgacgctgtgtgaggggcccaacaaattcaagtgccacagcggggagtgcatcaccctcgacaaagtgtgcaatatggcgcgtgactgcagggactggagcgacgaacctataaaggagtgcggcaccaatgcatgcttagataacaacggtggctgtagccatgtttgcaacgatctgaaaatcggatatgagtgcctctgccccgacggcttccaattagttgcgcagcggaggtgtgaagacatcgatgagtgccaggacccggacacgtgctcgcagctgtgtgtgaatttggaaggaggctacaagtgccagtgcgaggaaggcttccagctggaccctcatacaaaagcctgtaaggctgttgggtccatcgcatatttattctttaccaatcggcacgaagtcaggaagatgaccttggaccggtctgaatacaccagcttgatcccaaatttaaggaatgtcgtggctttggataccgaggtagcttccaatagaatctactggtcggacctctcccagaggatgatttgttctacccagctggatcgtgcccatggcgtgagctcttatgataccgtgatcagccgcgatatccaagcacctgatgggctggcggtggactggatacactccaacatctattggactgacagtgtgcttggcaccgttagtgtcgccgatactaaaggggtaaaaagaaaaaccttgttccgagaaaacggatctaaacccagggcgattgtggtggaccctgttcatggattcatgtactggacagactggggaactcccgccaagattaagaagggggggttaaacggcgtggacatttattcactcgtgactgagaatatccagtggcccaatggtatcacgctagatctgctctcgggtcggctttactgggttgactcaaagctgcattccatctcatctatcgatgttaacggcggaaatcgaaagaccatcctggaagacgagaagcgtctggcacatccattttccttagcagtattcgaagacaaggtgttctggactgacattattaacgaggctatctttagtgcaaaccgtttgactggctccgacgtgaacctgctggccgaaaacctgctaagcccggaagacatggtgttattccacaacctgacccagccgcggggagtcaactggtgtgagcgaacaaccctctctaacggcggctgtcaatatctatgcttgcctgcgcctcagataaacccacacagcccaaagtttacttgtgcatgcccagatgggatgctgctagccagagatatgcggtcctgcctgacagaggccgaagccgctgtggcaactcaggagacgagcacagtgcgactgaaggttagtagcaccgcagtgagaactcagcacaccaccactcgtcctgtaccagatacttctcgattacctggtgcaacaccgggactaactaccgtcgagatcgttacaatgtctcaccaggctctgggagatgtagctggcagaggaaatgagaagaagcccagcagcgtacgcgcgttgtctattgtgctccctatcgtgctactggtattcctctgcctcggagtttttttactttggaagaactggcgactgaagaacataaattccatcaattttgacaacccggtttaccagaagacaacagaggatgaagtacacatatgtcacaaccaggacggctacagctatccatctagacagatggtttccctcgaagacgatgtggca

SEQ ID NO: 16283 - DNA, 2580 bp, synthetic construct
  misc_feature 1..2580: note = source = /note="Description of Artificial Sequence: Synthetic coding sequence"
  source 1..2580: mol_type = other DNA
atggggccgtggggatggaagctgcggtggaccgtggctctcctcctggccgcggccggaaccgctgtcggtgaccggtgtgaaagaaacgaattccagtgtcaagatggaaaatgcatctcctacaagtgggtgtgcgatggatccgccgaatgccaggacggatcggacgagtcccaagaaacttgcctgtcggtgacgtgtaagtcaggagatttctcgtgcggagggagggtgaacagatgtatcccccagttctggagatgtgacggccaggtggactgtgacaacgggtcagacgaacaggggtgcccgccgaaaacttgttcccaagatgaattcaggtgtcacgacggcaagtgcatctcacgccagttcgtctgcgactcggaccgggactgcctggacgggtcggacgaggcttcctgcccggtgctgacgtgtggacccgcgtcgttccagtgcaattcctcgacttgtattccgcagctgtgggcctgcgacaacgacccggactgcgaggacggctcagacgaatggccccaacgctgccgaggcctgtacgtgttccaaggcgattcatccccgtgttccgccttcgaattccattgcttgagcggggaatgcatccactcgagctggcggtgtgacggcggtcccgattgcaaggacaaatcggacgaagaaaactgtgcggtggcaacgtgtcggccggacgaatttcagtgttctgatggaaactgcatccacggcagccggcaatgcgaccgggagtacgattgtaaggacatgagcgacgaagtcggatgcgtgaacgtcaccctgtgtgaaggtcctaacaagttcaaatgccacagcggcgagtgcatcacccttgataaagtgtgcaacatggccagagactgccgcgattggtcggacgagccgatcaaagaatgcggaaccaatgcgtgcctggacaacaatgggggatgttcacatgtctgcaatgacctcaagatcggttatgagtgcctgtgtccggacgggttccagttggtggcccaaaggcggtgcgaagatattgacgagtgtcaggaccccgacacttgctcccagctgtgtgtgaaccttgaaggcggatacaagtgccaatgcgaagagggcttccagctggatccgcacaccaaagcgtgtaaggctgtgggaagcatcgcctacctcttcttcactaaccggcacgaggtgcggaagatgactctggataggtcagaatatacgtcgctgatccccaatttgcggaacgtcgtggcgctggatacggaagtcgccagcaaccgcatctactggtcggatctttcgcagagaatgatctgctccacccaactggatcgcgcacatggggtcagctcgtacgacaccgtgatcagccgcgatatccaggctccagatggactggcggtggattggatccattcaaacatttactggactgactctgtgcttggaaccgtgagcgtggctgacaccaagggagtgaagcgcaagactttgttccgcgaaaacgggagcaagccgcgagcgatcgtggtggatccggtgcacggcttcatgtactggacggactggggcaccccggcaaagatcaagaaagggggtctgaacggagttgacatctactccctggtgaccgagaatatccaatggccgaacggcatcactctcgatctgctgtcaggtaggctgtactgggtcgactcgaagctgcattcgatcagctcaatcgatgtcaacggaggaaaccgcaagaccatcctcgaagatgaaaagcggctggcgcacccattctcgctcgccgtgtttgaggacaaggtcttttggaccgacattatcaacgaggcgatcttttcggccaaccgcctcacgggaagcgatgtgaacctgctggccgaaaatctcctctcaccggaggacatggtcttgttccataacctgacccagccgagaggtgttaactggtgcgaacggaccacgctttctaatgggggatgccagtacctgtgcctccctgcgccacagatcaatcctcatagcccgaagtttacttgcgcctgccccgacggaatgttgctcgccagagacatgcgctcgtgcctcactgaagccgaggcggcggtcgcaacccaggaaacttcgaccgtgcggctgaaggtgtcctccactgcagtgcgcacccaacataccactaccagaccggtgccagatacctcgagacttcctggggccactcccggactgaccaccgtggagatcgtcactatgtcgcaccaggcgctcggtgacgtggcaggaagagggaacgagaagaaaccgtcctcagtgcgggctctgtccattgtgctgcctatcgtgctgctcgttttcctgtgcctcggcgtctttctgctgtggaagaattggcgactgaagaacatcaatagcatcaacttcgacaatcctgtctaccaaaagaccaccgaggatgaggtccacatctgtcataaccaagacggctactcctacccatcccgccaaatggtgtcgctggaagatgatgtggcc

SEQ ID NO: 16284 - DNA, 2580 bp, synthetic construct
  misc_feature 1..2580: note = source = /note="Description of Artificial Sequence: Synthetic coding sequence"
  source 1..2580: mol_type = other DNA
atggggccatggggatggaagctgcggtggactgtggccctgctgctggcagcggctggtactgcggtcggagacagatgcgaacggaacgaattccagtgtcaagacggaaagtgcatcagctacaaatgggtctgcgatggatccgccgaatgccaagacggttcggacgaatcacaggagacttgcctgtctgtgacttgtaagtccggagatttctcgtgcggcggacgcgtcaaccgctgcatcccgcagttctggcgctgtgacggtcaagtggactgcgataacgggtccgacgagcagggctgcccgcctaagacttgttcgcaggacgagtttcggtgtcacgacggcaagtgtatttcccgccagtttgtgtgcgactccgaccgcgactgcctcgacggatcggatgaagcgtcatgcccagtgctcacttgcggaccagcctccttccagtgcaactcttcgacttgcatcccccaactgtgggcctgcgataacgacccggattgcgaagacggatctgacgaatggccacagcgctgcaggggcctgtacgtgttccaaggcgactcgtcaccgtgctccgcttttgaattccactgcctgtcgggagaatgcatccatagcagctggagatgcgacggcggacccgattgcaaggacaaaagcgacgaagaaaattgcgccgtggccacttgccgcccggatgagttccaatgctcggatggaaattgcatccacgggagccggcaatgcgacagagagtacgattgcaaagatatgagcgacgaggtcggatgcgtgaatgtgaccctttgcgaagggcctaacaagttcaagtgccactcgggggaatgcatcactctggacaaagtgtgcaacatggcacgagactgccgggactggtcggatgagccaatcaaggagtgtggaactaacgcttgcttggacaacaacggcggttgttcacatgtgtgtaacgatctcaagatcggatacgagtgtctgtgcccggacgggttccagctggtggcgcaacggcggtgcgaggacatcgatgaatgccaagatcctgatacctgctcgcagctgtgcgtcaatctggaaggtggttacaagtgccagtgcgaggaagggttccaacttgacccgcacaccaaggcttgcaaagccgtcggaagcatcgcttatctgttctttaccaaccgccacgaagtgaggaaaatgaccctggacagaagcgagtacacctccctgatccctaatctgcggaacgtggtcgcgctcgacaccgaagtggccagcaaccggatctactggtctgacctgagccaacgaatgatttgcagcacccagttggaccgggcccatggtgtgtcgagctacgacacggtgatcagccgggacattcaggcgccggacggcctggctgtcgattggatccatagcaacatttactggaccgactcagtgctcggaactgttagcgttgctgacaccaagggagtgaagcggaaaactctcttcagagagaacggtagtaagccaagagctatcgtcgtagatccggtgcacggtttcatgtattggacggattggggaacgcccgcgaagatcaagaagggaggactcaatggagtggatatctacagccttgtcaccgagaacatccagtggccgaacggaatcaccctggacttgctgtccgggagactttactgggtggactcgaagctgcactcgatctccagcatcgacgtgaatgggggaaatagaaagaccatcctcgaggacgagaagcggctcgctcatcccttttcgctcgctgttttcgaggacaaggtgttttggacggacatcatcaacgaggccatcttttccgctaatcgcctgaccgggtcggatgtcaacctgctggcggaaaatctgctttcccctgaagacatggtgcttttccataacctcacgcagccccgcggagtcaactggtgcgagcgcactactttgtcaaacggagggtgccagtacttgtgtctcccggctccgcagatcaacccacacagccccaaattcacctgtgcatgccccgatggaatgctgctcgcccgggacatgcggtcctgcctcactgaagcggaggctgcggtcgcaacccaagagacttcgaccgtgcggcttaaagtgtcgtcgactgccgtccgcacccagcatactaccacgcggccggtgcctgacaccagccgcctcccaggcgcgactccaggactgacgacggtcgagatcgtgaccatgagccaccaggcactcggcgatgtggccgggcgcggaaatgagaaaaagccatcgtccgtgcgggccctttccatcgtgctgccgatcgtccttttggtcttcctctgcctcggggtcttcctcctgtggaagaactggcgcctgaagaacatcaacagcatcaacttcgataatcctgtctaccagaagactacggaagacgaggttcacatctgccataatcaggacggatacagctacccatcacggcaaatggtgtcccttgaagatgacgtggca

SEQ ID NO: 16285 - DNA, 2580 bp, synthetic construct
  misc_feature 1..2580: note = source = /note="Description of Artificial Sequence: Synthetic coding sequence"
  source 1..2580: mol_type = other DNA
atgggtccatggggctggaaactgagatggaccgtagccctgctcctggcggccgcaggaacggcggtcggagatcgatgcgagaggaatgagttccagtgtcaggacggcaagtgtatatcgtacaagtgggtctgtgacgggtcagccgaatgtcaggatggttcggatgagtcgcaggagacgtgtctgtccgtcacttgcaagtcaggagatttctcatgtggaggacgggtgaacagatgcattccgcagttctggcggtgtgatgggcaagtcgattgtgacaacggatcggacgaacaagggtgcccgccaaagacctgttcgcaggacgaattcagatgccacgatggtaagtgtatctcgcggcagttcgtgtgcgattccgaccgggattgcctggatggatcagacgaggcgtcgtgccctgtgctgacctgcgggcctgcctcgttccaatgtaattcgtcgacctgtatcccccagctctgggcctgcgacaatgatcctgactgcgaagatggttcagacgagtggccccagagatgtaggggactgtacgtgtttcagggagacagctcgccttgtagcgcattcgagtttcattgccttagcggagaatgcatccattcatcctggcgctgcgacgggggaccggactgtaaggacaagtccgacgaagagaattgcgccgtcgcgacttgccggccggacgaattccagtgctcggacggtaactgtattcatgggtcccggcagtgcgaccgcgagtacgactgcaaagacatgtccgacgaggtcggctgcgtgaatgtgaccctctgcgaaggcccgaacaagttcaagtgccatagcggggagtgcatcacccttgataaagtctgcaacatggcccgcgattgccgcgattggtcggacgaaccgatcaaagagtgcggaactaacgcatgtctggacaacaatggaggatgctcgcatgtctgtaacgacttgaagattggctacgagtgcctgtgcccggatggattccaactggtggcccagcggcgctgtgaagatatcgacgaatgccaggacccagacacttgctcgcaactctgtgtgaacctggaaggagggtacaagtgccagtgcgaggaaggattccagcttgatccgcacactaaggcctgcaaagcggtgggatcaatcgcttacctgttctttaccaatagacacgaggtcaggaagatgactttggatcgcagcgagtacacgtccctgatccctaaccttcggaacgtggtcgccctggataccgaagtggcgtccaacagaatctactggtcggatctgtcgcagcgcatgatctgctctactcaactggaccgggcccacggagtgtcgagctacgacaccgtcatctcgagggacatccaagctccagacggactcgccgtcgattggatccactccaatatctactggaccgattcagtgctggggaccgtctccgtggcagacactaagggagtcaagagaaagacgttgtttagggagaatggttccaagccgcgcgccatcgtggtcgatcccgtgcatgggttcatgtactggaccgactggggaaccccggctaagatcaaaaaggggggactcaacggcgtggacatatacagcctcgtgactgagaatatacagtggcccaacgggattacgctggacctccttagcggaaggctgtactgggtcgactccaagctgcactcgatctcatcaattgacgtgaacggaggcaaccgcaagacgattctggaggacgagaagcggctcgcacatccgttctcgctcgccgtgttcgaagataaggtgttctggaccgatatcatcaacgaagctattttctccgccaaccgcctgactggatccgatgtgaacctgttggcggaaaacttgctgagcccagaggatatggtgctgttccacaacttgactcagccaaggggagtgaactggtgcgaaaggactaccctgagcaacggcgggtgccaatacctgtgccttcccgcgccccaaatcaatccgcactccccgaagttcacttgcgcttgccctgatggaatgcttctcgccagagatatgaggtcgtgcctgaccgaagcggaggcagccgtggccacccaggaaactagcacggtgcggctgaaagtctcgagcacggctgtgcggactcaacataccactactcgccctgtgccggacacctcccggttgccaggcgcgactcccggactgaccactgtggaaatcgtgaccatgtcacaccaggctttgggagatgtggcaggacgcggcaatgagaagaagccgtcgagcgttagagcattgagcatcgtcttgccgattgtcctcctcgtctttctgtgcctgggagtgttcctgctgtggaaaaactggcgcctgaagaacatcaactccatcaactttgacaaccccgtgtaccaaaaaactaccgaagatgaagtgcacatctgtcacaaccaggatggctactcgtaccctagccggcagatggtgtccttggaagatgatgtggcg

SEQ ID NO: 16286 - DNA, 2580 bp, synthetic construct
  misc_feature 1..2580: note = source = /note="Description of Artificial Sequence: Synthetic coding sequence"
  source 1..2580: mol_type = other DNA
atgggtccttggggatggaaactccgctggacagtcgctctactgctggccgccgcaggaactgccgttggtgaccgctgcgaacgcaacgagtttcagtgccaggatggcaagtgcatctcttacaaatgggtgtgcgatgggtcggcagaatgtcaggacggtagcgacgaatcccaagaaacatgcctgtccgtcacctgcaaaagcggcgatttcagttgcggcggtagagtgaatagatgtattccgcagttctggagatgcgatgggcaagtggactgtgacaatgggagtgatgaacaggggtgcccgcccaagacatgtagtcaggacgaattcaggtgtcacgacggcaaatgcatctctaggcagttcgtctgtgatagcgatcgggattgtcttgatggatctgatgaggcctcatgtccagtattgacttgcggacctgcttctttccaatgtaactcatccacttgcatacctcagctgtgggcttgtgacaatgatcctgattgcgaggatggcagcgatgagtggcctcaacggtgtcgtggcctctacgtattccaaggggacagctccccctgtagtgccttcgagtttcactgcttaagtggcgagtgtatccatagtagctggagatgtgatggcggtccggattgcaaggacaagtctgatgaggagaattgcgctgttgctacgtgtcgccccgacgaatttcagtgcagcgatggcaactgcatccatggcagcagacagtgcgacagagagtacgactgcaaagacatgagcgacgaagtgggttgtgtgaatgtgaccctatgcgagggccccaataaattcaagtgtcactccggggagtgtataacactagataaggtttgcaacatggcccgcgactgtcgtgattggagtgacgaacctatcaaagagtgcggaacaaacgcatgcctggataacaatggcggctgtagtcatgtgtgcaacgatttgaagattggctatgaatgcctatgccctgatggctttcagttggtggctcagcgcagatgcgaggacatcgatgaatgtcaggaccccgacacctgctcacagctgtgcgttaatcttgagggcgggtataagtgccagtgtgaggagggcttccagctcgatccacacaccaaggcatgtaaggctgtggggtcaatcgcctatcttttctttaccaaccgccacgaggttcggaaaatgacactggaccgcagcgagtatacatcactgatcccgaacttgaggaatgtggtcgccttagataccgaggtcgcttctaacaggatctattggtcagacctttctcagaggatgatctgctctacacagcttgaccgggcgcacggagtcagttcctatgacaccgtcataagccgcgacatccaggctccagatggtctcgccgttgactggattcattcaaacatctactggaccgatagtgtgctgggcacagtcagcgtggctgacacgaagggcgttaaaaggaaaaccctgtttcgggaaaatgggtctaagccccgagccattgtggtggatccagtgcacggctttatgtactggacagattggggtactcctgctaagattaaaaaaggaggacttaatggggtagacatctatagcctggtaaccgaaaacatccaatggcccaatgggataactctagacctcctgagcgggagactgtactgggtagacagtaaacttcactcaatttcctccatagacgtgaacggcgggaatcgaaagactatattagaagacgagaagcggctggcacatccattcagcttggctgtctttgaagacaaggtattctggaccgacattatcaatgaggcaatatttagcgctaatcgcttgacagggtctgacgtaaatctccttgccgagaatctcctgtcccctgaagacatggtcttgttccacaatctgacccaacctaggggtgtgaactggtgtgagagaactacactaagtaatggtggatgtcagtatctctgcctgcctgcgcctcagatcaacccgcattcccctaagtttacatgtgcatgcccagacgggatgttgcttgcacgcgatatgcggtcttgtcttactgaggcagaggcggctgtggccacacaggagactagtaccgtgcgtttaaaagtaagctctaccgcagtccgcacccagcatacaacgacacgtccagtcccggatacatctcggctgcctggcgccacacccggtcttaccaccgtcgaaattgtcacaatgagtcatcaggcgcttggggacgtggctgggaggggcaatgaaaagaaacccagttccgtgagagcgttgagcattgtgctgcccattgtcctgctagtgtttttatgtttgggcgtgttcctgctgtggaaaaactggcgactgaagaacataaactccattaactttgacaatcctgtatatcaaaagaccacggaagacgaggtccatatctgtcataaccaggacggctactcctacccatccagacagatggtttccttggaagacgatgttgcc

SEQ ID NO: 16287 - DNA, 2580 bp, synthetic construct
  misc_feature 1..2580: note = source = /note="Description of Artificial Sequence: Synthetic coding sequence"
  source 1..2580: mol_type = other DNA
atgggtccttggggctggaaactgaggtggaccgtcgcattactgctggcagctgccgggactgcggttggagaccgttgcgaacgcaacgagttccagtgtcaggatgggaagtgcatcagctacaagtgggtatgcgacggttccgccgaatgccaggacgggtccgacgagagtcaggaaacttgtctgtctgtaacatgcaagtccggggatttctcgtgcggaggccgggtgaatcgctgtatcccgcaattttggagatgtgacgggcaggtagattgcgacaacggcagtgacgagcagggttgcccgcctaaaacctgctcacaagacgaattccgatgtcacgacgggaagtgtatcagtcggcagtttgtgtgcgacagtgacagagattgtcttgatggatcagatgaagcttcctgtcccgtacttacttgtggaccggcctcattccagtgcaatagtagcacatgcatcccccagctgtgggcctgtgataacgacccagattgtgaagatggcagcgatgaatggccccagcgctgcagaggtttgtacgtgtttcagggagactcatctccctgttccgccttcgagttccattgccttagtggtgagtgcatacattcaagctggcgatgcgacggcggccccgattgtaaggataaaagcgacgaggagaactgcgccgtcgcaacttgccggccggacgagttccagtgttcagacgggaactgtattcacggttcccgccagtgtgaccgagagtacgattgtaaggatatgtccgatgaagtgggctgcgtgaatgtgaccttgtgtgagggccccaacaaattcaagtgccattcaggtgagtgtattaccctcgacaaggtgtgcaacatggctcgcgactgtcgggactggtcggacgagccgattaaggagtgtgggaccaacgcctgcctggataataacggcggctgctctcacgtgtgcaacgacctgaaaattggctatgagtgcctctgccctgatggctttcaactcgtggcacagcggaggtgcgaagacatcgatgaatgtcaggacccagacacttgtagccagctgtgcgttaatctagaaggaggctacaagtgccagtgtgaggagggttttcaactggacccgcataccaaagcctgcaaagccgtcggcagcatcgcgtacctgttctttactaatagacacgaagtcaggaagatgaccctggatagaagtgagtacacaagtctcatcccaaatctgcggaatgtggtggccctggacaccgaggtagcaagtaatagaatatactggtctgacttatcacagcggatgatatgcagtacccagttggatcgtgcccatggagtttcttcttacgacacggtgatatctcgggatatacaggctcctgatggactggcggttgactggattcattccaatatctattggactgatagtgtgctcggcactgtaagtgttgccgacaccaaaggggtgaagaggaaaacgttattcagagagaatgggtctaagccaagggctatagtcgtggatcctgtgcatggcttcatgtactggaccgactggggcaccccggcaaagatcaagaagggcggcctgaacggagtggacatttatagcctcgtgacagaaaacatacagtggccaaacggcattacattagacctcctctcaggcaggttgtactgggtggactcaaagttacactctataagttcaattgatgtgaatggtggaaatagaaagaccattctggaagacgagaagcggctggcccatcctttttcccttgctgtcttcgaagacaaagtgttctggacggacatcattaatgaagctatcttttcagctaaccggctaaccgggtcagatgtgaacctgctggccgagaacctgctctcgcctgaagatatggttctctttcataacctcacccagccccggggcgtgaattggtgtgaacgcacaaccctctcaaacggggggtgccagtatctttgtcttcccgcacctcaaatcaatcctcactctccgaagtttacatgcgcttgccccgacggcatgcttctcgctagagatatgcgttcctgcctgacagaagctgaggccgccgtggccacacaggagacaagtaccgttcgactcaaggtgtcctccacggctgtccgtacccagcatacaacgacaaggcctgtgcctgacacatcccgtctccctggggccactcccgggcttaccacagttgagatcgtgactatgagccaccaagcccttggtgatgtcgctggtcggggtaatgagaaaaagccctccagcgtgcgtgctctgagcatcgtgctgccaatcgtcttgctggtctttctgtgcctcggcgtgttcttactatggaaaaactggcggctcaagaacataaactcaataaactttgataaccccgtataccagaagaccacggaggatgaagtccacatttgtcataaccaggatggatattcgtatccttctaggcagatggtgtctctggaagatgacgttgcc

SEQ ID NO: 16288 - DNA, 2580 bp, synthetic construct
  misc_feature 1..2580: note = source = /note="Description of Artificial Sequence: Synthetic coding sequence"
  source 1..2580: mol_type = other DNA
atgggaccttggggatggaagctgagatggaccgtggctcttctgctggctgcagccggaaccgctgtcggtgataggtgtgaacgcaatgagtttcagtgccaagatggaaaatgtatctcgtacaaatgggtgtgtgacggatccgccgaatgccaggatggaagcgatgaatcacaggaaacgtgtttgtccgtgacgtgtaaatccggagatttttcctgtggcggacgcgtgaacaggtgcattcctcagttctggagatgcgatgggcaggtcgattgtgataatggaagcgacgagcagggatgcccccctaagacctgttcccaggatgaatttagatgtcacgacggtaaatgcatttcgcgccaattcgtgtgcgattcggatcgagattgcctcgatggatcagacgaggcgagctgccctgtgctcacttgtggaccagcgtcgttccagtgtaactcgtcgacctgtataccgcaactgtgggcatgtgataacgatcctgattgtgaagatgggtcagatgaatggccccaaaggtgcaggggactttacgtgtttcaaggtgattcgtccccttgttcggccttcgagttccattgtctgtcgggggaatgtattcactcgagctggcgttgtgatggggggccagactgcaaagacaagagcgatgaagaaaattgtgcagtggcgacttgtcgccctgacgaatttcaatgtagcgatggtaactgtatccatggctcccgccaatgtgatcgagagtacgattgcaaagatatgagtgatgaagtgggatgcgtgaacgtgaccctgtgtgaaggtcctaacaagttcaaatgtcattcaggagaatgcattacccttgacaaggtgtgtaacatggccagagattgtcgggattggtcagatgagcctataaaggagtgtggaaccaatgcatgtctggataacaacggtggttgtagccatgtctgtaatgatcttaagattggttacgaatgcctttgcccagatggctttcaactggtcgcacagaggagatgtgaggatatcgacgaatgtcaagatccagatacctgttcgcaactctgcgtgaacctggaaggtggctacaagtgccagtgtgaagaaggttttcagctggatccccataccaaagcctgcaaggcagtgggctccattgcgtatctcttcttcactaataggcatgaagtccgcaagatgaccctggacaggagcgagtacacttcgcttattcctaatctcagaaacgtggtcgcactcgataccgaggtggcatctaacagaatttactggtcggacctgtcacagcgaatgatttgttcgactcagcttgacagagcacatggtgtgtcaagctacgataccgttatctcacgggacattcaagccccagacggattggccgtggattggatacactcgaacatctactggactgacagcgtgcttgggaccgtgtccgtcgcagacactaagggtgtcaagcgcaagaccctttttcgggagaacggttctaagccaagggcaatcgttgtggatccagtgcacggattcatgtactggaccgattggggaacccccgcgaaaatcaaaaagggtggccttaacggtgtcgatatctactcgctggtcactgaaaacattcaatggccaaatggtattacgctggacctgttgtccgggcggctgtactgggtggactctaagctgcattcaatcagctccattgatgtcaatggaggtaatagaaagactatacttgaggacgagaaaaggcttgctcaccctttcagccttgccgtgtttgaagataaggtgttttggactgacattatcaacgaggcgattttcagcgcaaaccggctcaccggatccgatgtgaatctgctcgcggagaacttgctgtcccctgaagatatggtcttgtttcacaatctgacccaaccccgaggggtgaactggtgcgaacgcaccacccttagcaacggaggttgtcagtacctctgcctgcccgccccccagattaatccccacagccccaagttcacctgcgcgtgcccagatgggatgcttttggcaagagatatgcgctcatgtcttaccgaagcagaagcggcagtggcgacccaggaaacttcaactgtgaggctgaaagtctcaagcactgctgtgaggacccaacataccaccaccagaccagtgcctgatacgtcacggctgccgggggcaacccctggacttacgaccgtggaaattgtgaccatgtcgcaccaagcactgggcgacgtggccggacgcggaaacgaaaagaaaccttcgtcggtgcgtgccctgtcaatcgtgcttcctattgtgcttcttgtgttcctgtgtcttggggtgtttctcctctggaagaactggagactgaaaaacattaactcgatcaactttgataacccagtctatcaaaagaccacggaggatgaagtccatatctgtcataaccaagatggatactcgtacccctcacgacaaatggtgtcactggaggacgacgtcgct

SEQ ID NO: 16289 - DNA, 2580 bp, synthetic construct
  misc_feature 1..2580: note = source = /note="Description of Artificial Sequence: Synthetic coding sequence"
  source 1..2580: mol_type = other DNA
atgggaccatggggatggaaactccgctggaccgtggcactgcttcttgcagcagcgggaactgctgtgggtgatagatgcgaacgtaatgagttccaatgtcaagacggtaagtgcatttcgtacaagtgggtctgcgatggatcggcagaatgtcaagatgggtcagacgaaagccaagaaacctgcttgtccgtcacttgtaagtccggagacttctcgtgtggaggtcgggtcaatcgctgcattcctcagttctggaggtgtgatggacaagtggactgtgataacggttccgacgaacagggttgtcctcccaagacctgttcccaagatgaatttaggtgtcacgacgggaagtgtatcagcaggcaatttgtgtgcgattcggatcgggattgtttggatggctccgatgaagccagctgcccggtgctcacttgtggtccagcaagttttcaatgtaactcgtcgacttgtatacctcaactctgggcatgtgacaatgaccctgattgtgaggacggcagtgacgagtggccgcagcgctgcaggggactgtacgtctttcagggcgactcgtcgccctgttcggcatttgagttccattgtttgtcaggagagtgtatccactcctcatggagatgtgatggaggaccagattgtaaagacaagtccgacgaggaaaactgcgcggtggctacctgtcgcccagatgagtttcagtgttcggacggtaattgtattcatggtagcagacagtgtgatcgagaatacgattgcaaggatatgtcggacgaggtgggttgcgtgaatgtgactctctgtgaaggcccaaataagtttaagtgccattcgggtgagtgcatcactcttgataaggtgtgcaacatggcacgcgactgccgcgattggtccgacgaacctatcaaagaatgtggtaccaatgcgtgtctggataacaacgggggttgtagccatgtctgcaatgacctgaagatcggctacgaatgtctgtgtccagacggatttcaacttgtcgcacaacggcggtgtgaagatattgatgaatgtcaggaccctgacacctgtagccaattgtgcgtgaacctcgaaggggggtataagtgtcaatgtgaagaagggtttcagctcgatccacataccaaggcttgcaaagcagtgggatcgattgcctatctgttctttactaatcgacacgaagtgcgaaagatgaccctggacaggtccgagtacacctcgttgattccaaatttgagaaacgtcgtggccctggatactgaggtggcctctaatcgcatttactggtccgatctttcgcagagaatgatttgctccactcagctcgatagagcccatggagtgtcaagctacgataccgtgatcagcagggatatccaggcccccgacggacttgcagtggactggatacattctaacatttactggactgatagcgtcctgggcaccgtgtcggtggcggacaccaagggtgtcaaacggaaaactttgtttcgcgagaacggatcgaaacccagagcaattgtcgtggatcctgtgcacgggttcatgtattggactgactggggaactccagcaaaaatcaagaagggcggtttgaacggagtcgatatctacagcctggtgacggagaacattcaatggcccaatggcattaccctggatcttctctcaggacggctttactgggtcgattcaaaactgcactcgatttcctccatcgatgtgaacggcggaaatagaaagaccatccttgaagatgaaaagagacttgctcatccgttttcgttggccgtgttcgaagataaggtgttctggactgacatcattaatgaagcaatcttttctgcaaatagactgactggctccgacgtgaacctgctggcagaaaatctgctcagccccgaagatatggtcctctttcacaacctcacgcagccaagaggagtcaactggtgtgaacgcaccaccctgtccaatggcggttgtcaatacctttgcctgcctgccccgcagatcaatccgcattcgcccaaattcacctgtgcctgtccagatggcatgctccttgcgagagacatgagaagttgtttgactgaagcagaggctgccgttgctacgcaagagactagcaccgtgcgcctcaaggtgtcgtccactgccgtgaggacccagcatactaccacccggccagtgccagatacttcgcggctgccgggcgcaacgccaggactgaccactgtggagattgtgaccatgagccaccaagcacttggagatgttgcagggcgcggtaatgagaagaaaccttcatcggtgcgcgcactgtccatcgtgttgcctatcgtgcttctggtgtttctgtgtctgggggtctttcttctgtggaagaattggcgccttaagaacatcaacagcatcaattttgataaccccgtgtaccaaaagactaccgaagatgaagtgcatatctgccataaccaagatggatactcctacccttccaggcagatggtatccctggaagatgacgttgca

SEQ ID NO: 16290 - DNA, 2580 bp, synthetic construct
  misc_feature 1..2580: note = source = /note="Description of Artificial Sequence: Synthetic coding sequence"
  source 1..2580: mol_type = other DNA
atgggaccgtggggatggaagctgcgctggaccgtggccctgctgctcgccgcggccgggactgcagtgggtgaccggtgcgagcgcaacgagttccagtgccaagacgggaagtgcatttcgtacaagtgggtctgcgacggtagcgcagagtgccaggacggttccgatgagtcacaggaaacctgcctttcagtgacgtgcaagagcggagactttagctgcggcggaagggtcaataggtgcatcccgcagttctggcggtgcgatggacaagtggattgcgacaatggatcagatgagcaagggtgccccccaaaaacttgctcacaagacgaattccggtgccatgacggaaagtgcatctcgagacagttcgtgtgcgactctgaccgcgactgtctcgatgggtccgacgaagcgagctgtccagtgctgacttgcggacccgcttcgttccagtgcaactcctcgacttgcattccgcaactgtgggcgtgtgacaatgacccagactgtgaggacggatcagatgaatggccgcaacggtgccggggtctgtacgtgtttcagggtgattcgtcgccttgctcggcattcgaattccactgcctgtcgggagagtgcatccattcatcgtggagatgtgacgggggaccagattgtaaggacaaatccgatgaggaaaactgcgcggtggccacctgccggccggatgaattccagtgctcagacggaaactgcatccacggatcccggcaatgcgaccgtgaatatgattgtaaggatatgtccgacgaggtcggatgcgtgaatgtcactctgtgtgagggacccaacaaattcaaatgccattcaggcgagtgtatcacccttgacaaggtttgtaacatggctcgcgattgcagagactggtcagatgaaccaattaaggagtgtggaaccaacgcctgtctggacaataatggaggctgctcgcatgtttgtaacgatctcaagatcggatacgaatgcctgtgccccgatggcttccagttggtcgctcaacggcggtgcgaggatatcgacgagtgccaggatccggacacctgcagccaactctgcgtcaatctcgagggtggctacaagtgccagtgcgaagaaggcttccagctggacccgcataccaaggcttgcaaggcggtgggatccatcgcgtacttgttcttcactaacagacacgaggttaggaagatgactctggatagaagcgagtacacctcactgatcccaaacctcaggaacgtggttgcactggataccgaagtcgcctcgaatcgaatctactggtcggacctcagccaaagaatgatttgctccactcagctggatagagcccatggagtctccagctacgacactgtcatcagccgcgacatccaggcaccggatggactggccgtggactggatccactcgaacatttactggactgactcagtattgggtactgtgtctgtggcggacactaagggagtgaagcgaaagactttgttccgggagaacggatcgaaaccaagggcaatcgtggtcgacccggtgcacggcttcatgtactggactgattggggaaccccggccaagatcaaaaagggcggactgaacggagttgacatctactcacttgtgactgaaaacatacagtggccaaacggaatcaccttggatctgctgtccggaaggctctactgggtcgactcgaagctgcatagcatctcttcaatagacgtcaacggtggcaacagaaagaccattctcgaggacgaaaaacgcctcgcgcacccgttttcgctggctgtgttcgaggacaaggtgttctggactgacatcatcaacgaggccatcttttcggccaatcggctcaccggatcggacgtcaatctcctggccgaaaacctcctttcgccagaggacatggtcctgttccataaccttacccaaccaaggggagttaactggtgcgaacgcaccaccctcagcaacggagggtgtcagtacctctgcctcccagctccacagattaatccacacagccctaagttcacctgtgcatgtccggacggcatgctccttgcacgggacatgcggagctgtctcactgaggcggaagcagctgtcgcgacccaggaaaccagcaccgtccgcctcaaagtgtcatcaactgctgtgcgcacccaacacaccactacccggccggtgccggatacctcgcgcctgccgggcgccactcctggactgaccaccgtggaaatcgtcactatgtcccatcaagcgctgggggatgtggcaggacggggtaatgagaagaaaccttcgtcggtgcgggccctgtcaatcgtcctgccgatcgtgctcctggtgttcctgtgcttgggagtgttcctgctttggaagaactggcggctgaagaacataaacagcatcaatttcgataaccctgtgtaccaaaagacgaccgaggacgaagtccacatttgccacaatcaagacggatactcataccctagccgccagatggtttcgcttgaggacgacgtggcc

SEQ ID NO: 16291 - DNA, 2580 bp, synthetic construct
  misc_feature 1..2580: note = source = /note="Description of Artificial Sequence: Synthetic coding sequence"
  source 1..2580: mol_type = other DNA
atgggcccttggggctggaagctgcggtggacagtggctctgctgctggctgcggctggaactgcggtgggagacagatgtgagaggaatgagtttcaatgccaagacggcaaatgcatctcttataaatgggtgtgtgacgggtcggccgaatgtcaggatggctccgacgaatctcaggagacctgcctcagcgtgacttgtaagagtggggattttagttgcggagggcgagtgaaccgctgtatcccccagttctggagatgtgacggccaagtggactgcgacaatggaagtgacgaacaggggtgccctccaaagacctgttcccaggacgagtttcggtgccacgatggaaagtgcatcagcaggcagtttgtatgcgattccgaccgcgactgtctggacggctccgacgaggcatcgtgcccggtgttgacttgcggacctgcttcattccagtgtaattctagtacctgtatcccccaactgtgggcttgcgacaacgacccagactgcgaggacggctccgacgaatggccccagcgctgtaggggcctgtacgtgtttcagggcgacagttcaccatgcagcgcctttgagttccactgcctgagtggcgaatgcattcatagctcatggagatgcgacgggggacccgattgcaaagataagagtgatgaagaaaattgtgccgtcgccacctgcaggcccgacgaatttcagtgcagcgacggaaactgtatccacgggtcaaggcaatgtgacagagagtatgattgtaaggatatgtccgatgaggtggggtgtgtgaacgtgacactttgcgaggggccgaacaagttcaagtgtcattcaggcgagtgtatcactttagataaggtatgcaatatggcacgcgactgtcgagattggtctgacgagcccataaaagaatgcggcacgaatgcttgtctagacaacaatggcgggtgctctcacgtgtgtaacgatctaaagatcggctacgaatgcctgtgtcccgacggcttccagctggtagcccagcgcaggtgcgaagacattgacgaatgtcaagacccggacacttgttcccaactgtgtgtcaatctggaggggggatataaatgccagtgtgaggaagggttccagctggatccccacacaaaggcctgcaaggccgtggggtctatcgcctaccttttcttcaccaacaggcacgaagtccgaaagatgaccctggacaggtctgaatacactagcttaattccaaatttgagaaacgtggtggcgctcgacacagaagtagccagcaaccggatctactggtcggacctgagccaacggatgatttgctcaacacagctggacagggcacatggtgtatctagctacgatactgtaatctctcgcgacattcaggcccccgacgggctcgccgtcgattggatccactccaatatttattggaccgactcagtgcttggtaccgtctccgtggcagacactaagggcgtgaaacgcaagactttgtttcgcgagaatgggtccaagccccgagctatcgtggttgaccccgttcatggttttatgtactggacagattggggcaccccagctaagattaagaagggcggattgaacggggttgatatctattcactcgttactgaaaatatccagtggcctaatggcattaccctggatctgttgagtggtcggttgtactgggtcgacagcaagctgcattcaatttcctctattgatgtcaatggaggcaatcgaaaaaccatactcgaggatgagaagcgcctggctcacccattctcgttggccgtgttcgaggataaggttttttggaccgatatcattaacgaagccatcttttcagccaatagactgacaggatcagacgtgaacctgctggccgaaaaccttttatcccccgaagatatggttctgttccacaacttgacgcagccacgtggggtgaattggtgcgagcggaccacgctatccaatggcggatgccagtacctctgcctgcctgcccctcagatcaacccgcattctccaaaatttacatgtgcgtgccccgacggcatgctactggctagggatatgcggagctgtttaaccgaagccgaggctgccgtcgccacacaggaaactagcacagtcagattgaaagtctcgtcaactgcggtccgtactcagcacacgaccacaaggccagtgcccgacacgagccgccttcctggagccactccgggtctgactacggttgagatcgtgactatgagtcatcaggccctaggtgatgttgccggccgggggaacgaaaagaagccctctagcgttcgcgcgcttagcatcgtcctgcccattgtgcttctggtgtttctgtgtctcggtgtcttcctcctgtggaaaaactggaggctgaagaatattaatagtattaacttcgataatccagtttaccagaagaccactgaagacgaggtgcacatctgtcacaatcaggatggatacagctatccctctcggcaaatggtctcactggaggacgatgtagca

SEQ ID NO: 16292 - DNA, 2580 bp, synthetic construct
  misc_feature 1..2580: note = source = /note="Description of Artificial Sequence: Synthetic coding sequence"
  source 1..2580: mol_type = other DNA
atgggtccgtggggttggaaattacgatggacggtagcgctattattagcggcggcgggtacggcggttggtgatcgttgtgaacgaaatgaatttcaatgtcaagatggtaaatgtatatcgtataaatgggtttgtgatggttcggcggaatgtcaagatggttcggatgaatcgcaagaaacgtgtctatcggtaacgtgtaaatcgggtgatttttcgtgtggtggtcgagtaaatcgttgtataccgcaattttggcgatgtgatggtcaagtagattgtgataatggttcggatgaacaaggttgtccgccgaaaacgtgttcgcaagatgaatttcgttgtcatgatggtaaatgtatatcgcgtcaatttgtatgtgattcggatcgtgattgtttagatggttcggatgaagcgtcgtgtccggtactaacgtgtggtccggcgtcgtttcaatgtaattcgtcgacgtgtataccgcaactatgggcgtgtgataatgatccggattgtgaagatggttcggatgaatggccgcaacgatgtcgaggtttatatgtatttcaaggtgattcgtcgccgtgttcggcgtttgaatttcattgtctatcgggtgaatgtatacattcgtcgtggcgatgtgatggtggtccggattgtaaagataaatcggatgaagaaaattgtgcggtagcgacgtgtcgtccggatgaatttcaatgttcggatggtaattgtatacatggttcgcgtcaatgtgatcgagaatatgattgtaaagatatgtcggatgaagttggttgtgttaatgttacgctatgtgaaggtccgaataaatttaaatgtcattcgggtgaatgtataacgttagataaagtatgtaatatggcgcgtgattgtcgagattggtcggatgaaccgataaaagaatgtggtacgaatgcgtgtttagataataatggtggttgttcgcatgtatgtaatgatttaaaaataggttatgaatgtctatgtccggatggttttcaattagtagcgcaacgtcgatgtgaagatatagatgaatgtcaagatccggatacgtgttcgcaactatgtgttaatttagaaggtggttataaatgtcaatgtgaagaaggttttcaactagatccgcatacgaaagcgtgtaaagcggttggttcgatagcgtatttattttttacgaatcgacatgaagttcgaaaaatgacgttagatcgttcggaatatacgtcgttaataccgaatttacgaaatgttgttgcgttagatacggaagtagcgtcgaatcgaatatattggtcggatttatcgcaacgtatgatatgttcgacgcaactagatcgtgcgcatggtgtttcgtcgtatgatacggtaatatcgcgagatatacaagcgccggatggtttagcggtagattggatacattcgaatatatattggacggattcggttctaggtacggtatcggtagcggatacgaaaggtgttaaacgaaaaacgctatttcgagaaaatggttcgaaaccgcgagcgatagtagtagatccggttcatggttttatgtattggacggattggggtacgccggcgaaaataaaaaaaggtggtttaaatggtgttgatatatattcgttagtaacggaaaatatacaatggccgaatggtataacgttagatctactatcgggtcgactatattgggttgattcgaaattacattcgatatcgtcgatagatgtaaatggtggtaatcgaaaaacgatactagaagatgaaaaacgactagcgcatccgttttcgctagcggtatttgaagataaagtattttggacggatataataaatgaagcgatattttcggcgaatcgattaacgggttcggatgtaaatttactagcggaaaatttattatcgccggaagatatggttctatttcataatttaacgcaaccgcgtggtgttaattggtgtgaacgaacgacgttatcgaatggtggttgtcaatatctatgtctaccggcgccgcaaataaatccgcattcgccgaaatttacgtgtgcgtgtccggatggtatgttattagcgcgagatatgcgttcgtgtctaacggaagcggaagcggcggtagcgacgcaagaaacgtcgacggtacgtttaaaagtatcgtcgacggcggttcgtacgcaacatacgacgacgcgaccggtaccggatacgtcgcgactaccgggtgcgacgccgggtttaacgacggttgaaatagttacgatgtcgcatcaagcgttaggtgatgttgcgggtcgtggtaatgaaaaaaaaccgtcgtcggttcgtgcgttatcgatagtactaccgatagtactactagtatttttatgtttaggtgtatttctattatggaaaaattggcgattaaaaaatataaattcgataaattttgataatccggtttatcaaaaaacgacggaagatgaagtacatatatgtcataatcaagatggttattcgtatccgtcgcgtcaaatggtatcgttagaagatgatgtagcg

SEQ ID NO: 16293 - DNA, 2580 bp, synthetic construct
  misc_feature 1..2580: note = source = /note="Description of Artificial Sequence: Synthetic coding sequence"
  source 1..2580: mol_type = other DNA
atgggtccgtggggatggaagttgagatggacggtcgcactgttgctggcagccgccggcaccgctgtcggagacaggtgcgaacgcaacgagtttcagtgccaggacggtaaatgcatatcgtacaaatgggtgtgcgatggaagcgccgaatgccaagatggcagcgacgagtcgcaggaaacgtgcttgtccgttacgtgcaagtccggcgatttcagctgcggtggccgtgtgaatcgatgcatacctcagttctggcgctgtgatggccaggtcgattgcgacaatggctccgatgaacaaggctgtcctccgaagacatgctcgcaggatgagttccgctgccatgacggtaagtgcatcagccgccaattcgtgtgtgactccgatcgtgactgcctggatggctcggacgaggcctcatgtccagttctgacctgcggcccagcgtccttccagtgtaactcgagtacatgcattccgcagctgtgggcttgtgacaacgatcccgactgcgaggacggaagtgacgagtggccgcaacggtgccgcggattgtatgttttccagggcgatagtagtccatgttcggcattcgagttccactgcttgtcgggtgagtgcatccacagctcatggaggtgtgatggaggtccggattgcaaggacaaatccgatgaagagaactgcgcagtggcaacttgccgtccagacgagttccaatgctcagacggcaattgtatccatggatcacgtcagtgcgatcgggagtatgactgtaaggatatgagtgacgaggtgggttgtgtgaatgtcaccctgtgcgagggtccaaacaagttcaaatgtcactctggtgagtgcatcaccctggacaaagtttgcaacatggcgcgcgattgcagggattggagcgacgagccgatcaaagagtgcggaaccaatgcctgtctcgacaataatggcggctgttcgcatgtgtgcaacgacctcaagatcggatatgagtgcttgtgcccggacggctttcaattggttgcccagcgacgctgtgaagacatcgacgaatgccaggatcctgatacgtgcagccagttgtgtgtaaaccttgaggggggttacaagtgccaatgtgaggaggggttccaacttgaccctcacacaaaagcctgcaaagcagtcggttcgattgcctatttgtttttcacgaaccgtcacgaggtgcgaaaaatgacccttgacaggagtgaatacacaagtctgatacccaacctgaggaatgtggtggctctggatactgaggtggcctcgaatcgcatctattggtcggatttgagccagaggatgatatgctcaacgcagctggatcgagcccacggcgtgagctcgtatgataccgtgataagcagggatattcaggctcccgatgggctggctgtcgattggatccacagtaacatttactggaccgattccgttcttggcactgtgagcgtggcggataccaagggtgttaagcgtaagacgctatttcgcgaaaacgggtcgaagccccgtgccatcgttgtggacccagtgcatggatttatgtattggacggattggggtacccccgcgaagatcaaaaaagggggtctcaacggcgtcgatatctactcgctagtcacagaaaatatccagtggccgaacgggatcacactcgatcttctgtcgggccggctttactgggtggattcgaagctgcacagcatttcctccatcgatgtaaatggcggcaataggaaaaccatcttggaggatgaaaaaagactggcgcatccattttcattggcggtgtttgaggataaagtcttctggacggacatcataaacgaggcaatcttctcggcgaatcggctcactgggtccgatgtaaacctgctcgcggagaacttgctttcaccggaagatatggtgctcttccataatttgacccaaccccggggagtgaactggtgcgagcgcactaccctgtccaacggcggatgccagtacttgtgcctgcctgccccccagattaatccacacagccccaagttcacgtgcgcctgccccgacggcatgttgctggcccgcgatatgcggtcgtgcttaacggaggccgaggcagctgtcgcgacgcaggagaccagcacggtacgcctaaaggtgagtagcactgccgtcaggacccagcacaccaccactcgacccgtcccggatacatctcgcctgccgggtgctacccccggactaacgaccgtcgagatagttaccatgtcgcatcaagctctgggcgacgttgctggccgggggaacgagaaaaagccatccagcgtgcgtgccctgtcgatcgtactgccaatcgtgctgctggtcttcctatgtctaggcgtgttccttctgtggaagaactggcgcctgaagaacatcaatagtattaacttcgataatccggtttatcagaagacaacggaggatgaagtgcatatctgccataatcaggatggctactcgtacccctcgcgtcagatggtttcacttgaggacgatgtggcc

SEQ ID NO: 16294 - DNA, 2580 bp, synthetic construct
  misc_feature 1..2580: note = source = /note="Description of Artificial Sequence: Synthetic coding sequence"
  source 1..2580: mol_type = other DNA
atgggaccatggggctggaaattgagatggaccgtggccctgctgctggccgcagctggaactgcagtgggcgataggtgtgaaaggaatgaattccagtgtcaggacggaaaatgcatttcatacaaatgggtgtgtgacggctcagccgaatgtcaagacggatccgacgagtcgcaagaaacctgtctttccgtcacttgtaagtcgggtgatttctcctgcggaggaagagtgaaccgctgcatcccgcaattctggcggtgtgatggtcaagtcgattgtgacaacggttccgatgaacaggggtgcccgcctaaaacctgtagccaggatgagtttcgctgccacgatggcaaatgcatttcgcgccaatttgtctgcgactccgatcgggattgccttgacgggtcggacgaagcgtcatgtccggtcctgacctgcgggccagcatccttccagtgcaactcgtcgacctgtatcccccaactctgggcgtgtgacaatgaccctgactgtgaagatggatcggacgaatggccgcagagatgtcgcgggctctacgtgttccagggagactcaagcccctgtagcgcctttgaattccactgcctctcaggagagtgcatccactcctcatggcggtgcgatggaggaccggactgtaaagataaaagcgatgaggagaattgcgctgtggcgacctgtcggcccgacgaatttcaatgtagcgatgggaattgcatccacggatcgagacagtgcgaccgcgaatacgattgcaaggatatgtcagatgaagtgggatgcgtgaacgtgaccctgtgcgaggggccaaataagttcaagtgccatagcggcgagtgcatcactctggataaggtctgcaacatggcacgggactgtcgcgactggagcgacgaaccgatcaaggagtgtgggactaatgcatgtctcgataacaacgggggctgtagccatgtgtgcaatgacctgaaaatcgggtacgaatgtctctgccctgatggattccaactggtcgcgcagaggaggtgtgaggacattgatgaatgccaggacccggacacctgctcccagctgtgcgtgaacctggagggcggatacaagtgtcagtgcgaagagggatttcaattggacccgcacaccaaagcctgtaaggccgttggttcaatcgcctaccttttctttaccaacagacatgaggtccggaagatgaccctcgaccggtcggaatacacctcactgatcccgaatctccgcaatgtggtggcgctggatactgaggtggccagcaataggatttactggtccgacctctcccagcggatgatctgcagcactcaacttgatcgggcccatggagtctcatcatacgataccgtcatctcgcgggatatccaggcccctgatggactggcggtcgactggatccatagcaacatctattggaccgactcagtgctgggaaccgtgtccgtcgcggacacgaagggtgtgaaaagaaagaccctcttcagagagaacggttcgaagccgcgggcgatcgtggtggaccctgtccacggattcatgtactggactgattggggcactccagccaaaatcaagaaggggggactgaacggagtggacatctacagccttgtgaccgaaaacatccaatggcccaacggaatcaccctcgacttgctctcgggtcggctgtactgggtggactctaagctccactcaatttcctccatcgatgtcaatggggggaaccgcaagaccatcctcgaggacgagaagcggttggcccatcctttctcactggctgtctttgaagataaggtgttttggactgatatcatcaatgaggcgatcttctcggccaaccggcttactggatcggatgtgaacctcctggcagaaaacctcttgtcccccgaagatatggtgctgttccataacctgacccagccgcgcggagtcaattggtgtgagcgcaccactctttccaacggagggtgccaatacctgtgcctgccagccccgcagattaatccacactctccaaagttcacttgcgcatgcccggatggaatgttgctcgcccgggacatgcgctcatgcctcactgaagcagaggccgcagtcgcgacccaggagacttccacggtgcggctgaaggtaagctcgactgcagtacgcacccagcacaccaccacgcggccagtcccggacacgtcaagactcccgggcgctactccgggactgaccaccgtcgaaatcgtgaccatgagccaccaggctttgggagacgtcgcggggcgtggcaacgagaagaaaccttcgtccgtcagggcactgtcgatcgtgctgccgattgtgttgctcgtgttcctgtgcctcggcgtgttcctgctgtggaagaactggcgcctgaagaacattaactcaattaactttgataatccggtgtaccaaaagaccacggaggatgaagtgcatatctgccacaaccaagacgggtactcgtatccgtcgaggcagatggtgtctctggaggacgacgtagcc

SEQ ID NO: 16295 - DNA, 2580 bp, synthetic construct
  misc_feature 1..2580: note = source = /note="Description of Artificial Sequence: Synthetic coding sequence"
  source 1..2580: mol_type = other DNA
atgggaccatggggatggaagttgaggtggactgtcgcgcttttgttggctgctgctgggacggctgtgggggacaggtgcgaaagaaacgaattccaatgccaagatgggaagtgcatatcttacaagtgggtttgtgatggaagcgccgagtgtcaagacgggagcgatgaaagccaagaaacctgcctttcggttacctgtaaatccggagattttagttgcggcggaagagtaaacagatgtataccgcaattctggcgttgtgacggacaagttgactgtgataacggctcagacgagcaaggctgtcctccaaagacctgttcgcaagacgagtttcggtgccatgacggtaaatgcatttcgaggcaatttgtatgcgacagcgatagagattgtcttgacggtagtgacgaagcttcttgcccagtactgacatgtgggcccgcgtccttccaatgtaattcatcaacgtgcatcccccaactttgggcttgcgataacgatcctgactgtgaagacggttctgacgaatggccacaacggtgtcggggattatatgtgttccaaggtgattcatcaccgtgctctgcttttgagtttcattgcctttcgggcgaatgtatacatagtagttggagatgtgacggaggaccagactgcaaagataaatctgatgaggagaattgcgcggttgccacttgccggcctgatgagttccaatgttctgatggaaactgtattcacggttcacgtcaatgcgaccgtgagtatgactgtaaggatatgagcgatgaggtgggctgtgttaacgtcactctctgtgagggaccaaataaattcaaatgtcactcaggagaatgcattaccctggataaggtgtgtaatatggcacgtgactgtagggattggtcagatgagcccatcaaagagtgtggtaccaatgcgtgcttggataataatggtggttgctcgcatgtttgcaacgatttaaagatcggttatgagtgtttatgtccggatggtttccagttggtcgcccaacgaagatgtgaggacatagatgaatgccaagatcccgatacgtgctcacaattatgcgttaacctggagggaggttacaagtgccaatgtgaagaggggtttcagctcgaccctcacactaaagcatgcaaagctgtgggtagcattgcctacctgttcttcacaaatagacacgaggttaggaaaatgactttagatcgttcagaatatactagcttgattccaaacctcaggaacgtggttgcgctggatacagaagtggcttctaatcgcatttattggagcgatttgagccaaagaatgatctgttcgacacaacttgatcgtgcccatggagtatcgtcttacgacactgttatttcacgtgacatacaagcccctgatggcctggcagttgactggattcatagtaacatatactggacggatagcgtcctgggcactgtttcggttgctgacaccaagggtgtaaagcgcaagaccctttttagggaaaacgggagtaagccgagggctatagttgttgatccagttcatggtttcatgtattggaccgattggggcactcccgcaaagatcaagaaaggtgggttgaatggtgttgatatatacagcttggttaccgagaacatacagtggcctaacggtatcacccttgatctgctttccggcaggttgtactgggtagattcgaagctgcatagtatctcgagtattgatgtaaatggaggtaaccgtaagaccattctggaagatgagaagcgtttggctcatcctttttccctcgctgtttttgaggataaagtgttttggacagatataataaatgaggctattttctccgccaatcgtttgacaggatcggatgtgaatctcctcgctgaaaatcttttatctccagaagatatggtgttgtttcacaatcttactcaacctaggggagttaactggtgcgaacgtactactctgagcaacggtggatgccagtatttgtgcttaccagccccacaaattaatcctcactctcccaagttcacgtgcgcctgtcctgacggtatgttactagctagggacatgcgctcttgcctgacagaagccgaggcggcagtggctactcaagagacatctaccgttaggttaaaggtaagtagtaccgcagtacgcactcaacatactacaaccagaccagtgcccgatacttcccggttgcctggagctacaccaggtcttaccactgtcgaaatcgttacaatgtctcaccaggcccttggggacgttgcaggaaggggaaacgaaaagaagccgtctagtgttcgtgcgctctctattgtgttgcctattgtgttgctcgtttttctctgcttgggagtttttcttctctggaagaactggaggctaaagaacattaattctattaattttgacaacccagtctatcaaaagaccacggaagatgaggtgcatatttgtcataatcaagatggatactcttatccctcccgacagatggtttcccttgaggacgacgtcgca

SEQ ID NO: 16296 - DNA, 2580 bp, synthetic construct
  misc_feature 1..2580: note = source = /note="Description of Artificial Sequence: Synthetic coding sequence"
  source 1..2580: mol_type = other DNA
atgggaccttggggttggaaattgaggtggactgtggcccttctgctggcagcagcaggaacggccgtgggagataggtgcgaacgcaatgaatttcaatgtcaagatggtaaatgtattagctacaagtgggtctgtgacggttcagccgagtgtcaagacggatccgatgagtcgcaagaaacctgtctcagcgtgacctgtaaatcaggggacttttcgtgcggaggacgtgtgaatagatgcatccctcagttttggagatgtgacgggcaggtggattgcgacaatggaagcgacgaacaaggctgcccaccaaaaacttgttcgcaagatgaattcagatgtcacgacggaaagtgtatatcccggcaatttgtctgtgattcagatcgggattgtctggacgggtccgatgaagcctcgtgtcctgtgctgacttgtggacctgcatctttccagtgtaattctagcacctgcattcctcaactttgggcgtgtgataatgaccccgattgtgaggatggttcggacgaatggccacagcgatgccgcggactctacgtgtttcagggtgactccagcccttgttccgcgtttgagttccactgcctgtccggagagtgtatacatagctcctggaggtgtgatgggggccctgattgcaaggataagtccgatgaggaaaactgtgccgtggcaacctgtagacctgatgaattccaatgtagcgatgggaactgtatccacggaagccggcagtgcgatcgcgagtacgactgcaaagatatgagcgatgaggtgggatgtgttaacgtgaccctctgcgaaggaccaaacaagttcaagtgtcattcgggcgagtgtatcacgttggataaggtgtgcaacatggccagagattgtcgtgattggagcgatgaacctattaaggaatgcgggaccaacgcgtgtctggacaacaacggtggatgctcgcatgtgtgcaacgaccttaagattggttacgaatgtttgtgccctgatgggttccagcttgttgcacagagaagatgtgaggacattgatgaatgtcaggatccagacacctgttcgcaactgtgcgtgaatctggagggaggttacaagtgtcagtgtgaagagggctttcaattggacccccacaccaaagcatgcaaagccgtgggtagcattgcatatctgttctttaccaacagacacgaggtgagaaaaatgacgctggatcgatcagaatacacctccctgattcctaaccttcggaacgtggtagccctggatactgaagtggcgtcgaacagaatttactggtcggatctgagccaaaggatgatttgttcgacgcaactggacagagctcatggagtgagcagctacgacaccgtgatctcaagagatatacaggcccctgatggactggcggtcgactggattcattcaaacatttactggaccgactcagtgctgggcaccgtgagcgtggccgacaccaaaggagtcaagcgtaagaccctcttccgcgaaaacggatcgaagccccgcgcaatcgtggtcgatcctgtgcatggtttcatgtactggactgattggggaactccagccaagattaagaaaggcggactcaacggtgtagacatatactcgctcgtcaccgagaacattcagtggccaaacggaatcacccttgacctgctttccggaagattgtactgggtggatagcaaactgcattccatctcctcgattgacgtcaacggtggaaaccggaaaacgattctggaagatgaaaagcgtctggcacatccctttagcttggctgtctttgaagataaagttttctggaccgatatcattaacgaagcgatctttagcgccaaccgacttactggatcggatgtgaaccttctggccgaaaacctcctctcccctgaagatatggtcctgtttcataatctcacccaacctagaggtgttaattggtgtgaacgtactactctgagcaatggaggctgtcagtacctttgcctgccagcacctcagataaatccacattcgccaaagtttacctgtgcgtgcccggacggaatgcttctggcaagagatatgcggtcgtgcctgactgaagcagaagcagcggtcgcaactcaggaaacctcaaccgtgaggcttaaagtgtccagcaccgcagtgagaactcaacataccactactagacctgtgcctgacacttccagattgccaggcgcaactcccggcttgactaccgtggaaattgtcactatgtctcatcaagcccttggagacgtggcagggcgcgggaatgagaagaaaccatcctcggtgcgggcactgtcaatcgtgttgcctattgtgctgctggtgttcctttgtctgggtgtctttcttctgtggaagaattggcggcttaagaacataaactccattaacttcgataaccctgtgtaccagaaaacgaccgaggacgaagtgcacatctgtcacaaccaagatggttacagctacccatcgagacagatggtgtcacttgaggatgacgtggcc

SEQ ID NO: 16297 - DNA, 2580 bp, synthetic construct
  misc_feature 1..2580: note = source = /note="Description of Artificial Sequence: Synthetic coding sequence"
  source 1..2580: mol_type = other DNA
atgggtccctggggatggaagctgagatggaccgtggccttgctcctagcagcagccgggaccgcggtgggcgataggtgcgagagaaatgaattccagtgccaggatggaaaatgcatcagctacaagtgggtctgcgacgggtcagctgaatgccaggacggcagtgacgagagccaagagacctgcctttccgtgacatgcaaatccggagactttagttgtgggggaagagttaacagatgcattcctcagttctggcgctgtgatgggcaggttgactgtgacaacggaagcgacgaacaagggtgccctcctaagacctgtagccaggacgagttccgctgccacgatggcaagtgcattagtagacagttcgtgtgtgactcagatcgggattgtttggacggcagtgatgaggcctcgtgtccagtgctcacctgcggtccagcttctttccagtgcaatagctccacctgtatcccccagctttgggcttgcgacaacgacccagactgtgaagatggatcagatgagtggcctcaaaggtgccgtggactctacgtgttccaaggggatagctcaccctgctcagctttcgagttccattgcctaagcggtgagtgtatacactcatcttggcgttgcgatggtggtcctgattgtaaggacaaatccgacgaagagaattgtgccgtggcgacttgtcgcccagatgagttccagtgcagcgatggtaattgcattcacggctcaaggcagtgcgaccgcgagtatgactgtaaagacatgagcgatgaggtgggatgcgtgaatgtgactctctgtgaaggccccaataagtttaaatgtcatagcggggaatgcatcacccttgataaggtgtgtaacatggctcgggattgtcgggattggtctgacgaacctatcaaggagtgtggaacaaatgcttgtctcgataataacggcgggtgttcacacgtgtgcaatgatctgaagataggttacgagtgcttgtgcccagacggattccagctggtggcgcagagacggtgtgaggacattgatgaatgccaggacccagatacatgttcccagctctgtgtgaatctcgaggggggttataaatgccagtgtgaagaggggtttcagctagatcctcacaccaaagcatgtaaggccgttgggtccatcgcttatcttttcttcactaatcgccacgaagtgagaaagatgacattagaccggtcagagtatacatccctgattcccaatctccgtaacgtggtggcactggataccgaggtagccagtaatagaatttattggtctgacctgtcccagagaatgatctgctcgacgcagctggacagggcccacggagtgtctagttatgacacggtgatcagccgcgatatccaggctccagatggtctcgccgtggactggatccattcaaatatatactggaccgattccgtgctgggaactgtgtctgtggccgacaccaaaggggtgaaacgcaagaccttatttcgagagaatgggagcaagcccagggctatagtagtggatccagtgcacggattcatgtattggacagactggggtacgcccgccaagatcaagaagggcggcttaaatggagtcgacatctatagcctcgttactgaaaatatacagtggcctaatgggattacactggatttgctctccgggcggctctattgggtggacagtaagttgcattctatttcatcaatcgacgtcaatggcggcaatcggaaaaccattttggaggatgagaagagactggctcatccattctctctcgcagtgtttgaggataaggtattttggaccgacataatcaatgaggccatcttcagcgcaaaccggcttactgggtccgacgtcaaccttttagccgagaacttgctgtcccccgaagacatggtgttgttccacaatcttacacaacctcgcggggtcaactggtgtgagcggacaacactgagcaatgggggctgtcagtacctgtgcctcccagcgccgcagatcaacccacacagtcccaagttcacatgtgcctgcccagatggcatgttacttgcccgcgatatgcggtcctgcctcactgaggccgaggctgctgtcgcgacacaagaaactagtactgtgaggctaaaagtgtcttctacagccgttaggacgcagcacactactacccgaccggtgccggataccagcaggctacccggtgcaactccagggctgaccacagtggagattgtgacaatgagccaccaagctctcggggatgttgcaggcagggggaacgagaagaaaccgtcttctgtacgggctttgtcaattgtcttgcccatcgtgcttctggtgttcttgtgtctgggcgtcttcctcttgtggaaaaactggaggctgaaaaacatcaactcaatcaacttcgataacccagtgtatcaaaaaactaccgaggacgaggtgcacatttgtcacaatcaggatggctacagttacccatccagacagatggtctctcttgaagacgacgtggct

SEQ ID NO: 16298 - DNA, 2580 bp, synthetic construct
  misc_feature 1..2580: note = source = /note="Description of Artificial Sequence: Synthetic coding sequence"
  source 1..2580: mol_type = other DNA
atgggtccgtggggctggaagctgcgctggaccgtcgcacttctgctcgcagccgcgggaactgctgttggagatagatgtgaaagaaacgagttccagtgtcaagacggtaaatgtatctcgtacaagtgggtgtgtgatggatccgccgagtgccaagatggtagcgatgaatcccaagaaacctgtttgtcagtgacttgtaagagcggcgacttttcatgcgggggccgagtgaaccgctgtatccctcaattctggcggtgtgatggacaagtcgattgcgacaatggttcggatgagcaggggtgtcctcctaaaacctgctcccaggatgaatttcggtgccacgacggaaagtgtatctctcgacaattcgtgtgtgattcggaccgggattgcctggatggaagtgatgaggcatcctgtccagtgcttacgtgcgggcctgcatcatttcaatgcaattccagcacctgtattccccagctttgggcatgtgataacgaccctgactgtgaggacggatcagacgaatggccgcagcggtgcagaggtctttacgtgtttcaaggtgatagctcaccctgcagcgcctttgaatttcactgtctttcgggagagtgcattcattcctcctggagatgtgacggtggtccggattgtaaagataagtcggacgaggaaaattgtgcagtggcaacctgcagacctgatgaatttcaatgttctgatggaaactgtatccacggatccagacagtgcgatagagaatacgactgtaaggatatgagcgatgaagtgggatgtgtgaacgtcactctttgcgagggaccaaacaaattcaagtgccattcaggagaatgtatcaccctcgacaaggtgtgtaacatggcgcgagattgtcgcgattggtccgatgagcctatcaaagagtgtggtaccaacgcctgtctggacaataacggtgggtgttcccatgtgtgcaacgatctgaaaattggatatgagtgcctttgtcctgacggatttcagctcgtggcccaacgtaggtgcgaggatatagatgagtgccaggatcctgatacctgttcacaactgtgtgtcaaccttgaaggcggatacaagtgccagtgtgaagagggatttcagttggacccgcatactaaggcctgtaaggcggtgggttcaatcgcctaccttttctttaccaacagacatgaagtgaggaagatgactcttgatagatctgaatacacgtcccttattcctaacctgcgcaatgtggtggcactggacaccgaggtggcttcaaaccgcatatactggagcgatttgtcacaacggatgatttgctccacccagctggatcgggcgcatggcgtgagctcctacgacaccgtgatctcacgcgacattcaggcaccggacggactggcggtcgactggatccactccaacatttactggaccgattccgttcttggtaccgtgtcggtcgcagataccaaaggagttaagcgcaagactctgtttagagaaaacggatcgaagccgcgagctattgtggtcgatcctgtgcatggatttatgtactggactgactgggggacccctgcaaagatcaaaaagggtggtctgaacggtgtggacatctactctctggtcactgaaaacattcagtggcctaacgggattacccttgatttgttgtcggggcgcctctactgggttgacagcaagctgcactccatctcatcaatagatgtgaacggaggaaacagaaagaccatcctggaggacgaaaagcggttggcacatcctttttcgctcgcggtgtttgaggacaaagtgttttggaccgacattatcaatgaagcgatattcagtgcaaacaggcttactgggtccgacgtgaaccttctggcagaaaacctcctgtcgcctgaggatatggtgctgttccataacctcacccaaccccggggagtgaattggtgcgaacggactaccctgagcaacgggggatgtcagtacctctgcctgccagcaccccagattaatccgcattcacctaagtttacgtgtgcatgtcctgacgggatgctgctggcaagagatatgcggtcgtgtctgaccgaagcagaagccgcagtggccacccaagaaactagcaccgtgcgtcttaaagtgtcatccaccgccgtgcgaacccagcacactactacccggcctgtgcctgatacgtcgcgtctgcctggagccaccccaggtcttaccacggtggaaattgtcactatgtcgcatcaagccctgggagatgtggcaggtcggggaaacgaaaagaagccctcgtccgtgcgcgcccttagcatcgtgctccctattgtcctccttgtctttctgtgtttgggagtgtttcttctgtggaaaaactggcgactcaagaacattaacagcattaacttcgacaacccagtctaccagaaaactactgaagatgaggtgcatatctgtcataaccaagatggctactcgtatccaagccggcagatggtgtcactcgaagatgatgtggca

SEQ ID NO: 16299 - DNA, 2580 bp, synthetic construct
  misc_feature 1..2580: note = source = /note="Description of Artificial Sequence: Synthetic coding sequence"
  source 1..2580: mol_type = other DNA
atgggtccgtggggttggaagctgaggtggactgtggccctgctcctcgcagccgcagggacagcagtaggtgatcggtgtgagcggaacgagtttcagtgccaggatggaaagtgtatcagttataagtgggtatgcgatggcagcgcagagtgtcaggacgggtccgacgaaagccaggaaacttgcctctcagtaacttgtaagtctggagacttcagttgcggcggacgggtgaataggtgcatccctcagttctggcgatgcgatggacaagtggattgtgacaacggatccgatgagcagggatgtcctccaaagacatgctctcaggacgagttccgatgtcacgatggaaaatgtatcagtcgacagttcgtctgcgatagcgacagggattgtctcgacggctccgatgaggcatcttgcccagtcctgacctgtggtcccgccagctttcagtgcaatagtagcacctgcataccacagctgtgggcttgtgataacgaccccgattgcgaggacggctccgatgagtggccccagcggtgccgcgggctctacgtgttccaaggggattctagcccctgcagcgcgtttgagttccattgcctgtccggggagtgcatccacagttcatggaggtgcgatggcggtcctgactgcaaggataagagcgatgaggaaaactgcgccgtcgcgacctgtaggcctgatgagttccagtgcagcgacggtaactgtatccacggatccaggcagtgcgacagggagtacgactgtaaagatatgtccgatgaggtagggtgcgtaaacgtcaccttgtgcgagggcccaaacaagttcaaatgccacagtggagaatgcatcaccttggataaagtgtgtaacatggcgcgcgactgtcgcgattggtcagatgagccaattaaagaatgcgggaccaacgcttgtctggataataacggcggctgtagccacgtctgcaatgatctgaagatcggctacgagtgtctctgtcccgacgggttccagctcgtggcccaaagaaggtgtgaagatatagacgagtgtcaggacccagatacctgtagtcaactctgcgtgaacctggagggcggatataaatgtcagtgcgaagaaggctttcagctggatcctcacaccaaagcctgcaaggccgttggtagtattgcctacctttttttcaccaatcggcacgaagtgcggaagatgaccttggacaggagcgaatacacatcactgatccctaaccttcggaatgtagtggcactcgacacggaagtagcgagtaaccgaatttattggtctgacctgagccagcgcatgatttgtagtacccagttggaccgagcccacggggtcagcagctatgacacagtgatatcccgcgacatacaggcccctgacgggcttgcggtagattggatacactccaacatctactggaccgatagcgtattgggcaccgtaagtgtggccgatacgaagggagtgaaacggaaaaccctcttccgggagaacggctccaagccaagagcgattgtggtggatcctgttcatggattcatgtactggaccgactgggggactcctgctaagattaaaaagggaggattgaacggtgtggacatctactctctggttacggagaatattcagtggcccaatggcattacgctggacttgctgtctgggaggctttattgggtggactctaagctgcatagcattagttctatcgacgtgaacggggggaataggaaaaccatactcgaggacgaaaagcgcctggcccatccattcagtctcgctgtgttcgaggacaaggtcttctggactgatattataaatgaagcaatcttttccgccaacagactgacaggtagcgatgtcaacctcctggccgagaatctcttgagccctgaagacatggtgctttttcacaacctgactcagcctcgcggggtgaattggtgcgagcggactacgctttccaatggcggatgtcagtacctctgcctcccagcgccccagatcaacccgcactcccctaagtttacttgcgcctgcccagacggcatgctgctggctcgcgatatgagaagctgtctgaccgaggcggaggcagccgtcgccacccaagaaacgagcaccgtaaggctgaaggtctcatccacagcagttcgcacgcaacataccacaaccagacctgttcctgacacctctcgcctgccaggcgcgacccccggccttaccacagttgaaatcgtcaccatgtcacaccaggctctgggagacgttgccggcagggggaatgaaaagaagccgtctagtgtgagagctctgagcatagtgctgccaatcgtgctcctcgtgttcctgtgcctcggagtctttttgctttggaagaactggcggcttaagaacattaatagcatcaattttgataacccagtctaccaaaaaacaaccgaagatgaggttcacatatgtcataaccaagacggttacagctacccttcacgccagatggtgtcactggaagacgacgtcgct

SEQ ID NO: 16300 - DNA, 2580 bp, synthetic construct
  misc_feature 1..2580: note = source = /note="Description of Artificial Sequence: Synthetic coding sequence"
  source 1..2580: mol_type = other DNA
atgggaccctggggatggaaacttcgctggaccgtggccctcttgctggctgcggctggaaccgctgtgggtgatcgatgtgaacgtaacgagtttcagtgtcaggacgggaagtgcatctcttacaaatgggtctgcgacggctcggcagagtgccaagatggctccgatgaatcccaagagacttgtctgtcggtcacttgcaaatcaggtgatttctcctgcggagggcgggtgaatcgctgcatcccgcagttctggcggtgcgatggccaagtggactgcgacaacggcagtgatgagcagggctgcccgccaaaaacgtgcagccaagacgaattccggtgtcatgacggaaagtgcatttcgcgccagttcgtctgcgattccgacagagattgcttggacggctcagatgaagccagctgccccgttcttacctgcggtcctgcgagcttccaatgtaatagctcaacttgcatccctcaactgtgggcgtgcgacaatgacccggactgtgaagatgggtcagatgagtggccccagcgctgtcggggcctgtacgtgtttcagggagacagctcgccatgctccgcttttgagttccactgtctcagcggcgagtgtatccactcgtcatggcgctgtgacggaggccctgactgcaaggacaagagcgacgaagaaaattgcgccgtagcaacttgccggcctgatgagtttcaatgttcagacgggaactgcatccatgggtcgcgacaatgtgatcgggaatacgattgcaaggacatgtctgacgaagtgggatgtgtcaacgtgacgttgtgtgaaggacctaacaaattcaaatgccattcaggcgaatgtatcacgctggacaaagtgtgcaacatggcgagggactgccgggactggtccgacgagccgatcaaagaatgcggaactaatgcgtgcctggacaataatggcggttgttcacatgtctgcaacgacctgaagatcggatatgaatgcctgtgcccggacgggttccagctggttgcccagagacgctgtgaggacattgacgagtgtcaagacccagacacctgttcccagctttgcgtgaacctcgagggtggatacaagtgccagtgtgaagagggattccagctggacccccataccaaggcctgcaaggcggtgggatcaatcgcatatcttttcttcactaaccggcacgaggtgcggaagatgacgttggaccgctccgaatacacgagcctgatcccgaacctgcgtaacgtggtcgctctggataccgaagtggcctcgaaccgcatctactggagcgacctgtcccagagaatgatctgctcgactcaactggatagagcccatggggtgagcagctatgataccgtgatctcgcgggacattcaggccccggacggactggcggtcgattggatacacagcaacatctactggactgactccgtcctggggaccgtgagcgtggccgacactaagggagtgaaacgcaagaccctgtttagagagaatggcagcaagccgagagcgatcgtagtcgaccctgtccacggatttatgtactggacggactggggaactccggcaaagatcaaaaagggaggcctcaatggggtggacatttactcgttggttactgaaaacattcagtggccaaacggcatcaccctggatctgctcagcgggcgcctttactgggtggactccaagctgcactccatctctagcatcgatgtgaatggcgggaacagaaagactatcctcgaggacgagaagcggcttgcccatccgttctcactggccgtgttcgaagataaggtgttctggacggacataatcaatgaagctatcttttctgccaaccggctgaccggctccgacgtgaatctgctggccgaaaacctgctctcaccggaagatatggtgttgttccacaacctgacccaaccgagaggggtgaattggtgcgaacgcactaccctcagtaatgggggctgccagtacctgtgtctgccagcccctcagatcaacccccactcgccaaagttcacctgcgcctgcccggatggaatgcttcttgccagagatatgcggtcatgtctcaccgaggcagaagccgcggtcgcaactcaggaaacttcgaccgtcaggcttaaggtgagctcgaccgctgtcagaactcagcacactacgactcggccagtgccagacacctcgcgactgccaggagcaacccccgggctcactaccgtcgaaatcgtgaccatgtcccaccaggccctgggtgatgttgccggaagaggaaatgagaagaaaccttcgtccgttcgggcgctctccatcgtcctgccgattgtcctcctggttttcctctgtctcggagtgttcctcctgtggaagaactggcgcttgaagaacataaactcgatcaatttcgataacccggtgtatcagaaaactaccgaagatgaggtgcacatctgccataaccaggacgggtactcatacccttcaagacaaatggtgtcgcttgaagatgatgtggct

SEQ ID NO: 16301 - DNA, 2580 bp, synthetic construct
  misc_feature 1..2580: note = source = /note="Description of Artificial Sequence: Synthetic coding sequence"
  source 1..2580: mol_type = other DNA
atggggccttggggctggaagctgagatggactgtcgctctgctgctggctgcggcggggactgccgtcggtgacagatgcgaaagaaacgaattccagtgccaggacggtaaatgtatctcgtacaagtgggtctgcgatgggtcagcggagtgccaggatggcagcgacgagagccaggagacttgtctgtcggtcacttgtaagagtggcgacttctcctgtggaggccgagtcaaccggtgcatcccccaattttggagatgcgacggtcaggtggactgtgacaacggatccgacgaacagggttgtcccccaaagacctgttcccaggacgaattccggtgtcacgacgggaagtgtatttcacggcaattcgtctgcgatagcgatagagattgcctggacggatcggacgaggcttcctgccctgtgctgacctgcggaccagcgtcctttcagtgcaattcctccacttgcatcccccagctgtgggcctgtgacaacgatccagactgcgaagatgggtcggacgagtggccacaaaggtgccggggcctctacgtgtttcagggagattcgtcgccgtgttcggccttcgaattccattgcttgtccggtgaatgcatccattcctcatggaggtgcgacggaggaccggattgtaaagataagtccgacgaggagaattgcgcggtggcgacttgccggcccgatgaattccagtgttcggacgggaattgtattcacggctcccgccagtgcgatcgcgagtacgattgcaaggatatgtcggatgaggtgggatgtgtgaacgtgaccctctgcgaaggcccaaacaagttcaaatgtcactcgggggagtgcattacccttgacaaggtgtgcaacatggcccgcgattgcagggactggtcggatgaaccgatcaaggagtgcggaacgaatgcctgcctggacaataatggaggctgctctcacgtgtgtaacgatctcaagatcggttacgaatgcctttgtccagacggtttccagttggtcgcccaacgacgatgcgaggacatcgatgaatgtcaagacccggacacctgcagccagctgtgcgttaacctcgaaggaggctacaagtgtcagtgcgaggagggctttcagctcgatccgcacaccaaagcctgtaaggcagtgggatcaattgcataccttttcttcactaatcggcatgaagtgcggaagatgaccctcgaccggagcgaatacacctccctgatcccgaacttgcggaacgtggtggccctcgacactgaggtcgcctcaaatcgaatctactggtctgatctgtcccaacgcatgatctgctccacccagctggatagggcgcacggtgtgtcctcttacgacacggtgatctcgcgcgatatccaggcgccagacggactggcagtggattggatccactcgaacatctactggaccgattcagtgctcggcacggtgtccgtggcggatactaaaggagtgaagcgtaagaccctgttccgggaaaatggatcgaagccacgcgccatcgtcgtggacccggtccacggcttcatgtactggaccgactggggaaccccggcgaaaatcaagaagggcggactcaacggagtggacatttactcacttgtgactgagaacatccagtggccgaacggtatcactctcgacttgctttccggacgcctgtactgggtggatagcaaactccattcaatctcgagcatcgatgtcaacggaggaaacagaaagactattctggaggacgaaaagcggctggcccacccgttctcattggccgtctttgaggacaaagtgttctggaccgacatcataaacgaagcgatcttctccgccaatcggctcactgggtccgatgtgaacctccttgcagagaacctgttgtcaccggaagatatggtactcttccacaatctgacccaaccgcggggagtcaattggtgcgagaggaccactctgtccaacggaggctgccagtacctctgcctgccggctccgcagatcaacccacacagcccgaaattcacttgcgcttgccctgacggaatgctcctggcgagagatatgaggagctgccttactgaagcagaggcagccgtcgcgacccaggaaacctcaactgtccgccttaaagtctcctcgaccgcagtgagaactcaacacactaccaccagaccggtcccagacacttcacgcctgccgggagcgactcctggactcactaccgtggagatcgtgaccatgtcgcatcaggcactcggcgacgtcgcaggcagaggcaacgaaaagaaaccctcttcagtgcgggccttgagcatcgtgctgccaatcgtcctgctcgtgtttttgtgcctgggagtgttcctcctgtggaagaactggcgcctcaagaatatcaacagcattaactttgataacccggtgtaccaaaagactaccgaagatgaggtgcacatctgccacaaccaggacggatactcatacccttcccgccagatggtttccctggaagatgatgtcgcc

SEQ ID NO: 16302 - DNA, 2580 bp, synthetic construct
  misc_feature 1..2580: note = source = /note="Description of Artificial Sequence: Synthetic coding sequence"
  source 1..2580: mol_type = other DNA
atgggcccttggggctggaaactgcggtggacagtggcattgctgctagccgcagctggaactgccgtgggagatagatgcgaacgaaatgaattccagtgccaggatgggaagtgtatctcctataagtgggtgtgtgatggtagcgcggaatgtcaggacggatccgacgagtctcaggagacttgcctgagtgtgacttgcaagagcggagacttctcatgtggaggcagggtgaacagatgcattccccagttttggcggtgtgatgggcaggtagactgcgacaacgggtccgacgagcaaggctgcccacccaagacttgtagtcaggatgagtttcggtgccacgatggcaaatgtataagccggcagttcgtgtgtgactccgacagggattgcctggacggctctgatgaggctagctgccctgtcctaacttgtgggcccgcaagcttccagtgtaattccagcacgtgtatcccccagctgtgggcttgtgataacgaccccgattgcgaggatggaagtgacgaatggccccagcggtgcaggggcctctatgtgtttcaaggagacagttccccctgcagtgctttcgagtttcactgtctctctggggagtgcattcactccagctggcgctgtgatggtggacccgattgcaaagacaaaagtgacgaagagaactgcgcggtcgcgacctgccgcccagacgaattccagtgttcagatggaaattgcattcacggctcgaggcagtgcgacagagaatacgattgcaaggacatgagcgacgaagtcggctgcgtgaacgtcactctgtgcgaaggacccaataagttcaaatgtcatagcggggagtgtatcacccttgacaaggtttgcaacatggctcgggattgccgcgattggagcgacgaacccattaaagagtgtggtactaatgcctgtcttgacaataatggaggttgcagtcacgtgtgcaatgatttgaaaatcggttacgagtgtttatgtcccgacggatttcagctggtggctcagaggagatgcgaggacatcgatgaatgccaggaccctgacacttgcagtcagttgtgcgtgaatctggagggaggttacaagtgccagtgcgaggaaggtttccagctggatccacacacgaaagcttgcaaggcggtagggagtattgcgtacctctttttcactaaccggcacgaggtgagaaaaatgacactcgatcggagtgaatacacgtctctgataccaaatttgaggaacgttgtggccttagacactgaggttgctagcaaccgcatttattggtccgatctttcacagcgcatgatctgcagtacccaacttgaccgggcccatggcgtctcctcttacgacacagtaatctcaagggatatacaggcccccgacggcctcgctgtggactggattcactccaatatctactggacggactccgttctcggcactgtgtctgtcgcggatacgaagggggtaaaacgcaagacgctattcagagagaacggatcgaagccgcgggccatagtggtcgaccctgtgcacgggttcatgtactggactgactggggaacccctgccaaaatcaagaagggtggtcttaatggtgtggacatttatagcttggttacggagaatatccagtggccaaacggcatcactcttgatctgttgtctgggcgcctatattgggtcgattccaagctccattcgatctcctccatagacgtgaatggaggaaatcggaaaactatcctcgaagatgaaaagcgcctggctcaccctttttccttggccgtgtttgaggataaggtattctggaccgatatcattaatgaggctatttttagcgcaaacaggcttactgggtcagatgtgaatttgctggcagagaatcttttgtctccagaggacatggtactcttccacaatctgacccagcctcggggagtgaattggtgcgagcgcacgaccttgtccaacggcggctgccaatacctctgcttacccgctcctcagatcaatccacacagcccaaaattcacctgtgcttgtccggatggtatgctcctcgcacgggacatgcgtagctgtctaactgaagcagaggctgccgtcgccacccaagagacctccacagttaggctgaaagttagcagtaccgccgtcagaacacagcataccacaacacgaccagtgcccgatacttcaagacttccaggggccacccccggactaacaacagttgagatagttacaatgtcacaccaagccctgggtgacgtggccggccgcggtaatgagaaaaagcctagttccgttcgggcactgtccatagtcctcccaattgtgctactggtgttcctgtgtcttggcgtgtttcttctgtggaagaattggaggcttaaaaacattaatagcattaactttgacaacccagtctatcagaaaactacggaagatgaggtgcacatttgccacaaccaggacggatactcttaccctagccgccagatggtctctcttgaagacgacgtggcc

SEQ ID NO: 16303 - DNA, 2580 bp, synthetic construct
  misc_feature 1..2580: note = source = /note="Description of Artificial Sequence: Synthetic coding sequence"
  source 1..2580: mol_type = other DNA
atgggcccatggggttggaagttacgatggaccgtggcgctgctgctcgcagccgccggcactgcagtaggagataggtgcgaaaggaacgaattccaatgtcaggacggcaagtgcatttcatataaatgggtgtgtgacgggagtgctgagtgccaggacggctccgatgagagccaggagacatgtctgtcagtgacctgcaaatcgggagattttagctgcggtggcagagttaaccgatgtatcccacagttctggcgatgtgacggccaggtggattgtgacaacggttcagatgagcagggatgccctccgaaaacctgttcccaggatgagttcaggtgccacgatgggaagtgcataagtcgccaattcgtgtgtgactccgaccgcgattgcttagacggcagcgatgaggcatcctgccctgtgctgacttgtggacccgccagttttcaatgcaattcttcgacttgtattccacagctgtgggcctgcgacaatgatccagattgtgaggatgggtcggatgagtggccacagcgatgtcgaggactatacgtctttcaaggcgacagctcaccctgttccgctttcgaatttcattgcctctcgggtgaatgtattcatagctcctggcgctgcgacggcgggcccgactgtaaggacaagtcagacgaggaaaattgtgcagtcgcaacttgcaggcccgacgagttccagtgctccgacggcaactgcattcacgggtcacggcagtgtgatcgagagtacgactgcaaggacatgtccgatgaagtcggctgcgtgaatgtgactttgtgcgagggccccaacaaatttaagtgtcacagtggcgaatgcattaccctggacaaagtctgcaacatggcaagggactgtcgagactggtcagatgaaccaataaaagaatgcggaaccaatgcatgcttggataacaatggggggtgcagccacgtgtgtaatgacctcaaaatcggatatgaatgcctctgtccagatggtttccagctggtggcacagaggaggtgcgaagatattgacgagtgccaggacccagacacttgctcccaactgtgcgttaacctggaaggcggatacaaatgtcagtgtgaagagggcttccagctagatccgcacaccaaggcttgcaaggcagtgggctcaatcgcttacctctttttcacaaaccgtcatgaggtccggaagatgacactggacaggagcgaatatacctcattgattcctaatctgagaaacgtcgtggctctcgacacagaagtcgcaagcaatcggatctactggtccgatctttctcagcgaatgatatgtagtacgcagctggatagagcacacggtgtgtcctcctatgatacggtgatatcccgagacatccaagcgcccgatggccttgccgtggattggattcactctaacatctactggacagactccgtcctggggacggtttctgtcgcagacactaagggtgttaaaagaaagaccctcttcagagagaacgggagtaaacccagagcgattgttgtcgatcccgtccatggcttcatgtattggaccgactggggcacgccagccaagattaaaaaaggcggattgaatggtgtagatatttattccctggttaccgagaacattcagtggcccaacggcataactctggacctacttagtgggagactttattgggtcgactctaagctgcacagcattagtagcatagacgtcaacggaggtaacagaaaaacaatcttagaagatgaaaagaggctggcccacccattcagcctcgcggtgttcgaagacaaggtcttttggaccgacatcattaatgaagcgattttttctgccaatagactcacgggctcagacgtgaacctcctggctgagaatcttctatcccctgaggacatggtgctcttccacaacctaactcagccgaggggtgtgaattggtgcgaacgtacaacgctcagcaatggcggatgccagtatctttgtttgcccgcgccacagatcaatccacattcacccaagtttacctgtgcttgtcctgatggaatgctcctagcaagggacatgcggtcttgcctgacagaagccgaagccgctgtggctactcaggaaacctctactgtgagattgaaggtctcatccaccgctgttaggacacaacacacaacaacgcggccggtgccagacacaagcagactccccggagctacgcccgggcttacgactgtagagatcgtgaccatgtctcaccaagctctgggagatgtggcgggcagagggaacgaaaagaagcccagcagtgtaagagcgttgagtattgtcctgcccatcgtgctgttagtttttctctgcctgggagtcttcctgctgtggaaaaattggaggcttaaaaatattaatagtataaacttcgataaccccgtgtaccagaaaactacggaagacgaagtccacatctgtcacaaccaggacggatacagctacccctcaagacagatggtatccctcgaagatgatgtcgcc

SEQ ID NO: 16304 - DNA, 2580 bp, synthetic construct
  misc_feature 1..2580: note = source = /note="Description of Artificial Sequence: Synthetic coding sequence"
  source 1..2580: mol_type = other DNA
atgggaccatgggggtggaagctgaggtggaccgtcgccctcctgcttgccgcggcggggactgcggtgggtgaccggtgtgagcgcaacgaatttcaatgccaggacggaaagtgtatctcgtacaagtgggtctgcgacggatccgcggaatgccaagacggaagcgacgaatcccaagaaacgtgtttgagcgtgacctgtaagtcgggagacttttcatgcgggggtagagtgaaccgctgtatcccacagttttggaggtgcgacggacaggtcgattgtgacaacggttcggacgaacaaggttgcccacctaagacctgttcgcaggacgaattcagatgccacgacgggaagtgtatctcacggcaattcgtttgcgactcagatagagactgcctcgacggatccgatgaggcctcgtgtcccgtgctcacttgcggaccggcttcattccaatgtaactcgtccacctgcatcccgcaactgtgggcgtgcgataacgacccagactgtgaagatggttctgatgagtggcctcagcgctgcagaggcctttacgtctttcagggcgactccagcccctgctcggcctttgagttccactgtctgtcgggtgagtgcatccattcgtcatggcggtgcgatgggggtccggactgtaaggacaagtcggatgaggagaattgcgccgtggcgacctgccgcccagatgagttccaatgctcggacgggaactgcattcatgggtcgcgccagtgcgaccgcgaatacgattgtaaggatatgtccgacgaagtgggctgtgtcaacgtgaccttgtgtgaaggcccaaacaaattcaagtgccatagcggagagtgcatcactctcgacaaagtgtgcaatatggctcgggactgccgggactggagcgacgaaccgattaaagagtgcggaactaatgcgtgccttgataacaacggaggctgcagccacgtttgcaacgacctgaaaattgggtacgagtgtctgtgtccggatggattccagctggtcgctcaacggcggtgcgaggacattgacgagtgtcaggatcccgacacctgctcgcagctgtgcgtgaacttggaaggaggatacaaatgtcaatgtgaagaaggtttccagctggacccccatactaaggcatgcaaagcagtcgggagtatcgcgtacttgtttttcaccaacagacatgaggtccggaaaatgaccctggaccggtcggagtacacctccctcatccctaacctgaggaacgttgtggcccttgatactgaggtcgcatccaatcgtatctactggagcgaccttagccaacggatgatttgctctacccagctggacagagcgcacggcgtgtcatcgtacgataccgtgatctccagagatatccaggccccggacggattggccgtggactggattcatagcaatatctactggaccgactcggtcctggggaccgtgtctgtggcggatactaagggagtgaagcgcaagactctcttcagagaaaacggatcgaaaccgcgcgctatcgtcgtggaccctgtgcacggcttcatgtactggactgattgggggactccggcgaagatcaagaaaggggggctcaacggagtcgatatctactccctggtgaccgagaacattcaatggccgaacggtatcactctggatctgcttagcggccgcctctactgggtcgactcgaagctccatagcatctcctccatcgatgtgaacgggggaaatagaaagactatcctggaggacgaaaagcggctcgcccatccgttctcgctggccgttttcgaagataaagtgttctggactgacatcatcaacgaagccatcttcagcgcaaaccgccttactggttcggacgtgaacctgctggcggaaaacctgctctcgcctgaagatatggtcctctttcataatctgacgcaaccaaggggagtgaactggtgcgagagaaccactctgtctaacggcggatgccagtacctgtgcctgccagctccgcaaatcaacccgcattccccgaagttcacttgcgcttgcccggacggaatgctgctggcccgggacatgcgctcgtgcctgactgaggccgaggcggctgtggccacgcaggaaacctccaccgtgcgcctgaaggtgtcgtcgaccgcagtgagaacccagcacaccaccacgcgccccgttcccgacaccagccggctgccgggtgcaaccccgggtctgactactgtggagatcgtcactatgtcccatcaggctctgggagacgtggccggaaggggaaacgagaagaaaccttcgtccgtgagggcactgtcaattgtgctccctatcgtgctcctggtgttcctctgcctgggagtgtttttgctttggaagaattggcgccttaagaatatcaattccatcaattttgataaccccgtgtatcaaaaaactactgaggacgaggtgcacatctgccacaaccaagatggctactcctacccatcccgccagatggtgtcgcttgaagatgatgttgcc

SEQ ID NO: 16305 - DNA, 2580 bp, synthetic construct
  misc_feature 1..2580: note = source = /note="Description of Artificial Sequence: Synthetic coding sequence"
  source 1..2580: mol_type = other DNA
atgggtccatggggctggaagctccggtggaccgtggccctgctcctggcagccgccgggaccgccgtcggagatagatgcgaaaggaacgagttccagtgtcaagatggcaagtgtattagttacaagtgggtgtgcgacggatccgcagagtgtcaagacggctcagacgaaagccaggagacttgccttagcgtgacctgcaagtctggagactttagctgcggaggaagagtcaaccgctgcatcccacagttctggcggtgcgatggccaagttgactgtgataacggaagtgacgagcagggatgccccccaaagacttgctctcaggacgaattcaggtgtcatgacggaaagtgcatctcaagacagttcgtctgcgatagtgaccgcgattgtctggatggcagtgacgaggcaagctgcccagtgcttacatgcggcccagcttctttccagtgcaattccagcacctgcattcctcagctctgggcttgtgacaacgatcccgactgcgaagatggaagtgatgagtggccccagcggtgtaggggcctgtacgttttccagggcgactcgagcccatgtagcgcctttgagtttcactgtctgtccggtgagtgcattcactcttcctggcgatgcgacggcggccccgattgcaaagataagtctgatgaggagaattgcgctgtggctacatgtcgccctgatgagtttcagtgctctgacgggaattgtatccacggaagtagacagtgtgaccgggaatacgactgtaaggacatgagcgacgaagtcgggtgtgtgaatgtgacgctgtgcgaaggtcctaataagttcaagtgtcacagcggagagtgcatcacactcgataaggtctgcaacatggcacgtgattgcagagattggtccgacgagccgatcaaagagtgcggtactaacgaatgcctggataataacggaggatgtagtcacgtgtgcaatgatctgaagattggcgccgagtgcctgtgtccggacgggttccagctcgtggcgcagaggaggtgtgaggacattgacgaatgccaggaccctgatacctgttcacaactatgcgtgaacttggaaggcggttataaatgtcaatgtgaggaggggtttcagctggatcctcacaccaaggcctgcaaagccgtcggatctatcgcatatctctttttcaccaaccgccatgaagtaaggaagatgacactcgataggagtgaatatacaagtctgatcccgaatctgagaaacgtagtcgccctggacaccgaagtggcatccaatcggatatactggtctgatctgtctcagcgcatgatctgcagcactcagttggacagggctcacggcgtatctagctacgacacagtaatctcacgcgatattcaagcgcccgatggcttggcagttgactggatccacagtaacatctactggaccgattccgtgttgggaacagtgtcagtggccgacaccaaaggagtgaaaaggaagacattattccgcgagaatggcagcaagccaagagcgattgtggtggacccggtgcatggattcatgtactggaccgactggggaactcctgcaaaaattaagaagggtggcctgaatggcgtggatatctacagtctggtgacggagaacatccagtggcccaatggtattacgctggatctgctaagtggaaggctgtactgggttgatagcaagctgcactctatctccagcatcgacgtcaacggaggaaatcggaaaacaattttggaggatgagaagcgcttggcccatcccttcagcctggcagtgttcgaagataaggtgttctggacggatatcattaacgaagcgatcttcagcgccaacagactcactggcagcgatgtgaatttgctcgccgagaatctcttgtccccagaagatatggtcctgttccataacctgacacagccacgcggggtaaactggtgtgagagaaccacactctccaacggcggttgccagtatctgtgcttgcctgcccctcaaattaacccacacagtccaaagtttacctgtgcctgcccagatgggatgctgcttgcccgggatatgagaagctgcctgaccgaggcagaagccgcagtagcgacccaggagacaagtaccgtgagactgaaagtgtcatcaacagccgtccgcacacagcataccaccactagacctgtccccgatacaagtaggctgcctggagccacccccgggctgaccacagtcgagatcgtgactatgtctcaccaggcactgggagacgttgctggacgcggtaatgagaagaagccctcttctgtgagggctcttagcatagtcttgccgatcgttctgttggtgtttctctgtctgggtgtgttcctcttatggaaaaactggaggctgaagaatataaacagcattaatttcgacaacccagtctatcagaagacaactgaggacgaagtgcacatttgccataaccaagacgggtacagttacccaagcaggcaaatggtatctctcgaagacgacgttgcc

SEQ ID NO: 16306 - DNA, 2580 bp, synthetic construct
  misc_feature 1..2580: note = source = /note="Description of Artificial Sequence: Synthetic coding sequence"
  source 1..2580: mol_type = other DNA
atgggcccatgggggtggaagctcaggtggaccgtggcactgctgctggctgcagccggcacggctgtgggcgatagatgtgaacggaatgaatttcagtgccaggatgggaagtgtatcagctacaagtgggtgtgcgacggatcagcggaatgccaagacggcagcgacgaatcgcaggagacttgcttgtccgtcacctgcaagtccggtgacttttcgtgcggaggtcgagtcaatcggtgtatcccacaattctggcgctgcgatggtcaggttgattgcgacaacggatccgatgaacaaggatgcccgccaaaaacttgctcacaggatgaatttcggtgtcatgacgggaaatgcatctcacggcagttcgtgtgtgacagcgatcgggattgtctcgatggctctgacgaggcatcgtgtccggtcctcacctgcgggcccgcgtcattccagtgcaactcctccacctgtattcctcagctttgggcctgcgataacgatcccgattgtgaggacggttctgacgaatggccacaacggtgcaggggcctgtacgtgttccagggagactcctcaccgtgttccgcattcgaattccattgcctgtcaggcgagtgcatccactcctcctggagatgtgacggaggccctgactgcaaagacaaatccgacgaggagaattgcgctgttgcgacttgtaggccagatgaattccagtgctcggatggcaactgcatccacggttcgaggcagtgcgaccgcgagtacgattgcaaggacatgtcggatgaggtgggatgcgtgaatgtgaccctctgcgaaggcccgaataagttcaagtgccattccggagaatgcataacgctggacaaagtgtgcaacatggcgcgggattgccgggactggtccgacgaaccaatcaaggagtgcggaaccaatgagtgcctggataacaacggggggtgttcacacgtgtgcaacgacttgaaaatcggagcagaatgcttgtgtccagacgggttccaactggtcgcgcaacgccggtgtgaagatatcgatgaatgccaggatccggatacctgttcccagctgtgcgtgaacctcgaggggggctacaagtgtcaatgcgaggaaggattccaactcgacccacataccaaggcgtgtaaggcggtgggctccatcgcctacctgttctttactaatagacacgaggtgcggaagatgaccctggaccgatcagagtacacctcactgatccctaatctgcggaacgtggtcgcactggataccgaggtcgcttccaaccgcatatactggagcgacctctctcagcgcatgatctgctcgactcagctggaccgggcgcacggagtctccagctacgacactgtgatttccagagacattcaggcaccggacggtcttgccgtggattggatccacagcaatatctactggacggactcggttctgggcactgtgtcagtggcggacaccaaaggagtgaagcggaaaaccttgtttagagaaaatggatctaagcctcgggcgatcgtggtggatccagtccatggattcatgtactggactgactggggaactccagcgaagatcaaaaagggcggcctgaatggagtggacatttactcgctggttactgagaacattcagtggccgaacggtatcactttggatctgctgtcggggagactgtattgggtggactccaagctccatagcatctcgtcgattgacgtgaatggaggcaatagaaagactatcctggaggatgaaaagcgcctggcccacccgttctccctggcagtctttgaagataaggttttctggaccgacatcatcaacgaagcgatcttctcggccaatcggctgactggaagcgacgtgaacctccttgcagaaaacttgctgagccctgaggatatggtgctgttccacaatctgacccagccgcgtggtgtcaactggtgcgaaagaaccaccctgtcgaatggaggctgccaatacctctgcttgcctgccccccaaatcaatcctcacagtcccaagttcacttgcgcctgtcctgacggcatgctgctcgctcgagacatgcgctcgtgcctgaccgaagcagaagccgccgtggccacccaggaaacctcgactgtccggctcaaagtctcgtccaccgcagtgagaacccagcacactactacgcggccggttcctgacactagccggctcccgggggcgactcctgggctcaccactgtggaaatcgtgacgatgtcgcatcaagccctgggagacgtggctggtcgcggtaatgagaaaaagccgtcctcggtgcgcgcgctgtcaatcgtgttgccgatcgtcttgttggtgttcctttgtctgggggtctttcttctgtggaaaaactggcggctgaagaatatcaattcgatcaactttgacaatccagtctaccaaaagactaccgaggacgaggtgcatatctgccataatcaggacggctactcctacccgtcccgacagatggtgtcgctcgaagatgatgtggca

SEQ ID NO: 16307 - DNA, 2580 bp, synthetic construct
  misc_feature 1..2580: note = source = /note="Description of Artificial Sequence: Synthetic coding sequence"
  source 1..2580: mol_type = other DNA
atggggccctggggctggaagctgagatggaccgtggcgctgctgttggctgcagcaggcactgccgtgggtgatcgctgcgaacggaacgagtttcagtgccaagacgggaaatgtatctcctataaatgggtgtgtgacggttccgccgagtgccaggatggttcggacgagtcgcaggagacatgcctgagcgtcacctgcaaaagtggtgatttctcctgtggaggtcgggttaaccgttgtatcccacagttctggcgatgcgacgggcaggtcgactgcgacaatggttcagacgaacaaggatgcccacccaagacttgttctcaagatgaatttcggtgtcatgacggcaagtgtatttcccgacaattcgtgtgcgattctgacagggactgtttagacggctccgatgaggcttcctgccctgtactgacgtgcgggcccgcgagctttcaatgtaactccagcacttgtattccccagctctgggcatgcgacaatgaccccgattgtgaggacggcagcgacgaatggccccagagatgcagaggactgtatgtcttccagggagattcgagtccgtgttctgcctttgagtttcattgcctttctggcgaatgtatccattcatcgtggaggtgtgacggcgggcccgactgtaaagataaatccgacgaggaaaattgcgccgtggccacatgtcgcccggatgagtttcaatgtagcgacggtaattgtatacacgggagccggcagtgcgatcgggagtacgactgcaaagacatgagcgacgaggtgggatgcgtgaatgtgactctctgtgagggcccaaataagtttaagtgccacagtggagaatgtattactctggataaggtgtgtaacatggctagagactgcagggattggagcgacgagccaatcaaggaatgtggcaccaatgaatgtctggacaacaacggtggctgcagccatgtatgcaacgacctcaaaattggggccgagtgcctgtgccctgacgggtttcagctcgtggcccagagacgttgtgaggatatcgacgaatgtcaggacccagacacctgttctcaactttgcgtgaatctcgagggcggatataagtgccagtgcgaagagggatttcagctcgacccacacactaaggcctgtaaggctgtgggaagcatcgcatatttgtttttcactaataggcatgaggtacgcaagatgaccctcgataggtctgaatatacaagcttgatccccaacttaagaaacgtagtggccctggacaccgaggttgcaagtaaccggatatactggtctgacttaagccagcggatgatatgtagcactcagctggatagagcgcatggggtgagctcctatgataccgtcatcagccgtgacatacaggctccggacgggctggccgtggactggattcattctaacatttactggaccgattcggtcctgggtactgtgtccgtagccgacaccaagggcgtgaaaaggaaaacgcttttcagagaaaatggttccaagcctagggccatcgtagtcgaccctgtgcatgggttcatgtactggaccgactgggggacgccggctaaaattaaaaaaggcgggctgaatggtgtagacatctacagtctggtgaccgaaaacatccagtggccgaatggaattaccctggatctgctgagcgggaggctgtactgggtggactccaagttgcactccatctccagtatagacgtcaatggcgggaatcgaaagactatcctggaggacgagaagaggctggcccatccttttagcctggcagtgtttgaagacaaagtcttttggactgatattatcaatgaagcaatattttctgccaaccgtctcacgggtagcgacgttaatctcctcgctgagaacttgctgagccccgaagatatggtgctgttccacaacctgactcagccccgcggggtcaactggtgcgaaaggacgacactgtcaaatgggggatgccagtatctgtgcctgccggcacctcaaataaatccccatagtcctaaattcacctgcgcctgcccggatggcatgctactggcaagagacatgcgctcatgtctgacagaagctgaagctgccgtcgccacccaggagacctctactgtgagactaaaggtgagttcaactgcggtccggacccagcacactactacacggcccgtgccagacacaagcagacttcccggagcgactccggggctaacaaccgtggagatcgtgaccatgagccaccaagccctgggcgacgtggcaggccgcgggaacgagaaaaagccaagttccgttagggctctgtctatcgtgcttcctattgttttgttggtcttcttatgcctgggcgttttcctcctctggaagaactggagactgaaaaacataaattcaatcaatttcgacaatcctgtatatcaaaaaactactgaggatgaagtgcatatctgccacaatcaggatggatattcgtaccctagtcggcaaatggtgtctctcgaagacgatgtcgcc

SEQ ID NO: 16308 - DNA, 2580 bp, synthetic construct
  misc_feature 1..2580: note = source = /note="Description of Artificial Sequence: Synthetic coding sequence"
  source 1..2580: mol_type = other DNA
atggggccgtggggttggaaacttagatggactgttgcccttctcctggcggcagcaggcaccgccgtcggagatcggtgtgaacgcaacgagttccagtgccaggacgggaagtgcatctcgtacaagtgggtctgcgacggttccgcggaatgtcaagatgggagcgacgagtcccaagaaacctgtctttcagtcacgtgcaagtccggtgatttttcctgcggcgggagggtcaatcggtgtattcctcaattttggcgctgtgatggacaagtcgattgtgacaatggatcggatgaacagggctgtccacctaagacttgttcccaagatgagtttaggtgccatgatggaaagtgtattagcagacaattcgtctgtgattcggacagagattgtctggacgggtcagatgaagcctcgtgtcccgtcctcacttgtgggccagcgtcgtttcagtgcaatagctccacctgcattccgcaactctgggcatgtgataatgatcccgattgcgaagatggttccgacgagtggccgcaacggtgtcgcggactgtacgtgtttcaaggagatagcagcccatgctcagcctttgaattccattgtctgtcaggagagtgtatacattccagctggcgatgtgatggggggccagactgtaaggataagagcgatgaagaaaactgcgcagtggcaacttgtcggccggatgaatttcaatgttctgatggtaactgtatccacggctcgcggcaatgcgatcgcgaatatgattgtaaggacatgtccgatgaggtgggatgtgtcaatgtgacgctttgcgagggtcctaacaagtttaagtgtcattcgggcgaatgtattaccttggacaaggtctgcaatatggctcgcgattgtagagattggtcggacgaaccaattaaggaatgcggcaccaatgagtgtctcgataacaatggtggttgttcccatgtctgcaatgatttgaaaataggggcagagtgtctctgccccgacggattccagctcgtggcccaacgacggtgtgaagatatagacgagtgccaggaccccgatacttgctcccaactgtgcgtgaaccttgaagggggatacaagtgccagtgtgaggaaggctttcaactggatccccacaccaaagcatgcaaggccgtgggctccatcgcttacctgttcttcactaatagacacgaagtcagaaaaatgaccctggatcggtccgaatacacctcccttattcccaatctgcgaaatgtggtggcgctcgataccgaggtcgcatccaaccgtatatactggtccgatctttcacagagaatgatctgctccactcaacttgacagagcgcatggagtgtcctcatacgataccgtcatttcacgcgatattcaggcacctgacggactggctgtggattggatccactcgaacatatactggacggacagcgtgcttggaacggtgtcggtcgcagacaccaaaggagtgaagcggaaaacgctgttccgggaaaacggtagcaagccaagagccatcgtcgtggacccagtgcacgggttcatgtattggactgattggggcaccccagcaaagattaagaagggaggcctgaatggggtggatatctactccctcgtgactgaaaacatccaatggcctaatggaattaccctggaccttttgtccggccggctttactgggtggatagcaaactccactcgattagctcaattgatgttaatgggggtaaccgtaagacgattctggaagatgagaagcgactggcccatccgttttcactcgctgtgtttgaagataaggtgttttggactgacatcatcaacgaagcaatattcagcgccaaccgactgaccggaagcgatgtgaatctcctggccgagaacctgttgtcgccagaagatatggtgctgttccataacctgactcaacctaggggagtgaactggtgtgagcgcaccactcttagcaacggaggctgccagtatctgtgcctgcctgcaccacagatcaaccctcatagcccaaaattcacttgtgcctgcccggatggaatgcttttggcacgcgacatgaggtcttgcctgaccgaagcagaagcagcggtggcaactcaggagacttccaccgttcgactgaaagtgtcgtcaaccgcagtgaggacccagcatactactaccagacccgtgcctgatacctcgcgacttccgggagccaccccagggctcacgacggtcgagattgtgaccatgagccatcaagcgctcggtgatgtcgcaggcaggggaaacgagaagaagccaagctccgtgcgcgcactcagcattgtcctgcctatagtgctgcttgtgtttctgtgtttgggagtgtttctgctgtggaaaaactggagactgaaaaacatcaattcaatcaacttcgacaaccccgtgtaccaaaagactaccgaggatgaagttcacatttgccataaccaagatggatactcgtacccctccagacagatggtgtcccttgaagatgatgtcgca

SEQ ID NO: 16309 - DNA, 2580 bp, synthetic construct
  misc_feature 1..2580: note = source = /note="Description of Artificial Sequence: Synthetic coding sequence"
  source 1..2580: mol_type = other DNA
atgggcccttggggatggaagctccggtggaccgttgcactgctgcttgctgcggccggaaccgcggtgggagaccggtgtgaacgcaatgagtttcagtgccaggatggcaagtgtatttcttacaaatgggtgtgcgacgggtctgctgaatgccaggatggctccgacgagagccaggagacctgcttgagcgtgacatgtaagagtggtgatttttcctgtggagggagggtaaaccggtgtattcctcagttttggcggtgcgacggtcaagtggattgcgacaacggtagcgacgagcagggttgcccgcctaagacctgttctcaggacgagtttaggtgccacgacggcaaatgcattagtcggcagtttgtatgcgactccgaccgcgattgcctggatggctctgacgaggcttcctgccccgttctcacctgcggaccggccagctttcagtgcaatagtagcacctgtatcccacagctgtgggcctgcgataacgaccctgattgtgaagacgggtccgacgagtggcctcagcgttgtcgcggtttgtatgtgtttcagggcgacagtagcccttgttcggcctttgagtttcactgtttaagtggagagtgtatccacagtagctggcggtgcgatggcggtcctgactgtaaggacaagtctgatgaggagaattgcgccgtcgccacctgtcggcccgacgaattccagtgttcagacggaaactgcatccatgggagccgacagtgcgatagagagtacgattgtaaagacatgtcggacgaagttggttgtgtaaacgtgacattatgcgaaggacccaacaagtttaagtgtcatagcggggagtgtatcaccctggacaaagtgtgcaacatggctcgcgattgtcgtgactggagcgacgagccaatcaaggagtgtggaacaaacgagtgtctagataacaacggcggttgctcacatgtgtgcaatgatctcaaaatcggagcggagtgtctgtgccccgatggcttccaattggtggcacaaaggcggtgcgaggatattgacgagtgtcaggaccccgacacctgcagtcaactgtgcgtgaatctggaaggcggctacaagtgccagtgcgaagaggggtttcaattagaccctcacactaaggcctgcaaggccgtgggttcaattgcttacctattttttacaaatagacatgaggtgagaaaaatgacgctcgatcgctcggagtatacctctctgattcccaatttgcggaacgtggtcgccttggacaccgaggtcgccagtaatagaatctattggtccgacctcagccagcgcatgatctgcagcacacagttggaccgagcgcacggcgtgtcttcttatgatacagtgatctctcgcgatatccaggccccggatggactcgccgtggactggatccacagcaacatctactggacagactccgtgctgggaacagtttccgtagccgatactaaaggagtcaagagaaagacactgttccgcgagaatggcagcaagccccgcgccatagtggtagacccggtgcatggattcatgtactggaccgactgggggacgccggctaaaatcaaaaaagggggactcaatggtgtggatatctatagccttgtcacagagaacatccagtggccaaatggaattaccttagacctgctttccggaaggctttattgggtggactccaagctgcactcaataagcagtattgacgtcaacggaggtaacaggaagactattctggaggatgagaagaggctcgcgcaccccttctctcttgccgttttcgaggacaaggtgttttggactgacatcattaatgaggcaatattctccgctaacagactgaccgggtccgatgtgaaccttctcgctgagaacctcttaagtcctgaagacatggttttatttcacaacctcacacagcctcgcggggtgaactggtgtgaaagaaccacgttaagcaatggaggttgccagtatttgtgtttgccagccccacaaatcaatccacattcacccaaatttacttgcgcatgtccagacggaatgctccttgcgagggacatgcgctcctgcttaacggaagctgaggccgccgtcgccacccaagagacatccaccgtcaggctgaaggtgagcagtacggcagtgaggacccagcataccaccacccgtcctgtgcccgatactagtcggctccccggggccaccccaggactgaccacggtggaaatagttactatgagccaccaggccctcggagatgtggctggacggggaaatgaaaagaagccctctagcgtccgcgcactctcaattgtgctgcccatcgtgctcttggtgtttctgtgcctcggcgttttcctgctttggaaaaattggaggctgaagaatatcaattccatcaatttcgacaatcccgtgtaccagaaaaccactgaagatgaagttcatatttgtcacaaccaagatggctactcctacccttccaggcaaatggtctctttggaggacgatgttgct

SEQ ID NO: 16310 - DNA, 2580 bp, synthetic construct
  misc_feature 1..2580: note = source = /note="Description of Artificial Sequence: Synthetic coding sequence"
  source 1..2580: mol_type = other DNA
atgggcccttggggatggaagctgagatggaccgtcgcccttctgcttgccgccgctggaactgccgttggagaccgctgcgagcgcaacgaatttcagtgccaggacggcaaatgcattagctacaagtgggtttgcgacggtagtgctgagtgccaggacggctctgatgagtcccaggagacttgcctctctgtgacttgcaagtccggtgactttagttgcggcggtagagtaaacagatgtatcccacagttttggcgctgcgacggccaagtggactgcgataacggtagcgacgaacagggctgcccccctaagacatgctcccaggatgagttccgttgccacgacggaaaatgcatttccagacaattcgtctgtgatagcgaccgcgactgcttggacggttctgatgaagcatcttgtcctgtgttgacatgcggacctgcttccttccaatgtaactcttctacctgtattccacaactgtgggcatgtgataacgatcctgactgcgaggatggctcagacgaatggccccaaaggtgcaggggtctctatgtgtttcagggagattcttccccatgctctgctttcgaatttcattgtctctccggcgagtgcattcatagctcctggcgttgcgatggcggtcccgattgtaaggacaagtccgacgaggagaactgcgctgtggctacttgccgtccagatgagttccagtgcagcgatggaaactgcatccacggatcccgtcagtgtgacagagaatacgactgtaaagatatgtcagatgaagtcggatgcgtgaatgtgaccctgtgtgagggacctaacaagtttaaatgccacagtggagaatgcatcacactcgacaaggtttgcaacatggcccgtgattgcagagactggtccgacgaacctattaaggagtgcggaaccaatgagtgcctcgacaacaacggcggatgctcacatgtctgtaatgatttgaagatcggtgccgaatgcctgtgtcctgacggctttcaactggtggcacagcgtaggtgcgaggacatcgacgagtgtcaagatccagacacttgctcccagctttgtgtgaatctcgagggaggatataagtgtcagtgtgaggaaggatttcagctcgaccctcatacaaaggcctgcaaggccgtgggatccatcgcctatctcttcttcaccaaccgccacgaagtcaggaagatgacacttgacagatcagagtacacatctctcatccccaacctcagaaacgtggttgcactcgacaccgaggtggccagcaataggatttactggtccgatctgtctcaacgtatgatatgttctactcagctggacagggcacacggcgtgtcctcttacgatacagtgatcagcagggatatccaagctcccgacggccttgcagtcgactggatccacagtaacatctactggactgactctgtgctcggcactgtctctgtcgcagatactaagggagttaagagaaaaaccctctttagggagaatggttctaagccaagagccattgtggtggatcccgtgcacggtttcatgtactggactgactggggaaccccagctaaaattaagaaaggaggcctgaatggtgtggacatctattcactggtaactgagaatatccagtggcctaatggaattacactcgacctcttgagtggcagactgtactgggtcgacagtaaattgcactctatatccagtatcgacgtcaacggcggaaacagaaagaccattttggaggacgaaaagcgcctcgcacaccccttttccctcgccgttttcgaagacaaagtcttttggaccgatatcataaacgaggctattttcagcgctaacaggcttaccggttccgatgtcaatctgctggctgaaaatttgctgagtcctgaggatatggtgctcttccataacttgacccagccacgtggtgttaactggtgcgagcgtaccaccctgtcaaacggtggctgtcagtacctttgcctgcccgcaccacaaattaatcctcacagtcccaaattcacatgtgcatgtcctgacggcatgctgctggcaagggacatgagaagttgtctgaccgaggctgaggctgcagttgccacacaggaaaccagcactgtccgcctcaaagtaagttcaaccgccgtgcgtacccagcacactactaccagaccagtgcccgatacttctcgcctccccggtgctacacccggcctcaccactgtggagattgtcacaatgtcccatcaggccttgggagacgtagctggtaggggaaatgagaagaagcccagctctgtcagagcactcagcatcgttcttcccatcgtcttgctggtctttctgtgcctgggagtctttctgctttggaagaactggcgtcttaaaaacattaactctatcaactttgacaacccagtttaccagaagacaacagaagacgaggtgcatatctgccataaccaggacggctactcctacccatccaggcaaatggtgagcctggaagatgacgtcgct

SEQ ID NO: 16311 - DNA, 2580 bp, synthetic construct
  misc_feature 1..2580: note = source = /note="Description of Artificial Sequence: Synthetic coding sequence"
  source 1..2580: mol_type = other DNA
atgggcccgtgggggtggaagctccggtggactgtggccctgctccttgccgccgcaggaaccgcggtgggggaccggtgtgagcgcaacgaatttcaatgtcaggacggaaagtgcatcagctacaagtgggtgtgcgatggctcggcggaatgccaagacggctctgatgaaagccaggagacttgccttagcgtgacctgcaagtcaggagatttctcgtgtggagggcgcgtgaacagatgtatcccgcagttctggagatgcgatggtcaggtggactgcgataacggatccgacgaacaaggatgccctcctaagacctgctcacaggatgaattccgctgtcatgacgggaagtgcatctcaagacagttcgtctgtgactccgatcgcgattgccttgacggttcggatgaagcgtcctgccccgtgctcacgtgcggaccggcgagctttcagtgcaattcgtccacctgcattccgcaactgtgggcatgtgataatgatccagattgcgaggacggctcggacgagtggcctcagcggtgccggggcctgtacgtgttccagggcgattcctctccgtgctccgccttcgaattccattgcctgtctggggaatgtatccattcgtcatggcgctgtgacggtggaccagactgtaaggataaatcggacgaggaaaactgtgcggtggcgacttgccggccggatgagttccagtgcagcgacggcaactgcatccacggctccaggcaatgtgaccgggagtacgactgcaaggatatgtcggacgaagtggggtgcgtgaatgtcaccctgtgcgaaggccctaacaagtttaaatgccactcaggagagtgcatcactctggacaaggtttgcaatatggctcgagattgcagagattggtcagacgaaccgatcaaagagtgcggaaccaacgaatgcctcgataataacggcggttgttcacatgtgtgtaacgacctgaagataggcgcagagtgcttgtgccctgatggatttcaactcgtcgctcagcgcaggtgcgaggacatcgatgagtgccaggaccctgacacttgtagtcagttgtgcgtgaacttggagggaggatacaagtgccagtgcgaagaaggatttcagctggacccacacaccaaagcatgcaaagcggtgggatccatcgcttacctgttcttcacgaaccgccatgaggtgcgcaagatgacccttgatcgctccgagtatacgtcactcattccgaacctgcggaatgtggtggcactggataccgaagtcgccagcaataggatctattggagcgacctgagccagcgtatgatttgctccactcaattggacagggcccacggagtatccagctacgacactgtgatcagccgcgacatccaggcccctgacgggctggcagtggactggatccacagcaatatctactggacggattcggtgctcgggactgtctcggtggcggacaccaagggagttaaacggaaaaccctcttccgggaaaatggctcaaagccacgggccattgtcgtggacccggtccacggattcatgtactggaccgattggggaaccccagccaagatcaagaaaggaggactgaatggcgtggacatctacagcctggttaccgaaaacatccaatggccgaacggaatcactctcgacctcctctcgggacgactgtactgggtcgactcaaagttgcattctatctcaagcattgacgtgaacggaggaaacagaaagactatccttgaggatgaaaagaggctcgcccatccgttcagcctggccgtgttcgaggacaaagtcttttggaccgacatcatcaacgaagccatcttctccgctaatcgcctcacgggttcggacgtcaacctgctggccgagaacctgctgtcgccagaggacatggtgctgttccacaacctgactcaaccgcggggagtcaactggtgtgagaggactaccctgtcgaatggtggatgtcagtacctgtgcctgccagctccgcaaatcaacccccattccccaaaatttacttgcgcatgccccgatggaatgctgctggcgcgcgacatgcgctcctgcctcactgaagcagaggccgccgtcgcgacccaagaaacctccactgtcagactgaaggtgtcatcgactgctgtccggacccaacacaccaccacccggccggttccggataccagtagattgcccggcgcaaccccggggctgactactgtggaaattgtgactatgtcgcaccaggccttgggcgacgtggcgggtcgcggtaacgaaaagaagccatcgtcggtcagagccctttccatcgtgctcccgatcgtcctgctcgtgttcctttgtctgggagtgttcctgctctggaaaaactggagactgaagaatatcaacagcattaatttcgataaccccgtgtaccaaaagacgactgaagatgaagtgcacatctgccacaatcaggacggctactcctacccatcgcgccagatggtgtccctcgaggacgacgtcgct

SEQ ID NO: 16312 - DNA, 2580 bp, synthetic construct
  misc_feature 1..2580: note = source = /note="Description of Artificial Sequence: Synthetic coding sequence"
  source 1..2580: mol_type = other DNA
atgggcccttgggggtggaaactccgctggacagtcgcactgctcttggcagccgctggtactgctgtgggcgatagatgcgagcggaacgaatttcaatgtcaggatggcaagtgtatttcttacaagtgggtgtgtgacggaagcgctgaatgtcaggatggctccgacgaatcgcaggagacgtgcttgtcggtgacttgcaaaagtggggatttttcctgtggaggtcgtgtcaatcgctgcattccacagttctggcgatgcgacgggcaggttgattgcgataacgggtcggacgaacagggatgcccgcctaaaacatgctctcaggacgagttccggtgccacgacggtaagtgtatcagccgccagtttgtctgcgattcggatagagactgcctcgacgggtcagacgaggcctcctgtcctgtgctgacctgtggaccagccagtttccaatgtaattcctcaacttgcattccccaactgtgggcttgcgataacgatcctgactgcgaggacggctctgatgagtggccccagcgctgccgtggcctctacgtctttcagggggattccagtccatgcagtgcctttgaattccactgtttgagcggggagtgcatccatagttcctggagatgtgacggcgggccagactgtaaggacaagtctgatgaggagaattgtgctgttgccacgtgccgccctgacgaattccagtgttctgacggtaattgcatccacggcagtagacaatgcgatcgggaatatgattgcaaggatatgagtgatgaggtcgggtgtgtgaacgtcacgctgtgcgagggtccaaataaatttaaatgtcattccggcgagtgtattactctggacaaagtgtgcaatatggccagggactgcagggattggtccgacgagccaataaaagaatgcggcactaatgaatgcctggataataacggcggctgttctcatgtgtgtaatgacctgaagatcggcgccgagtgcctgtgtccagacggattccagcttgtggctcaaagacggtgtgaagatatcgatgagtgtcaggacccagatacatgctcacaactttgtgtgaatttggagggcggttataaatgtcaatgcgaagaaggcttccagctcgatccccacaccaaagcctgcaaggccgtgggctccatcgcctacttgttcttcaccaatagacacgaggtgagaaaaatgactctcgatagatctgagtataccagcctcattccgaatctgcggaacgtcgtcgcgttggacacagaggtagccagtaatagaatatattggtcagacttgagtcagaggatgatttgcagtacccagcttgatagagcgcatggagtgagctcctatgacaccgtaatctcacgggacatccaggcgcccgacggtttagccgtggattggatacactctaatatctattggactgatagcgtgttggggacagtgagtgtcgccgatacaaagggggttaagcgaaaaaccctatttcgcgagaacgggagtaagcctagggccatagtagtagatcctgttcacggttttatgtactggaccgactggggaacccctgccaagatcaagaagggagggcttaacggtgtcgacatttactcacttgtcacagaaaacatccaatggccaaatggcatcacgctggacctgctaagcggcaggctgtactgggtggattccaaactccactccatttccagcatagacgtgaatggagggaacagaaaaaccatcctggaagatgagaaacgccttgcacacccgttctcattagcagtctttgaagacaaggttttttggactgacattattaatgaagccatcttttccgccaaccgacttaccggaagcgatgttaacctgcttgcggagaatcttctgagccccgaagacatggtactcttccacaacctgactcagccccgaggggtcaattggtgtgaaaggaccacccttagtaatggaggctgtcagtatctctgcctgccagccccccaaatcaatccacattccccaaagttcacctgcgcatgtcccgatgggatgctcttggctcgggatatgcggagttgcctgaccgaggccgaagcagctgtggctacccaggagacgtcgaccgttaggctgaaggtgtctagtacagccgtgaggacacaacacacaacaacaagaccagtgccagatacatctagattacctggggctacaccaggcttaaccacggtcgaaatcgtgaccatgtcacaccaggctctcggcgacgttgcaggacgcggcaacgaaaaaaagccaagttccgtcagggccctgagcatagtgctgcccattgtgctgcttgtgtttctgtgcctgggcgttttcctgctgtggaaaaactggaggctcaagaatatcaactctattaactttgacaacccagtataccagaagactacagaggatgaagtgcacatctgtcataatcaggacggttactcttatcctagccgccagatggtgagcctggaagatgatgtggct

SEQ ID NO: 16313 - DNA, 2580 bp, synthetic construct
  misc_feature 1..2580: note = source = /note="Description of Artificial Sequence: Synthetic coding sequence"
  source 1..2580: mol_type = other DNA
atgggcccttggggatggaagctccgctggaccgtggccctcctgctcgccgcggctggcaccgccgtgggtgacagatgtgaacggaatgagttccaatgtcaagacggtaagtgcatttcatacaagtgggtgtgcgacgggtcagccgaatgtcaagatggcagcgacgaatcacaggagacgtgtctgtcggtgacctgcaaatcaggcgatttttcctgcggaggacgcgttaaccgctgcattccgcagttctggagatgtgatggccaagtcgactgcgacaacggatcggacgagcaggggtgcccgccgaaaacgtgctcgcaagacgaattccgctgccacgacggaaaatgcatcagcagacagtttgtctgtgattcggaccgggattgcttggatggttccgacgaggcaagttgccctgtgctcacctgtgggccggcatccttccagtgcaactccagcacctgcatcccgcagctgtgggcgtgtgacaacgacccggattgtgaggatggatcggatgagtggccgcaacgttgtcggggattgtacgtgttccaaggcgacagctccccttgctcagctttcgagtttcactgcctctcgggcgagtgcatccattcgtcgtggcgctgcgatggcggcccggactgtaaagataagtccgatgaggagaattgcgcggtggcaacttgtcggccggatgagttccagtgttccgacggaaactgcatccatgggtcccgccagtgcgaccgggaatacgactgcaaggatatgtcagacgaagtcggttgcgtcaatgtgaccctgtgcgagggacccaataagttcaagtgtcactctggagagtgtatcactcttgataaggtgtgcaacatggccagagattgccgcgattggagcgacgaacctattaaggagtgcggaaccaacgagtgcctcgacaataatggaggatgctctcatgtgtgcaacgatctcaagatcggtgccgaatgtctttgtccagacggatttcaactcgttgcgcagagacgctgtgaggacatcgatgaatgccaagatccggacacttgttctcaactgtgtgtgaacttggagggagggtacaaatgccagtgtgaggagggctttcaactggacccacacaccaaagcgtgcaaggcagtggggtccatcgcttatctgttcttcacgaataggcacgaggtgagaaagatgactctggatcgcagtgagtatacgtccctgatcccaaatctgcgcaacgtcgtggctctggacaccgaggtcgcttcaaaccgaatctactggtcggatctctcccagcgtatgatctgctctacccaactcgatagggcccatggagtctcaagctacgacaccgtgatttcccgcgacatccaggcgcccgacggactggccgtcgactggatccactccaacatctattggacggactccgtccttggaactgtcagcgtggcggacactaaaggagtcaagcggaaaaccctgtttcgggaaaacggatccaagcctagagccatcgtggtggaccctgtgcatgggtttatgtactggaccgattggggaaccccagcgaagatcaagaaaggcgggctcaacggagtggacatctactcactggttaccgagaacatccagtggcctaacgggattactctggatctcctgtcaggccgcctgtactgggtggactcgaagctccattcaatctcgtcaatcgatgtgaacggcggcaaccgcaagactatcctggaggacgaaaaacggctggcacaccctttctccctggccgtgtttgaggacaaagtgttctggactgatatcatcaatgaagcgatcttcagcgctaaccggctgaccggatccgatgtgaatctgctcgctgaaaaccttctgtccccagaagatatggtcctgttccacaacctgacccaacctaggggagttaattggtgtgagcgcaccaccctctcaaacggcggttgccagtacctctgtctcccggccccgcagatcaacccgcactccccgaaattcacctgcgcatgcccggacggaatgctgctggccagagacatgcgctcatgcctgaccgaggctgaagctgcagtggccactcaggaaacttcaacggtccggctgaaggtttcgagcactgctgtccggacccaacacactactactcgcccagtgccggacacgtcaagacttccgggagcaactccgggcctgactactgtcgagatcgtgaccatgtcacaccaagccctgggcgacgtggcaggtaggggcaatgaaaagaaaccgtcctccgtgcgggcgctgagcatcgtcctccctatcgtgcttctggtgttcctctgtctgggagtgttcctcttgtggaaaaactggcgcctgaagaacatcaattctatcaacttcgataacccggtgtaccagaaaaccaccgaggacgaagttcatatctgtcacaatcaggacggatacagctacccgtcgcggcagatggtgtcactggaagatgacgtcgca

SEQ ID NO: 16314 - DNA, 2580 bp, synthetic construct
  misc_feature 1..2580: note = source = /note="Description of Artificial Sequence: Synthetic coding sequence"
  source 1..2580: mol_type = other DNA
atggggccgtggggttggaagctgcggtggaccgttgcactgctgctcgcggcggctgggactgcagtgggagatcgttgtgagcggaacgagttccagtgtcaggacggcaaatgtatttcttataagtgggtatgtgacggtagcgccgaatgtcaggatggctccgatgaaagtcaggaaacatgcctgtcagttacatgtaagagtggggatttctcttgtggggggcgtgttaatcggtgcatacctcaattttggcggtgcgacggacaggtcgattgcgacaacgggagcgacgagcagggatgtccccccaagacttgttctcaggatgagttcaggtgtcacgacggcaagtgcatttcccgccagttcgtttgcgattccgatcgagactgcttggacggctcagatgaagcgagctgtcctgtgctcacctgcgggccggcttcattccagtgtaactcgagcacctgtattccccagctctgggcgtgcgacaacgatcccgactgtgaagacgggagtgacgagtggccccagcgttgcaggggcctttacgtatttcaaggcgattcatctccttgttctgccttcgaatttcattgtcttagtggtgagtgcatccattcatcttggcggtgtgacgggggccccgactgtaaggacaagagtgatgaggagaattgtgcggtggccacctgtcggcccgacgagttccaatgtagcgatggaaattgtatccacgggagcaggcagtgtgacagagaatatgactgcaaggacatgagtgatgaggttggatgtgttaacgtcacgctttgcgaaggtcccaacaaatttaaatgccattccggcgaatgcattacactcgataaggtgtgtaatatggctcgggactgccgggactggtctgacgaacccattaaagagtgcggtactaatgagtgtttggacaacaacggaggttgctcgcacgtgtgtaatgacctcaaaatcggcgctgaatgtctttgtcccgacggcttccagctggttgcacagaggcgatgtgaggatattgatgagtgccaggatccggacacctgttcccaactttgcgtcaacctggagggaggctacaagtgccaatgcgaagaaggttttcagctcgatcctcataccaaggcttgcaaggcggtaggtagtattgcatacctgttctttactaatcgccacgaggtgagaaaaatgacacttgacagatcagagtacacctctctcattcctaatctgcgcaacgtggtggctctggatacagaagtcgccagcaacaggatctactggtctgacctgtcgcagagaatgatctgctcgactcagcttgaccgtgctcacggggttagctcctacgacacagtcatctcacgagatatccaggcccccgacggtttagctgtggattggattcacagcaacatctactggaccgacagcgtattaggaacggttagcgttgctgacactaagggtgtgaagagaaagacccttttccgcgagaacgggagtaagcccagggccatcgtggtcgatcctgttcatggattcatgtactggacagattggggaacccccgccaagatcaaaaagggcggactgaatggggtggatatctattccctggtgacggagaatatccaatggcctaatgggatcactctggacctcctctcaggccgcctctactgggtagacagtaagctacactcaatctcatctatcgatgtgaacgggggtaatcgaaagaccatactcgaagatgaaaagagactagcccacccattttctctggctgtgtttgaagacaaggtgttctggacagatatcattaacgaagctatctttagcgcgaatcggttgactggatcagacgtcaatctcctggcggagaatttgctgtcgccggaggatatggtactcttccacaaccttacacagcctagaggtgtcaattggtgcgaacggaccaccctttccaatggcggctgccagtacctttgcctgcctgccccccagatcaatccacattccccaaaatttacctgcgcctgtcctgatgggatgctgctcgcaagagacatgaggagctgtttaaccgaagcagaggctgccgtggcgacacaggagacgagcacggtaagactcaaggtttcgagtactgccgtgaggacgcaacatacgacaacacggcccgtccctgatactagccggcttcctggggcaacaccaggactgaccaccgtcgagattgtgacgatgtcacatcaggccctaggggacgtcgccggcagggggaacgagaagaagcccagttccgtgcgggcactttcaatagtgctccctatcgtgctactagtgtttctctgtttgggtgtgtttctgctgtggaaaaactggcgactgaagaacataaactcaatcaattttgataaccccgtctaccagaaaacaaccgaagacgaggttcacatttgccacaatcaggacgggtattcgtacccgagcagacagatggtctccctagaagacgacgtggca

SEQ ID NO: 16315 - DNA, 2580 bp, synthetic construct
  misc_feature 1..2580: note = source = /note="Description of Artificial Sequence: Synthetic coding sequence"
  source 1..2580: mol_type = other DNA
atgggtccgtggggctggaagctccggtggaccgtggctcttcttcttgccgcagccggaactgcggtgggagacaggtgtgaaaggaacgaattccaatgtcaagatggtaaatgtatttcctacaaatgggtctgcgatggcagcgctgaatgtcaagacggatcagatgagtcacaggaaacctgcttgtcagtcacctgtaaatcaggtgatttttcttgcgggggtagggttaatcgctgtatccctcagttttggagatgcgatgggcaagtggattgtgataatggcagcgatgaacaaggttgtcccccgaaaacttgctcgcaagacgagttccgctgtcatgacggaaaatgtatctcgcgtcagttcgtctgtgattccgatagagactgcctggacggatcggatgaggcgtcatgtcctgttctcacttgtgggcctgcttcatttcagtgtaactcgtcgacttgtattccacaactttgggcatgtgacaatgatccggattgcgaagatgggagcgatgagtggccacaaagatgtagaggactttatgtgtttcagggggactcatctccttgcagcgcattcgaatttcactgtctttcaggagagtgcatccactcgagctggcgctgcgacggtggcccagactgtaaagataaaagcgatgaggaaaactgtgcagtggctacttgtcgccctgacgagttccaatgctccgatggaaattgcatccatggatcgagacagtgcgaccgggaatacgactgcaaggatatgagcgatgaagtcggatgtgtcaacgtgactctgtgtgagggccctaacaagtttaagtgccattccggagagtgtattactctcgataaggtttgtaatatggcccgggactgtagggactggtccgacgagcccattaaggaatgtggtactaacgaatgcctcgacaataatggaggttgttcgcatgtgtgtaacgaccttaagattggggcggagtgcctttgtccagacggttttcagctggtggcacaacggaggtgcgaagatattgatgaatgccaggatcctgatacctgctcgcagctttgcgtgaacctcgagggcgggtacaagtgtcaatgtgaagagggatttcagctggatccacataccaaggcatgcaaggccgtggggtcgattgcttacctgtttttcacgaacaggcatgaagtgcgcaagatgacgcttgatcgctcagaatacacgtcgctcattcctaatttgaggaacgtagtcgcacttgatactgaagtggcttccaaccgaatctattggtccgatctctcccaacgaatgatctgctcaactcaacttgatcgggcacatggagtgtcatcgtacgataccgtgatctcacgcgatatccaagcacccgatgggctggcagtggattggattcacagcaatatctactggactgactccgtccttggtaccgtgtccgtcgccgacaccaagggtgtcaagagaaagactctgtttcgcgaaaatggaagcaagccccgagcgattgtggtggatcctgtgcacggatttatgtactggacggattggggtacccctgccaaaatcaagaagggtggactgaatggcgtcgacatatacagcctggtaaccgaaaacatacaatggccgaacggaattaccctggatttgctctcgggcaggctctactgggtggattcgaagctgcatagcattagttcgattgacgtgaacggtgggaaccgtaagaccatactggaggatgagaagcgacttgctcatcctttctccttggcggtttttgaagataaggtgttctggacggacatcattaatgaagcaatcttctccgcaaacagactcacgggatcggacgtcaaccttttggccgaaaatctcctttccccagaagatatggtcttgttccataatctcactcagccgcggggtgtgaattggtgtgaacgaacgaccctgtcaaacggcggatgtcaatacctttgccttccagctccacagattaatccacacagccctaagttcacttgtgcgtgccctgatggaatgcttcttgcaagggatatgcggtcgtgtctgactgaagcagaagccgccgtggcaacccaggagacttccactgtccgcctcaaagtgtcatcaaccgcggtccgaacccagcacaccaccactagacctgtcccagatacctcacggctgccaggagcaacccctgggctgaccaccgtggagattgtgacgatgtcgcaccaggcactgggagatgtggccgggaggggaaacgagaaaaagccttcctccgtacgcgccctgtctatagtgctgcctatcgtccttctcgtgtttctttgtcttggagtgtttctgttgtggaagaattggcgactgaaaaacatcaactcaattaactttgacaacccggtgtaccagaaaacgaccgaggacgaggtccatatctgtcataaccaggacggatactcctaccccagccgtcaaatggtgtcgctcgaggacgatgtggca

SEQ ID NO: 16316 - DNA, 2580 bp, synthetic construct
  misc_feature 1..2580: note = source = /note="Description of Artificial Sequence: Synthetic coding sequence"
  source 1..2580: mol_type = other DNA
atggggccgtgggggtggaaactgcgctggaccgtggctctgctcctcgctgctgcaggcactgcagttggggacaggtgtgagagaaacgaatttcagtgtcaggatgggaagtgcattagttataaatgggtctgcgacggatcggccgaatgtcaggacgggagtgacgagtctcaggagacttgcctgtctgtgacctgcaaatccggcgatttctcatgtgggggacgcgtaaataggtgcatcccacagttctggagatgtgatgggcaggtggactgtgacaacggttccgacgaacagggctgccctcccaaaacgtgctctcaggacgaattcaggtgccacgacgggaaatgtatttctcgccagttcgtgtgtgactcagatcgggattgcctggacgggagcgacgaggcatcttgcccagtcctcacctgcggtcctgcctccttccagtgcaatagttcaacctgcatcccgcagttatgggcctgtgataacgaccccgactgtgaggacggctcggacgagtggccccagaggtgccgggggctgtacgtgttccagggggatagctcgccatgctctgctttcgaattccactgtctctccggagagtgtatccacagctcctggaggtgtgatggtggtcccgactgcaaggataagagcgacgaggagaactgtgctgtggcaacatgccgtcctgacgagttccagtgttctgatggcaattgcatacacggcagtaggcagtgtgacagggagtacgactgcaaagatatgagcgatgaggtcggctgcgtcaatgtgacactgtgtgagggcccgaacaagttcaaatgccattctggggaatgcatcacactggacaaagtgtgcaatatggccagagactgcagggattggtccgatgagcccattaaagagtgcggaaccaatgagtgtctcgataataatgggggttgctcacacgtgtgcaatgacctgaaaattggcgctgagtgcctgtgcccggacgggttccagttagttgcccagcgcagatgcgaagacattgacgaatgtcaggatccagatacatgttcccaactgtgtgtgaacctggagggagggtataaatgccagtgcgaggagggcttccagttggatccacacacaaaggcatgtaaggctgttggaagtatcgcctaccttttttttaccaaccgccacgaagtgagaaagatgactcttgaccgatccgagtatacctcactgattcctaatctgcgaaacgtagtggctctcgacaccgaagtggcatcaaaccgtatctactggagtgatctgtctcagcggatgatttgttcaacacagttggaccgcgcccacggagtttccagctacgacaccgtgattagtcgcgacatccaggcacccgatggtctcgcagttgactggattcactcgaatatctattggacggacagtgtgttggggacagtgtcagtggcggacaccaagggcgtgaagcggaagactttgttccgagagaacgggagcaagccgcgggcaatcgtcgtagatcccgtccatgggtttatgtattggaccgattggggtacaccagccaagattaaaaagggcggcctgaacggcgtggacatctactcccttgttacagaaaatattcagtggcccaacggaatcaccctcgacctactgagcgggcgcctgtattgggtggactccaagctccactcgatctcttccatcgacgtgaacgggggaaacaggaagaccattctcgaagatgagaagagactcgcccatcccttttcccttgcagtttttgaagacaaggtgttttggaccgatatcattaacgaggccatctttagtgctaatagactgaccggctccgatgttaacctgctggcggagaatctgctgtctccagaggacatggtactgttccataatttgacacagcccagaggcgtcaattggtgtgaacgtacgacgctgtctaacggcggctgccagtacctgtgtctacccgctccgcagatcaatcctcatagcccaaaatttacctgtgcatgccctgacggcatgttgctagctagggacatgagatcctgtctgactgaggctgaggcagccgtggctacccaggagacttctacggttcgattaaaggttagctctaccgccgttagaacccagcataccactactcgtccagtgcctgacacatcccggttgcctggagcaactccggggctgactactgtcgagattgtgacaatgagccaccaggccttgggagacgtggccggtaggggaaatgagaaaaagccatcctctgtgagagctctcagcattgtgcttccaatcgtgctgctcgttttcctatgtctcggcgtgttcttactctggaaaaattggaggctgaagaacataaacagtattaacttcgataatcctgtctatcagaaaaccacagaggacgaggtacacatctgccacaatcaagatgggtattcctacccatccagacagatggtgtccttggaagacgatgtggct

SEQ ID NO: 16317 - DNA, 2580 bp, synthetic construct
  misc_feature 1..2580: note = source = /note="Description of Artificial Sequence: Synthetic coding sequence"
  source 1..2580: mol_type = other DNA
atgggtccctggggatggaagcttcgctggactgtcgccttgctgttggctgccgcaggaaccgctgtgggcgataggtgcgagcgcaatgaattccaatgtcaagacggaaaatgtattagctataagtgggtctgtgatggaagtgcggagtgtcaggatggaagcgacgagtcccaggaaacctgcctttctgtaacctgcaaaagcggagatttcagctgcggaggtagagtgaacaggtgcataccacagttttggagatgcgatggccaagtagattgcgacaatggctccgacgagcaaggttgccctccaaaaacctgctcccaggatgaattccgctgtcacgacggtaagtgcatatcacgccaattcgtttgcgatagcgacagagactgtcttgatggatccgacgaagcgtcatgtcccgtgctgacttgtggcccggcgtcttttcagtgcaatagttcaacatgcatcccacaactttgggcatgtgacaacgatccagactgcgaggatggttcagacgaatggccccaacgctgcaggggtctgtacgtattccaaggtgatagttctccttgctcagccttcgaatttcactgtctctctggtgaatgtatacactcctcttggagatgtgacggcggtccagattgcaaggacaaaagcgatgaggagaactgcgcggttgcaacctgccgcccagacgagtttcagtgctccgacggcaactgcattcacggctcaagacagtgtgacagagaatatgattgtaaggacatgagtgatgaggtaggctgcgttaacgttaccctgtgcgaaggtcctaacaaattcaagtgtcactctggcgagtgcattaccctcgataaagtttgcaacatggccagggattgcagggactggagtgacgagcccattaaagagtgcggcactaacgagtgcctggacaacaatggcggatgttcccatgtgtgtaacgacctgaagattggagctgagtgtctctgtcccgatggttttcaactggtcgctcagcgccgctgcgaagacatcgatgagtgtcaggaccccgatacatgctcccagctgtgtgtaaacctcgaaggtggatacaagtgtcaatgcgaggaaggcttccaactcgacccgcacactaaagcctgcaaagctgtgggatcaatcgcttacttgtttttcaccaaccgccacgaggtcaggaagatgaccctggacaggtctgaatacaccagcctgatccccaacctgcgcaacgtcgttgctctggatacggaagttgcatccaataggatttattggagcgatctctcccagagaatgatctgttctactcagctggaccgcgcccacggagtcagtagctacgatactgtcattagtagggatattcaggcgccagatggccttgcagtagattggatccacagcaacatttactggacggactcagttctcggtacagtgtccgtcgccgatactaaaggagttaaacgcaaaactttgtttagagagaacggttctaagcccagggccattgttgtcgaccctgttcacggattcatgtactggacggattggggcactcccgccaagatcaagaagggaggattgaacggagtggatatctacagcctggtcacggagaatatccaatggcccaacggaatcacgctcgacctcctttccggcaggctgtattgggtagatagcaagctgcactccatttctagcatcgatgtcaacggcggtaaccgcaagacgattctcgaagatgagaagcgccttgcccaccctttctccttggccgttttcgaggacaaggtgttttggactgatattatcaacgaagcaatattctccgccaatagactgactggctccgatgtgaatctgctggccgagaacctgctgtctccagaggatatggttctctttcacaacttgacccaacctagaggtgtgaattggtgcgagagaacaaccctgtcaaacggcggttgtcagtatctgtgtctccccgctccacaaattaacccacactccccgaagttcacatgtgcttgtccggatggaatgctgctggcaagagacatgcgcagttgcttgacagaggcggaggcagccgttgccactcaggaaactagcaccgtcagactcaaagtctcatccactgcagtaagaacgcagcacacgaccacccgcccggtcccagacaccagccgcttgcctggcgcgacccctggcctgaccactgtcgaaatcgtgactatgtcccaccaagctctgggagacgtggccggtagaggcaacgaaaagaagccctcttcagtgagagcgctgtctatcgtcctgcccatcgtcctcttggtcttcctttgccttggcgtattcctgctctggaagaactggaggctcaagaacatcaattcaatcaactttgacaaccccgtgtaccagaagactactgaagacgaggttcacatttgtcacaaccaggatggatactcctacccatcaaggcagatggtgagcttggaagacgatgtcgct

SEQ ID NO: 16318 - DNA, 2580 bp, synthetic construct
  misc_feature 1..2580: note = source = /note="Description of Artificial Sequence: Synthetic coding sequence"
  source 1..2580: mol_type = other DNA
atgggtccttggggctggaaactgaggtggacagtcgctcttctgctggccgcagccggtaccgctgtgggcgacagatgcgagaggaatgaatttcagtgtcaggacggaaaatgcatctcctacaaatgggtgtgcgacggctccgccgaatgtcaggatgggtctgacgagtcacaagaaacttgtctgagcgtgacatgcaagtccggagatttctcctgcggtgggcgggtcaaccggtgcatccctcagttttggagatgtgacgggcaagtcgactgtgacaatggaagcgacgaacaggggtgccctcccaagacctgctcccaggatgagttcagatgccacgatggaaagtgcatctcacgccagtttgtttgtgatagcgatcgggattgtcttgacggctcggacgaggcctcttgccccgttcttacatgcggacctgcctctttccaatgtaactcgtctacttgcattcctcagctctgggcctgcgacaatgatccggattgcgaagacggcagcgacgaatggccccagcggtgccgcggtctatacgtctttcagggcgattcatccccatgctccgccttcgaattccactgcctgagcggagagtgcattcattcttcatggcgatgcgacggcggccccgactgcaaagacaagtcagacgaggagaattgcgctgtcgctacttgtaggcctgacgaatttcagtgttccgatgggaactgtatccatgggtctagacagtgcgatagagagtacgactgcaaggatatgagcgacgaggtggggtgtgtaaacgtcactctgtgcgaagggccaaacaagtttaaatgccattcgggagagtgtattactttagacaaagtctgcaacatggcgcgagattgtagggactggtctgacgagcctataaaagagtgtgggactaatgaatgtctcgacaacaacggagggtgtagccacgtgtgtaacgatcttaagatcggggctgaatgtctctgtcccgacgggttccagctcgtggcgcagcgaaggtgcgaggacatcgacgagtgccaagatccagacacctgttcccagctgtgtgttaatctggaggggggatataaatgccagtgtgaagaagggtttcagctcgacccgcataccaaagcctgcaaggctgtcggctcgatcgcttatctgttctttactaacaggcatgaggtgcgcaagatgaccctggacaggtctgaatataccagcctgatcccgaacctgcgcaacgtagtcgctctggacaccgaagtggcaagcaatagaatttattggagtgatctgtctcagcgaatgatctgttcaacccagctcgaccgcgcccatggggtctcttcatatgacaccgtcatctctcgagacattcaggcacccgacggcctcgcagtggactggattcattccaacatatactggactgacagtgtccttggcactgtgagcgtggctgataccaagggtgtgaagcggaagactctctttagggaaaatgggtccaaacctcgggcaatcgtggtggacccagtgcatggctttatgtactggactgattgggggaccccggcaaagatcaagaaaggaggtctgaacggcgtggatatatattccctggtcacagagaatattcagtggcccaacggaattactctggatctcttatcaggccgattgtattgggtggactctaagctgcactcaatttcttcaatcgacgtgaacggcggaaacagaaagaccatcttagaagatgagaaacgtttggcccatccctttagcctggccgtgttcgaggacaaggtgttttggaccgatatcattaatgaggccattttctccgcgaatcgcctgactggaagcgatgtcaaccttctggctgaaaacctcttatcgcctgaggatatggtcctgttccacaatctgacccagccccggggagtgaactggtgtgaacggacaactctatccaacggtggctgtcagtatctctgtctccccgctccccagattaaccctcactccccaaagttcacgtgtgcttgcccagatggcatgctcctggccagggacatgcgctcttgcctcacagaggccgaggcagctgtcgcaacccaggagacgtctactgtccgccttaaagtgtcttctacagcggtacgcacccagcacactaccacacgccccgtgcccgatacatcaaggcttcctggcgccacccccggtctcaccaccgtcgaaatcgtgaccatgtcccaccaggccttgggagatgttgctgggcgtgggaatgaaaagaaaccctcttccgtgcgggcgttgagcatagtacttcccatcgtgttgctcgtgttcctatgcctcggcgtgttcctgctctggaagaactggagactgaaaaacattaactcaatcaatttcgacaatccagtgtaccaaaagaccacagaggatgaggtgcacatctgccataatcaggatggttacagctacccttcaaggcagatggttagcctagaggatgacgtggct

SEQ ID NO: 16319 - DNA, 2580 bp, synthetic construct
  misc_feature 1..2580: note = source = /note="Description of Artificial Sequence: Synthetic coding sequence"
  source 1..2580: mol_type = other DNA
atgggtccttggggctggaagctgaggtggactgtggccctccttctagctgctgccgggaccgccgtgggggaccgatgcgagagaaatgagtttcagtgtcaggatggcaaatgcataagttataagtgggtgtgtgacggcagtgcagaatgccaggatgggtctgatgagagtcaggagacttgcctgtctgtcacctgtaaatctggcgacttttcctgcggcggacgggttaatcgctgcattccacagttctggaggtgtgacggccaggtggattgcgacaacggcagtgacgaacaaggctgtcctcctaagacctgttcacaggatgaatttcggtgccatgacggcaagtgtatctcccgacagttcgtctgcgactcagatcgagattgtctagatggttctgacgaggccagctgccctgtgctgacatgcggcccagcttcattccagtgcaactctagcacatgcattccacagctgtgggcttgcgacaatgacccagactgtgaggacggcagcgacgagtggccacagcgctgccgcggcttgtacgtcttccagggggactcttctccatgctccgcctttgagtttcattgcctctctggggagtgcattcattccagctggcgatgcgatggcggcccagattgcaaggacaagtcagatgaggaaaactgcgccgtcgccacctgcaggcccgacgaatttcagtgcagtgacggcaactgcattcacggctctcgccagtgcgatagggagtacgattgcaaagatatgagtgacgaggtcgggtgtgtgaacgtcactttgtgcgagggccccaataagtttaagtgtcacagtggcgagtgtatcaccctggataaggtgtgtaatatggctagagattgtcgcgactggtctgacgagcccatcaaagaatgcggcacaaacgagtgcctggacaacaacgggggatgctcacacgtctgtaatgacctcaaaatcggcgccgaatgcctgtgcccagacggttttcagctggtcgcccagagacgatgcgaagacattgatgaatgccaagacccagatacctgcagtcaactctgtgttaatctggaaggagggtataaatgtcagtgtgaagaagggtttcagttggacccccataccaaggcctgtaaggcagtcggatctattgcctacctattcttcacaaatcgtcatgaagtgcgcaagatgaccctggacaggagtgagtatacaagtctgattccaaacctacgcaatgtggtggccttagataccgaagtggccagcaatcgcatctactggtccgacctatctcagcgcatgatttgtagtactcagctggacagggctcacggcgtgagtagttacgataccgtcatttccagagatatccaggcccctgacgggctcgctgtggattggattcactctaatatttactggacagactccgtgctaggcaccgtttctgtggcagacacaaaaggcgtcaagaggaaaaccctgtttagagagaatggttccaaaccccgcgctattgtcgtggatccagttcacgggttcatgtactggactgattggggcacccctgctaagattaaaaaaggtggcctgaatggcgtggatatttatagcttagtgaccgagaacatccagtggcctaatggaattacactggacctgctgtctgggcggctgtactgggtcgatagcaagctgcattcaataagctcaatagacgtcaatgggggcaatagaaaaacaatattagaagatgagaagcgccttgcccaccctttttccctcgctgtgtttgaggataaggtgttctggaccgatataataaacgaagctatcttctccgccaacagactgacagggtccgacgtgaacctgctggccgaaaatctgctgtctcctgaggacatggtgctgtttcacaatctgacccaaccccgaggcgtgaactggtgcgaaaggaccacactctccaacgggggctgccagtatctatgtttacccgccccccaaatcaatcctcacagccccaaattcacttgcgcttgccccgacggcatgctgctggctagagatatgcggtcctgtctgactgaagctgaagctgccgtcgctacccaggagactagtaccgtgagactgaaggtgagctctactgcagtgcggactcagcacactacaaccaggcccgtccctgatacctctcgcctgcctggggcaacccccggactaaccacagtggagatcgtgacaatgagccatcaagctctgggggatgttgccgggcgggggaacgaaaagaaaccatcatccgtgcgggccctgtcaatcgttttaccaatcgttttattggtattcctatgcctgggagtgtttctcctgtggaagaattggagactgaaaaatattaatagcatcaactttgacaaccctgtgtatcagaagacaactgaagatgaagtgcatatttgccataaccaagacggctactcatatccttccaggcaaatggtttctctcgaggatgatgtcgcc

SEQ ID NO: 16320 - DNA, 2580 bp, synthetic construct
  misc_feature 1..2580: note = source = /note="Description of Artificial Sequence: Synthetic coding sequence"
  source 1..2580: mol_type = other DNA
atgggtccatgggggtggaagttgagatggaccgtcgcacttcttcttgccgcagccggcactgctgtcggtgatagatgcgaacggaatgaattccagtgtcaggatgggaaatgcattagctacaaatgggtgtgcgatggctcagcggaatgtcaggatggttccgatgagtcgcaagaaacctgcctgtccgtcacctgtaagtccggggatttctcgtgtggagggagagtgaacagatgcatacctcagttttggcgttgtgatggacaggtcgattgtgacaacggaagcgacgaacaagggtgcccccctaagacctgttcacaggatgaatttagatgtcacgatggtaagtgtattagccggcaattcgtgtgtgactcggatcgcgactgtctcgatggttcggacgaagcatcctgtcctgtgcttacttgtggacctgcgtcgtttcagtgtaactcctccacttgtataccccagctctgggcatgcgacaatgatccagattgcgaggatggctccgatgagtggcctcaacgctgccgagggctttacgtgttccagggcgattcgtccccctgctccgcctttgaatttcactgcctttccggcgagtgcatccattcgtcctggagatgcgatggtgggccggattgtaaggataagtccgacgaagaaaactgcgcagtggcaacgtgtcgcccagacgagttccagtgcagcgatggaaactgtattcatggctcgagacaatgtgaccgcgaatacgactgtaaagatatgtcggacgaagtgggatgcgtgaatgtcaccctgtgtgagggccccaacaagttcaaatgtcatagcggtgaatgtataactctggacaaggtgtgcaacatggccagagattgcagagattggtccgatgaaccgatcaaagaatgcggcaccaacgaatgtcttgacaacaatggtggttgttcacacgtttgcaatgatcttaagattggtgcagaatgtctgtgcccagacggatttcaacttgtggcccaaaggagatgcgaggacatcgacgagtgtcaagatcctgatacgtgtagccagctttgtgtcaatctcgaaggcggatacaagtgccaatgtgaggaaggattccaacttgacccccataccaaagcatgcaaggcagtgggatcgattgcctacttgtttttcaccaaccgccacgaagtgcgaaaaatgacgcttgataggtcagaatacacgtcgttgatcccaaacctgcggaatgtggtagcgctggacactgaagtggcctcgaataggatctactggtccgacctgtcccaaaggatgatttgctccactcaactggatagagcccacggagtctcgtcctatgataccgtgatatccagggatatacaggcgccggatggcctggccgtcgattggattcactccaacatatactggacggactctgtgcttggaaccgtgtcggtggcagacactaagggagtcaagagaaaaacgctgtttagagaaaacggctccaaaccacgcgcgattgtggtggatccagtgcacggatttatgtactggacggattgggggactccagctaagatcaaaaagggcggactcaatggtgtggacatttactctctggtcaccgaaaacatacaatggcctaacgggataacgctggatctgctctccggaaggctgtattgggtggacagcaagctgcactcgatttcctctatcgatgtgaacggtggtaacagaaagactatcttggaggatgaaaaacgactggctcatcctttcagcctggcagtgtttgaggataaggttttctggaccgacattatcaacgaagcaatcttttcggcaaatcggctcaccggatcggatgtgaaccttctggcagaaaacttgctttctcccgaggacatggtgctgttccataacctgacccagcctcgtggtgtgaattggtgtgagcgtactactctttcgaacggcggctgtcagtacttgtgccttcctgcccctcaaatcaacccacactcgcctaaattcacttgtgcatgtcctgacggcatgctgcttgccagagatatgagatcgtgtctgactgaagcagaggccgccgtcgccacccaggagactagcaccgtcagactgaaagtgtcgtcaacggcggtgcggacccagcatactactaccagaccagtcccagataccagccgactgccaggggccacccccgggctcaccactgtcgagatcgtcactatgtcccatcaagcacttggtgacgtggccggccgagggaacgagaaaaaaccctcatcggtccgcgcgctgagcattgtcctccctatcgtgctccttgtgtttctttgtcttggagtctttcttctttggaagaattggcggctgaagaacatcaatagcataaactttgacaatccagtctaccaaaagaccactgaggacgaagtccacatttgtcataatcaggatggatactcgtacccaagccggcagatggtcagtctcgaggacgacgtggcg

SEQ ID NO: 16321 - DNA, 2580 bp, synthetic construct
  misc_feature 1..2580: note = source = /note="Description of Artificial Sequence: Synthetic coding sequence"
  source 1..2580: mol_type = other DNA
atgggtccctggggctggaagcttcgctggaccgtcgccttgctacttgccgcagcaggcacggcagtgggagaccggtgtgagcgaaatgaattccagtgtcaggatgggaaatgtatctcctacaagtgggtgtgcgatggaagcgcggagtgccaggacggaagcgacgagagtcaggagacatgcctgtcagtaacctgcaaatcgggagactttagctgcggtggccgtgtaaaccgatgcataccccaattctggcgctgcgatggacaggtggattgcgataatggcagcgatgagcagggatgtcccccaaagacttgctcgcaggatgaattcaggtgtcatgatggcaagtgcatatcacgccagttcgtgtgcgactcagatcgtgactgcttggacgggagtgatgaagcttcctgccctgtgctaacatgcggcccggctagttttcagtgcaacagttcaacttgtatcccgcagctgtgggcttgtgataacgatccggactgcgaggatgggtcagatgagtggccacagcgctgcaggggtttgtatgtgtttcagggcgattcgagtccgtgctcggccttcgagttccactgtctgtccggcgagtgcatccattcatcctggcgttgcgacggaggacccgactgcaaagacaagagcgacgaggagaactgcgctgtggcaacgtgccgccccgacgagtttcagtgcagtgacggaaactgtatccacgggagccgtcagtgcgacagagaatatgattgcaaagacatgtcggacgaggtgggatgcgtgaacgtgacgctgtgcgaggggcctaacaaatttaaatgtcacagtggtgagtgcataacgctggacaaagtctgtaatatggcccgcgattgtcgcgactggagcgatgagccaatcaaggagtgcggcaccaacgagtgccttgacaataacggtggatgctcccacgtctgcaacgacctgaagatcggcgccgagtgcctgtgccccgacggctttcagctggtggcccaaaggaggtgcgaggatattgacgagtgccaggaccccgacacatgtagccagctgtgtgtcaacctcgaaggcggctacaaatgccagtgtgaggagggattccagttggatccgcataccaaggcgtgcaaggcagtgggctcaatagcctatctcttctttaccaatcgacatgaggtccgcaagatgacacttgaccgtagtgaatacacatcgctaatcccgaatctgcgcaatgtggtggctctagacacagaggtagccagtaataggatttattggtcggatttgagtcagaggatgatctgcagcacacagctggatagagcgcacggcgttagtagctatgacactgtcatcagccgagacatccaggcgcctgatggattggcagtggactggatccattctaacatttattggaccgacagtgtgctgggtaccgtgtccgtggctgacaccaagggcgtcaagcgcaaaaccctattcagggagaacggctcgaagccccgagcaatcgtggtggatcccgttcatggcttcatgtactggacagattggggtacgcccgcgaagattaagaagggcggcctaaacggggtagatatatattccttggttaccgaaaacatacagtggccgaatggaataacattggatttgctgtccggacgcctgtactgggtggatagtaaactgcactccatttcctctattgatgttaatgggggaaacagaaagaccatcttggaagatgaaaagcgcttggcgcaccccttcagcctcgccgtctttgaggacaaggtattctggaccgatataatcaatgaagctatcttcagtgccaaccggttgacaggttcagacgtgaacctgctggccgaaaaccttctatctccagaggacatggtcttgttccacaatcttactcagccacgtggcgtgaattggtgtgagcgaacgacactgagtaatggtggatgccagtatctgtgcttgccggccccacagattaacccgcacagcccgaagttcacctgcgcctgccccgatggtatgctgctggcccgagatatgcgctcgtgcctcacagaggcggaggccgcagttgccacccaagagacgtccactgttcgcctgaaggtcagttcaaccgctgtccgaactcagcacactaccacgcgacccgtccccgatacatcacggcttcctggtgccacccccggcctgacaacggtcgaaatagtgactatgagccatcaggccctgggagatgtcgcaggccggggcaatgagaagaagccctcatccgtcagggctctgagtatcgttctgccgatcgtgctgctggtgtttctatgccttggcgttttcctcctgtggaagaattggagattaaagaatataaacagcattaactttgataatcctgtgtaccagaaaacgaccgaagatgaagtgcatatctgccataaccaggatggctactcctacccatctcgccagatggtgtcattggaagatgacgtcgca

SEQ ID NO: 16322 - DNA, 2580 bp, synthetic construct
  misc_feature 1..2580: note = source = /note="Description of Artificial Sequence: Synthetic coding sequence"
  source 1..2580: mol_type = other DNA
atgggtccctggggatggaaactccggtggaccgtggcactcctgttggcggccgcaggaaccgctgtgggtgatcggtgcgaacgcaacgagtttcaatgccaggatggaaaatgcatttcatacaagtgggtgtgtgacggttcagccgagtgtcaagacggatcggatgaatcacaagagacttgtctttccgtgacctgtaagtccggggactttagctgtgggggtcgggtcaacagatgcattccgcagttttggcgatgtgatggtcaggtcgattgtgacaatggctcagatgagcaggggtgtcccccaaagacctgttcacaagatgaatttagatgtcacgatggtaagtgcatctcacgccaattcgtgtgcgattctgatcgtgattgtctggacggatcggacgaagcatcgtgtccagtgcttacctgtggccctgcatcgttccagtgcaactcgagcacctgtatcccacaactctgggcctgcgataacgatcccgactgtgaggatgggtctgatgaatggccgcagcgatgtcgcggactgtacgtgttccaaggagatagcagcccctgctcggcctttgagtttcattgtctgtcgggagaatgtatccattcctcgtggcgatgcgatggcggcccggattgcaaagataaatcggatgaggagaactgtgcagttgcaacctgtaggccagacgaatttcagtgttccgatggaaactgcatacacggcagccgccagtgcgacagagagtacgactgtaaagacatgtcggatgaagtggggtgtgtgaacgtgaccttgtgtgaagggccgaacaagtttaagtgtcacagcggggaatgtatcaccctggacaaggtctgtaatatggcacgcgactgtagagactggtccgacgaaccaattaaggagtgtgggactaatgagtgcctcgacaacaatggcggttgttcccatgtgtgcaacgatttgaagataggcgcagaatgcttgtgtcccgatggctttcagctggtcgcgcaacgaagatgcgaggatattgatgaatgccaggatccagatacttgtagccaactttgcgtgaatttggaaggcgggtacaagtgtcagtgcgaagaaggattccaactggatcctcataccaaggcctgcaaagcagtgggatccattgcatatctgttctttactaaccggcatgaagtgagaaagatgacgctggatcgctcggagtatacgtcactgattcccaacctgcgcaacgttgtggcactggacactgaggtggcgtcgaacagaatctactggtccgacctttcgcagcggatgatttgtagcactcaactggatagagcgcatggagtgtcgagctacgatactgtcatctccagagacatccaagcaccggatggactcgctgtggattggattcattccaacatttactggactgattccgtgcttggaactgtgtcggtggccgataccaagggtgtcaaacgaaagacccttttcagggaaaatggctcgaagcctcgagcaatcgtggtggacccggtgcacggttttatgtactggactgactggggcacccctgccaagattaagaagggaggtcttaacggagttgacatatactcgctcgtgacggaaaacatccaatggcctaacggaattaccctcgatttgctttcgggacgtctttactgggtggactccaaactgcactccatctcgagcatcgatgtcaacggtgggaaccgaaaaactatccttgaagatgaaaagaggcttgcacatcctttcagcctcgcggtgtttgaagataaagtgttctggaccgacatcataaacgaagctatattctccgcgaataggttgactggctcggacgtcaatcttctcgccgaaaacttgttgagccccgaggacatggttctcttccataacctcactcagcctcgtggagttaattggtgtgaaagaaccaccttgtcaaatggaggttgtcaatacctgtgtctgcctgccccacagattaaccctcattccccaaagttcacgtgtgcgtgtcccgacgggatgcttcttgcacgtgacatgcgctcctgtctgaccgaagcggaggcagccgtggcaactcaagagacgtcaactgtccgcctcaaggtttcatcgacggcagtgcgcacccaacacactaccacccgaccggtgcctgatactagccgcctcccaggcgccaccccgggtctgaccaccgtcgagattgtgacgatgtcacatcaggctctgggagatgtggcagggcgaggaaatgaaaagaagccatcctctgtgcgcgctctttccattgtgcttcctattgtcttgcttgtgtttctttgtcttggggtgtttctgctgtggaagaactggcggctgaagaacattaactcgatcaattttgacaaccctgtctaccagaaaaccactgaggacgaagtgcacatttgtcataaccaggacggatactcatatccgtcgcgccaaatggtttcgctggaggatgacgtggca

SEQ ID NO: 16323 - DNA, 2580 bp, synthetic construct
  misc_feature 1..2580: note = source = /note="Description of Artificial Sequence: Synthetic coding sequence"
  source 1..2580: mol_type = other DNA
atgggaccttggggatggaagcttcggtggacggtagctctgctactagcagcagccggtaccgccgtgggcgaccgctgcgagaggaatgagtttcagtgtcaagatggcaaatgtatctcatacaaatgggtgtgcgacggcagcgcagagtgtcaggatggatctgacgagtcacaggagacttgcttatcagtcacttgtaaaagtggcgactttagctgtggaggacgggtcaataggtgcatcccccagttttggagatgcgatggacaggttgactgtgacaacggatccgatgaacagggatgtccccccaagacgtgctctcaagacgagtttcggtgccatgatgggaagtgtatttcacgccagtttgtatgtgatagcgatcgcgattgtctcgacggatctgacgaggcctcttgccccgtgctaacctgtggccctgcttctttccagtgtaactcttccacatgtataccccaactctgggcgtgtgacaatgacccagattgcgaggacgggtctgacgaatggccacagaggtgtaggggcctctatgtgtttcagggagattcaagtccttgctccgcctttgaattccactgcctttctggagaatgtattcatagttcatggcgatgtgatggcggtccagattgcaaggataagtccgatgaagagaactgcgccgtcgcgacctgcaggcctgatgagtttcagtgctctgacggtaattgtattcacggatcccgccagtgcgatcgggagtacgactgcaaggatatgtctgatgaagtgggatgtgtgaatgtcaccctatgtgagggtcccaataaattcaagtgccacagcggagaatgtatcacacttgataaagtttgtaacatggccagggattgtcgtgactggagtgatgaacccataaaggaatgcggtacaaacgaatgcctggacaacaacggcgggtgttcacacgtgtgcaatgacctgaagataggagcagagtgcctgtgcccagatggatttcagctcgtggctcagagacgttgtgaggacatcgacgaatgccaagatccagacacatgttctcagctatgtgttaatctcgagggaggctataagtgtcaatgtgaggaaggcttccagctggatccacatacgaaggcctgcaaggctgtgggatccatcgcatatctcttttttaccaatcggcatgaagttcgtaagatgaccctcgaccgttctgagtatacatcgttgataccgaatctcagaaacgtcgtggcactcgacaccgaagtcgcttcaaatcgaatttactggagcgacttgagtcaacgcatgatatgttctacacaactggacagagcacacggtgtcagctcttacgacacggtgatctctcgtgacatccaggcgcccgatggcctcgccgtggactggattcactctaatatttactggactgactctgtgctgggcaccgtctctgtggccgacaccaagggggtaaaaaggaaaacgcttttcagggaaaatggcagtaaacccagggccatcgtggtggatccagtccacggcttcatgtattggacggactggggaacaccggcaaagatcaaaaaaggaggtctaaacggagtggacatttattctcttgtcacagaaaacattcaatggccaaatggcattacgctggatctgctgtctggcagactttattgggtcgacagcaaactacactccattagctccatcgacgtgaacggcggcaatagaaaaacgatcctcgaagatgagaaaaggttggcccatcctttctccctcgctgtatttgaggacaaggtgttctggacggatattataaatgaggccattttctctgctaacaggttaaccggttctgatgtgaacctgcttgcagagaacctcttgtcccctgaggatatggtgctattccacaacctgactcagcctcggggtgttaattggtgtgagcggaccacgttatccaacggggggtgccagtatttgtgtctgccagctcctcagattaacccacattcccctaaattcacttgtgcctgcccggatgggatgctgttagcacgggatatgagatcctgtcttaccgaagcggaagcggcagttgccactcaggaaacctccacggtgaggctgaaagtttcctcgactgccgtgcgtacccagcacaccaccacgcggcctgtgccagatacttcccgattaccaggggcgacacccgggctgaccacagtggagatcgtgaccatgagccatcaagccttaggcgacgtcgccgggaggggcaatgaaaagaagccctccagcgtgcgggcattgtccattgttttaccaatcgtcttgctagtgttcctgtgtttaggggtatttctgctgtggaaaaattggcgcttgaagaacataaatagcattaacttcgacaaccccgtgtatcagaaaactactgaagacgaagttcacatatgtcataatcaggacggctactcctacccatcccggcagatggtgagccttgaggacgacgttgca

SEQ ID NO: 16324 - DNA, 2580 bp, synthetic construct
  misc_feature 1..2580: note = source = /note="Description of Artificial Sequence: Synthetic coding sequence"
  source 1..2580: mol_type = other DNA
atgggaccgtggggttggaaactgcggtggactgttgcactgttgctggccgcagccggaactgcagtgggggaccgctgcgaaaggaacgaatttcaatgccaggacggaaagtgcatttcgtacaaatgggtgtgcgacggaagtgccgaatgccaagatggatcggacgagtcacaggaaacctgtctgtcggtgacctgcaaatcgggtgacttttcatgcggcggtagggtcaatcgttgtatcccccaattctggcggtgtgacggacaagtggattgtgataacgggtccgacgagcagggatgcccgccaaagacctgctcccaggacgagttccgctgccacgacgggaagtgcatcagccgccagtttgtgtgcgacagcgaccgcgactgcctcgatgggagcgacgaagcaagctgtccagtgctgacttgcggtccggccagcttccagtgcaactcttcgacttgtattccacagctttgggcgtgcgacaacgatccagattgcgaagatggatcagacgaatggccgcagaggtgtcgcggactgtacgtctttcagggggactcgtccccgtgcagcgcctttgaattccattgcttgtccggcgaatgcatccattcatcgtggcggtgcgatggaggccctgattgcaaagacaagtccgacgaggagaactgtgccgtggccacctgtagaccagatgagttccagtgctcagacggaaactgcatccatggcagccggcagtgcgacagagagtacgactgtaaggacatgagcgatgaagtgggttgcgtcaacgtgactctctgcgaggggcccaataagttcaagtgccattcgggagaatgcattactctggacaaggtctgcaacatggccagagattgcagagactggtcagacgagccgattaaggagtgtggcactaacgagtgcctcgataacaatggaggatgctcccacgtgtgcaacgacctgaaaatcggggctgagtgcctgtgccctgacggattccaactcgtggcccagcgccggtgcgaggacatcgacgagtgtcaagaccctgacacctgctcccaactctgcgtgaacctcgagggagggtacaagtgccagtgcgaggaggggttccagctggacccccatacgaaagcctgcaaagccgtcggaagcatcgcgtaccttttcttcaccaaccggcacgaggtgaggaaaatgactctggaccggtcggaatacacgtcactcattccgaacctcaggaatgtcgtggctctcgataccgaggtcgcgtcaaatcggatctactggtcagatctttcccaacgcatgatctgttcaactcagcttgaccgcgctcatggcgtgtcatcctacgacaccgtgattagccgcgatatccaggctccggatggtctggctgtggattggatccactcgaacatctactggactgactcggtgctcgggactgtgtccgtggccgacactaagggagtcaagcgaaagactctgttcagagaaaacgggtcgaagccacgcgccatcgtggtcgatccagtccatggcttcatgtactggaccgactggggcactccggccaagatcaagaaaggaggacttaacggcgtggatatctattcgctcgtcactgagaacatccaatggccgaatggtatcaccctggatctgctctcgggacggctctactgggtggatagcaagctccacagcatctcctctattgacgtgaacggcggtaatcgaaagactatactcgaggatgaaaaaagactcgcccatccattctccctcgcagtgtttgaggacaaggtcttttggaccgatatcattaatgaagccatctttagcgcaaatcgcctgaccggctccgatgtgaacctgctggccgaaaatctcttgtcgccagaagatatggtgctctttcataaccttacccagccgcggggagtgaactggtgtgagcggactaccctttcaaatggtggatgtcagtacctctgccttcctgcgccgcagatcaacccccactccccaaagttcacttgcgcctgcccggatgggatgctgctcgcccgcgatatgcgctcgtgtctgaccgaggccgaagcagccgtggcgactcaggagacgtccacggtgagactcaaggtgtccagcaccgccgtcagaacccagcacactaccacccgcccagtgccggacacgtctcggcttccaggcgcgaccccgggccttaccactgtcgaaatcgtgactatgagccaccaagccctcggtgatgtcgcgggacgcggtaacgagaagaaaccgtcctcggtccgagccttgtccatcgtcctgccgatcgttctcctggtgttcctgtgcctcggtgtgttcttgctgtggaagaattggcggttgaaaaacatcaattccatcaacttcgacaatccggtgtaccagaaaactacggaggatgaagtgcatatctgccacaaccaagatggatactcgtacccttcgcgacagatggtcagcctcgaggacgatgtggca

SEQ ID NO: 16325 - DNA, 2580 bp, synthetic construct
  misc_feature 1..2580: note = source = /note="Description of Artificial Sequence: Synthetic coding sequence"
  source 1..2580: mol_type = other DNA
atgggaccttgggggtggaagctgcgttggaccgtcgcacttcttcttgccgctgcaggcactgcagtgggcgatcgctgtgagagaaacgaattccaatgtcaggatggaaaatgtatttcgtacaagtgggtgtgtgatggaagcgccgaatgccaggacggttccgacgaatcacaagagacttgtctttccgtcacgtgtaagtcaggtgatttcagctgcggcgggagggtgaaccgttgtattccccaattttggcgatgtgacggccaagtggactgtgacaatggatcggatgaacaaggatgtcctccaaagacttgcagccaggatgagtttagatgtcatgatggaaaatgcatttccagacagtttgtctgtgactcagaccgggattgtcttgatggctcggacgaagcctcatgtccggtgctcacgtgtggacccgcgtcttttcaatgcaacagctcgacttgcattcctcagctctgggcgtgcgataacgatcctgattgtgaggatggatccgatgaatggccccagcgctgtcgcggactgtacgtgtttcagggagactcaagcccatgttcggcattcgaattccactgtctgagcggggaatgtattcatagcagctggcggtgcgatggaggacctgactgtaaggataagtccgacgaagaaaactgtgcagtggcaacctgtcgccctgatgaatttcagtgtagcgatggaaactgtattcatggttcacgtcaatgtgaccgggagtatgattgtaaggatatgtctgatgaagtcgggtgtgttaatgtgactctctgtgagggacctaacaagtttaagtgtcactcaggggagtgcattactttggataaggtttgcaatatggcacgcgactgtcgcgattggtccgatgaaccaattaaggaatgcggaactaacgagtgtctggataacaatgggggatgttcgcatgtgtgtaatgacctcaaaatcggggcggaatgcctttgcccagacggttttcaacttgtggcacaaaggcgctgcgaagatattgatgaatgccaagatcccgacacgtgctcgcaactctgtgtgaacctcgaaggcggatacaagtgccagtgcgaagaaggttttcaactggacccacataccaaggcatgcaaggcagtggggagcattgcataccttttctttactaatagacatgaagtccggaaaatgacgcttgacagatcagagtatacttcgttgattcccaacttgaggaatgtggtggcactggataccgaggtcgcttcaaacaggatttactggtctgatttgtcgcagcggatgatctgttccacccagcttgatagggcccacggagtctcttcctacgatactgtgatttcgcgcgacattcaagcacctgacggactcgcagtcgattggatacattcgaatatctactggactgattcagtgctgggaaccgtgtcggtggcagacaccaagggtgtcaaaagaaagactctgtttcgggaaaatggaagcaaacctcgagcaatagtggtggacccggtgcacggatttatgtactggaccgattggggaaccccggcaaagataaagaagggcggtctgaacggtgtggacatctactccctggtcaccgaaaacattcaatggcctaacggaatcaccctggatcttctgagcggtagactttactgggtggatagcaagctccactcgatctcgtcaattgatgtcaatgggggaaatcgtaagaccatattggaggacgagaagcgacttgctcatcctttctccctggcagtctttgaagataaggtcttttggactgatatcattaacgaagcaatcttttcagcaaataggctgactggatcagatgtcaatctgctggccgaaaatctgttgtccccagaagatatggtcctcttccataaccttacccagcctagaggagtgaactggtgtgagaggacgacgctgtcgaacggtggatgccagtacctgtgtctccctgcgccacagattaaccctcactcccctaaattcacttgtgcctgtcctgatggcatgctgctggcacgtgatatgcgatcttgccttaccgaagctgaggcggctgtcgcaactcaggaaacctctactgtgagactcaaggtgtcctcgactgcagtccggactcaacacaccacgacccgacctgtccctgacacctcgcgcctgcccggagcaactccagggcttactacggtggaaattgtgaccatgagccatcaggcgttgggggacgtcgcaggtcgtggtaacgagaagaaaccttcatcggtgcgagcgcttagcattgtgcttccgattgtgctgctggtgttcctttgtctgggcgtgtttctgctttggaagaattggcggcttaagaacattaactccatcaactttgataaccccgtgtaccagaaaaccactgaggacgaagttcatatctgtcataaccaggacggatactcgtacccatcgcggcagatggtgtcactggaagatgacgtcgcg

SEQ ID NO: 16326 - DNA, 2580 bp, synthetic construct
  misc_feature 1..2580: note = source = /note="Description of Artificial Sequence: Synthetic coding sequence"
  source 1..2580: mol_type = other DNA
atggggccatggggatggaagctccgttggaccgtggctctgcttctggccgcagccggcactgctgtgggcgacaggtgcgagagaaacgagttccagtgtcaggacggtaagtgtatcagctacaaatgggtctgtgatggcagcgccgaatgccaagatggtagtgacgaatcccaagaaacgtgtctgtctgtgacctgcaagagcggagacttttcttgcggtggtcgtgttaaccgctgcataccgcaattctggcgctgtgacgggcaggtggactgtgacaacgggagcgatgagcaggggtgtcccccaaaaacctgcagccaggatgaatttaggtgccatgacggcaaatgcatcagccgccagttcgtctgcgacagcgaccgggattgcctggatggcagtgacgaggcatcgtgtcctgtactgacatgtggaccggctagcttccagtgcaacagctctacctgtataccccagctgtgggcctgcgacaatgatcccgattgcgaggacggttcagacgagtggcctcagcgatgtagaggcctctacgtttttcagggggactcaagtccctgcagtgcctttgaattccattgcctgtcaggagagtgcatccactcaagttggaggtgcgacgggggtcctgattgtaaggacaagagcgacgaagagaattgcgccgtagctacttgtcggccagatgagttccaatgcagtgatgggaactgtattcacggctcacggcagtgtgacagggaatatgattgtaaggatatgtccgacgaagttggttgcgtcaacgttaccctctgcgagggccctaacaaattcaagtgccacagcggagaatgtatcactctggacaaggtgtgcaatatggcgcgggactgccgcgattggtccgatgagccaataaaagaatgtggcaccaatgaatgtctggacaataacggtggctgcagtcatgtctgcaacgacctgaaaatcggagccgaatgtctgtgcccagatggttttcagctggtggcacagcgccggtgcgaggacatcgacgaatgtcaggatcccgatacctgcagtcaactgtgtgtcaatctggaggggggttataagtgtcagtgcgaggagggattccagttggacccccatactaaagcttgcaaggcagtcgggagcatcgcgtacctgtttttcacgaacagacacgaggtgcggaaaatgacacttgaccgctcagagtatacctccttaatccctaatctcaggaacgtggtggccctggataccgaagtggccagtaaccgcatctactggtcagacttaagccagagaatgatttgctctacgcaactggatcgcgcacatggtgtttcctcctacgacacggtcatatcccgtgacattcaagcacccgacggattagccgtagactggatccactctaacatttactggacggattcagtgctgggtacagtgtctgtcgcagatactaaaggcgtgaagagaaaaaccctgtttcgagagaacgggagtaagcctcgcgcaatcgtggtcgaccccgtccacggctttatgtattggacagactggggcacccccgccaagataaagaagggtggtctgaatggcgtggatatttattctcttgtgactgagaatattcagtggccgaacggaatcactctggatctgctgagtggacgtttgtattgggtagatagcaagctgcactcaatatcctccatagatgtaaatggaggaaatagaaagacaatcctcgaggacgaaaagaggcttgctcatcctttttccctggctgtgttcgaagacaaagtattctggacggatataattaacgaggccatcttcagcgcaaaccgcctgaccggtagcgacgtaaacctgctggccgagaatttgctctctcctgaggatatggtgttgttccataacctgactcagcctcggggcgttaattggtgtgagcgcaccacattgtccaacggcgggtgccagtacctttgcctccccgctcctcagataaacccacattcacctaaattcacgtgcgcgtgcccggatggcatgctgttggcacgagacatgaggagctgtttgaccgaagccgaagcagcggtagccacccaggagacatcaaccgtgcgcctgaaggtttcttccaccgctgtccgaacccagcacaccactacaaggccagtcccagacacttcaagactgccaggtgccacccctggcctgaccacagtggagatcgtcactatgtcgcaccaagcgctaggcgacgtagctggcagaggtaatgagaaaaaaccctcatctgttcgggcgctgtcaattgtcttacccatcgtgcttctggtctttttatgtctcggcgtgttcctattgtggaaaaactggaggctcaaaaatataaacagcataaattttgataacccagtctaccagaagacaacagaggatgaggtgcacatctgtcataatcaggacggctacagctacccatctcgccagatggtaagtctggaggacgatgtggcc

SEQ ID NO: 16327 - DNA, 2580 bp, synthetic construct
  misc_feature 1..2580: note = source = /note="Description of Artificial Sequence: Synthetic coding sequence"
  source 1..2580: mol_type = other DNA
atgggcccatggggctggaagctcagatggaccgttgccctactcctggctgcggccgggactgctgtgggcgaccggtgcgaacgaaacgagtttcagtgtcaagacggaaaatgcattagctacaagtgggtctgcgacggatccgcagagtgccaggatggcagcgatgaatcccaggagacttgcttatccgttacctgcaagtctggagattttagttgcggcggaagggtgaacagatgcatcccacagttttggaggtgcgatgggcaagtggattgtgataacgggagcgacgaacagggatgtcctcccaaaacttgcagccaagacgaattccgctgtcacgacggaaagtgcatcagtcgtcaattcgtctgtgatagtgaccgcgactgtcttgatgggtccgatgaagcttcttgcccagtcttgacatgcggtccagctagctttcagtgcaactcgtctacttgtatcccacagctgtgggcttgtgataatgatccagactgtgaggatggaagcgatgaatggcctcaaaggtgccgcggactctacgtgttccagggagatagtagcccttgctccgccttcgagtttcattgccttagcggagagtgcatccactcgagctggcgctgtgatggcggacccgattgcaaggataaaagcgatgaagaaaactgcgcggtcgcgacctgccgaccagacgaattccaatgttctgacggcaactgtatccatggatcgaggcaatgcgatagggagtacgattgcaaggatatgagcgatgaggtgggatgtgtgaacgtgaccctctgtgagggaccaaataaattcaaatgtcatagtggagaatgcatcacacttgacaaggtgtgtaacatggccagggactgccgcgactggtctgacgagccgatcaaggaatgcggaaccaacgaatgcctcgacaacaacggaggatgctctcacgtctgtaacgacttgaaaattggagccgagtgcctctgccctgatgggttccagctggtggcccagagacggtgtgaagatatcgacgaatgccaagacccagacacctgcagtcaactgtgcgtcaatctggagggggggtacaagtgtcagtgcgaggaaggcttccagcttgatccccatacaaaggcttgtaaagccgtgggaagcattgcttacctgttcttcaccaatagacatgaggtgagaaaaatgaccttggataggtcagaatacacctcactgatacctaacctgcgcaacgtggtggctctggacaccgaagttgcatctaaccgcatttactggtcagacctctctcagcggatgatatgcagcacacagctggacagagcacacggtgtatccagctacgacaccgtgattagcagagatattcaggcacctgacggcctggccgtcgactggatccacagcaacatctattggacggactctgtcctgggtaccgtctctgtcgctgatacaaagggcgtcaaaaggaagacactgttcagggagaacggcagcaaaccacgagccatagtagtcgacccagtccatgggtttatgtactggaccgattggggtactcccgcaaagatcaaaaagggcggcctgaacggcgtcgacatctacagccttgtgaccgagaacattcaatggccaaatgggattacccttgatctgctgtctggaagactatactgggtggattctaagttgcattcaatctcaagcatcgacgtgaacggcggaaaccgcaagaccattcttgaagatgaaaagcgcctcgcacaccccttctccctcgcagttttcgaggataaagtattctggaccgatatcattaacgaggctatcttttccgcaaaccgattgacgggcagcgacgttaacctgttggcagaaaaccttctgtcccctgaggacatggttctgtttcacaaccttacacaacctagaggcgtcaattggtgtgaaaggactactttaagcaacggcggatgccaatatctgtgtctgccagctccccagatcaacccgcatagtcctaaattcacatgcgcttgtcccgacgggatgctgcttgctcgcgatatgcgatcttgcttaaccgaggccgaagccgctgtagccacccaagaaacctcgaccgttagacttaaagtttcctctacagctgtgagaacccaacacaccaccaccaggccagtgcctgatacaagccgcctccctggtgccacacccggccttaccactgtagaaatcgtcacaatgtcccaccaagcactgggagatgtggccggccgtggtaacgaaaagaagcccagtagtgtgcgcgcgctctctattgtgctgccaattgttcttttggtgtttttgtgcctgggagtgtttctgctctggaagaactggaggctcaaaaacatcaacagcataaactttgataaccctgtgtaccaaaagacaaccgaagacgaggtccacatttgtcacaaccaggacggctacagttaccccagtaggcagatggtctcactggaagatgacgtggcc

SEQ ID NO: 16328 - DNA, 2580 bp, synthetic construct
  misc_feature 1..2580: note = source = /note="Description of Artificial Sequence: Synthetic coding sequence"
  source 1..2580: mol_type = other DNA
atgggcccctggggatggaaactgcgctggaccgtagccctgttgctggcagcagccggaacagccgttggcgaccgttgtgaaaggaacgagtttcaatgccaggacggaaagtgtatatcatacaagtgggtgtgtgacgggtccgccgagtgtcaggatggcagcgatgagtcccaggagacatgcctttccgtgacttgcaagtctggcgatttctcctgcgggggtcgtgtcaaccgatgtatcccccagttctggcggtgtgatgggcaggttgattgcgacaatggttcggatgagcagggttgtcctccaaagacctgctctcaagatgagttccggtgccacgatggaaagtgcatatcacgccagttcgtttgcgattcggatagggactgtcttgatggctcggatgaggcaagctgtccagtgctgacatgtggacctgcttcttttcagtgtaacagctcaacttgcatcccccagctctgggcgtgtgataatgatccggattgcgaggatggctccgacgagtggccacagagatgcagaggcctttatgtgttccaaggtgacagttccccttgcagcgcctttgagttccactgcttatccggcgagtgtattcacagcagctggcgttgcgacggagggccggattgtaaagataaatcggatgaagagaactgcgcggtggcgacctgccggcccgatgagtttcagtgttcagatggaaattgcatccacggaagtcggcagtgtgatagggagtatgactgtaaggatatgtctgatgaggtcggctgcgtcaacgttaccctctgtgagggacctaacaagtttaaatgccactctggggagtgtattaccttggacaaagtatgcaacatggcacgagactgtagggactggtcagacgaaccaatcaaggaatgcggaaccaatgagtgtcttgataacaacggcggctgttcccatgtttgcaatgacttaaagatcggcgccgaatgtctttgccccgatggttttcagctcgttgcccagcgccggtgcgaggacatcgacgaatgtcaagacccagacacctgttcacagttatgtgtcaatctggaggggggttacaaatgccagtgcgaggaaggctttcagctggatccacacacaaaagcttgcaaagcggttgggtcaattgcgtatctctttttcaccaatcggcacgaagtccgcaaaatgaccttggatagatccgaatatacaagcctgataccaaatctgaggaatgtggtcgcacttgatacagaggtggcgagtaatagaatttattggagcgatctgagccagcgtatgatctgttcaacccaactggatagagcccatggggtttcttcgtacgacacagtgatatctcgggacattcaggcacccgacggtctcgcagtcgattggatacacagcaacatatattggacagactcggttctggggacagtcagcgtcgcagatactaagggcgtaaagcgcaagactctgtttcgggagaatggtagcaagccgagagctatcgtggttgatccggtgcacggtttcatgtattggactgattggggaacgccagccaagattaagaaagggggcctgaatggtgtggatatttactccctggttacagagaatatccagtggccaaacggaatcaccctcgatctgctgtccggtcgactctattgggtggatagcaaactccactcgatctcatctattgacgtcaacggtggaaatcggaaaaccattctcgaagatgaaaagaggcttgcccaccctttcagccttgctgtgtttgaggacaaagtgttttggacagacatcatcaatgaggccattttctctgccaatcgcttgaccgggagcgatgtgaacttgctggctgaaaatttactgtcacctgaggatatggtgctctttcataatttgacccagcctcgtggcgtaaactggtgtgaaagaacaaccttatcaaatgggggctgtcagtacctatgccttccagcgccacaaattaatccacacagccctaagtttacctgtgcgtgccctgatgggatgctgctagctcgagatatgcggagctgtttgaccgaggcagaagccgccgtagcgacgcaggagacgtccactgttcggctgaaagtgagtagtaccgccgtgagaacccaacataccactacacgccctgttcctgacacttctaggctgcctggcgcgacgccgggtcttaccaccgtagagatagtcacgatgagtcaccaggcactgggcgatgtcgcgggacggggaaacgaaaagaagcccagtagtgttcgtgctctgagcatcgtcttacccatcgtactgctagtgtttctatgtctcggagtattcctgctgtggaaaaactggcggctcaagaacatcaatagtattaacttcgataatccagtgtaccagaaaactactgaggacgaggtgcatatttgtcacaaccaggatggatacagctatccttccagacagatggtgtccctggaagatgacgtggct

SEQ ID NO: 16329 - DNA, 2580 bp, synthetic construct
  misc_feature 1..2580: note = source = /note="Description of Artificial Sequence: Synthetic coding sequence"
  source 1..2580: mol_type = other DNA
atggggccatggggctggaaacttcgatggaccgtcgcccttcttctggctgcagctggtaccgcagtgggagatcgatgtgaaagaaacgaatttcaatgtcaggatggtaagtgtatctcatacaagtgggtgtgcgatggctccgctgaatgtcaagatgggtccgacgagtcacaagaaacctgcctttccgtgacctgtaaatcaggagacttttcatgtgggggccgagtgaataggtgtattccgcaattttggcggtgtgatggacaagtggattgcgataacggttcggacgaacaaggatgtcctcctaagacttgcagccaggacgaatttcggtgtcatgatggaaaatgtatttcacgccagtttgtgtgtgacagcgatcgcgattgtcttgatggtagcgatgaagctagctgccccgtgctgacctgtggacctgcatcatttcaatgcaactcgtcaacctgtattccacagctttgggcatgcgacaacgatccagattgtgaagatggctccgatgagtggcctcagcggtgtaggggcctttacgtctttcaaggcgattcgtcgccatgcagcgcgttcgagtttcactgtctgtccggggaatgcatccattcctcatggaggtgcgatggagggccggattgtaaagataagtccgatgaggagaattgtgcagtcgcaacttgtcggcctgacgagtttcagtgttctgatggaaactgtatccatggttcacggcaatgtgacagggaatacgactgtaaggacatgagcgatgaggtgggatgtgtcaatgttactctgtgcgaaggacccaacaagttcaagtgtcattccggtgagtgcatcaccttggacaaggtgtgtaacatggcccgggattgtcgcgactggtcggacgagcctattaaggaatgcggcacgaatgagtgccttgataacaatgggggctgttcccacgtgtgcaatgatctgaagattggggccgaatgtttgtgccctgacggatttcaactggtggcacagagaagatgtgaggatattgacgagtgtcaagatcctgatacttgcagccaactgtgtgtgaacttggaaggtggatacaaatgccaatgcgaagaaggtttccaactcgatcctcataccaaggcctgcaaggcagtgggctccatcgcatacctcttctttactaaccgacatgaagtgagaaagatgacccttgatcgttcagagtacacctcgctgatccctaaccttcgcaacgtggtggcactggatacggaagtggcatcgaatcgcatttactggtccgatctttctcaaagaatgatttgctcgactcaacttgacagggcacacggcgtgtccagctacgacaccgtcatatctcgggacattcaagcccctgacggtctggcggtggattggattcacagcaatatctactggaccgactcggtcctgggtacggtttcagttgctgataccaagggagtgaagcgtaagaccctttttcgggagaacgggagcaaacccagggcaatcgtcgtggacccggtgcatgggttcatgtactggaccgattggggaaccccagccaagattaagaagggaggactgaacggggtcgacatatactcactcgtcaccgaaaacatccagtggccaaacggaataactctggatcttctttccggtaggctttactgggttgactccaaactgcattccatttcttcgattgatgtgaatggtgggaaccgcaagaccatccttgaggacgagaaacggctggcacatccattctcgctggccgtttttgaagataaagtcttttggaccgacatcataaatgaggcgattttctctgcaaaccgccttaccggatccgatgtgaatctgctggcagaaaacctgctttccccagaagatatggtgcttttccataatcttactcagccgagaggtgtgaattggtgcgaaaggaccactctgagcaatggaggatgtcagtacctgtgtttgcctgcacctcaaatcaaccctcattcgcctaagttcacctgtgcttgtccggatggtatgctgttggcgagagacatgaggtcgtgccttaccgaagccgaggcagctgtggcaacccaggaaacttcaactgtgcggctgaaggtatcgtccaccgctgtcaggactcagcatactaccacgcggccagtgcctgacacctcacgcctgcctggagcaaccccaggattgactaccgtggagattgtgaccatgagccaccaggcactgggggacgtcgcgggaaggggtaacgagaagaaaccatcctccgtgcgcgcactgtcaatagtcctgccaattgtgttgctggtctttctttgcctcggggtctttctgctctggaagaattggagacttaagaacattaacagcatcaacttcgataatcccgtgtaccaaaagacgaccgaagatgaagtccatatctgtcataatcaggatggatactcatatccttcccgccaaatggtttcgcttgaggacgatgtggcc

SEQ ID NO: 16330 - DNA, 2580 bp, synthetic construct
  misc_feature 1..2580: note = source = /note="Description of Artificial Sequence: Synthetic coding sequence"
  source 1..2580: mol_type = other DNA
atgggaccatggggttggaaattaaggtggactgttgctcttttattagctgcagcaggaactgcagttggtgatcgatgtgaaaggaatgaattccaatgtcaagatggtaaatgtattagttataaatgggtgtgtgatggatctgcagaatgtcaagatggaagtgatgaatcacaagagacatgtctttctgttacatgtaaaagtggagatttttcatgtggaggacgagtaaacagatgtattcctcaattctggcgttgtgatggtcaagtagattgtgataacggatctgatgaacaaggatgcccacctaaaacttgttcacaagatgaatttcgttgtcatgatggtaagtgtatttcaagacaatttgtttgtgattctgatagagattgtcttgatggttcagatgaagctagttgtccagtattaacctgtggaccagcatcattccaatgtaattcatctacatgtattccacaattatgggcatgtgataacgatccagattgtgaagatggttctgatgaatggccacaacgatgtagaggtttatatgttttccaaggagactcaagtccttgttcggcttttgaatttcattgtctatccggtgaatgtattcattcatcttggagatgtgatggaggaccagattgtaaggataaatcagatgaagaaaattgtgcagtagctacttgtcgtccagatgaattccaatgtagtgacggaaattgtatccacggatcaagacaatgtgatagagaatacgactgtaaagatatgtcagatgaagttggatgtgtgaatgttacattgtgtgagggaccaaataaattcaaatgtcactctggagaatgtattactttagataaggtttgtaatatggcaagagattgtagagattggagtgatgaaccaataaaagaatgtggaacaaatgagtgtttagacaataatggaggatgttctcatgtttgtaatgatttaaagataggtgctgaatgtttatgccctgatggttttcaacttgttgcacaacgaagatgtgaagacattgatgaatgtcaagatcctgatacctgtagccaattatgtgttaatttagaaggtggatataagtgtcaatgtgaagaaggatttcaattggatcctcatactaaagcatgtaaggcagtcggaagtatagcttatctttttttcacaaatagacatgaagttagaaagatgacacttgatagatctgaatatacatctcttatacctaatcttagaaatgttgtagcattagatactgaagtagcttccaatagaatatattggtcggatttatcacagagaatgatttgttctacccaattagatcgtgctcatggagtttcctcatatgacacagtaattagtagagacattcaagcaccagatggattagctgtagattggatacactcaaatatttattggactgattctgtattaggaacagttagtgtggctgatactaaaggagttaaaagaaaaacactttttagagaaaatggatctaaaccacgagcaattgtagtggatcctgtacatggttttatgtattggacagactggggtacacctgctaaaattaaaaaaggaggacttaatggagttgatatttattcattagtaactgaaaatattcaatggccaaatggtattacgcttgatcttctttcaggacgtttatattgggttgattctaaacttcatagtatttctagtattgatgtaaatggtggaaatagaaaaactattttagaggatgaaaaaagattagcccatccatttagtttagctgttttcgaagataaggttttctggactgatattattaatgaagcaattttttcagctaatcgtcttacaggatcagatgttaatcttttagctgaaaatttattatcgcctgaagatatggttttgtttcataatcttactcaaccaagaggagtaaactggtgtgaaagaactactctttcaaatggtggatgtcaatatttgtgtttgccagcaccacaaattaatccacattcacctaaatttacttgtgcatgtccagatgggatgttgttagcaagagacatgagatcatgtctaactgaagcagaagctgctgttgctacacaagaaacttctacagttagacttaaagtttcttcaactgcagttagaactcaacatacaactacaagaccagttcctgatacatcaagattaccaggagctacaccaggacttacaactgttgaaattgttacaatgtcacaccaagctttaggtgatgttgcaggacgtggaaatgaaaaaaaaccatcttctgttagagcattatctattgttttaccaatagttttattagtattcttatgtttaggagttttcttactttggaagaattggagacttaaaaatattaatagtattaattttgacaacccagtttatcaaaaaacaacagaagatgaagttcatatctgtcataaccaagatggatactcatatccatctagacagatggtatctttagaagatgacgtagca

SEQ ID NO: 16331 - DNA, 2580 bp, synthetic construct
  misc_feature 1..2580: note = source = /note="Description of Artificial Sequence: Synthetic coding sequence"
  source 1..2580: mol_type = other DNA
atggggccttgggggtggaaactgcgctggacagtggctctcctactggctgctgcaggtacggccgtaggcgatagatgcgaacgcaacgagtttcaatgccaggacgggaagtgtatttcttacaagtgggtctgcgacggatccgctgaatgccaagatggctcggatgaatcacaggaaacctgcctgtcggtgacatgcaagtcaggcgacttctcttgtggcggcagggtaaaccgatgcataccccaattctggcggtgtgatggtcaggtcgactgcgacaacggcagcgatgagcagggatgcccaccgaaaacctgtagccaggatgagtttcggtgtcatgatgggaagtgcatctcaaggcagttcgtgtgcgacagcgaccgtgactgcttagacgggtctgatgaggcgtcttgtccagttctgacctgcggccctgcatcatttcagtgcaacagcagtacgtgtatccctcagctgtgggcctgtgataacgatcccgattgtgaggacggaagtgacgagtggccacagcggtgtagaggcctgtatgtgtttcaaggagactcgtcaccttgctctgcctttgagtttcattgccttagcggggaatgcatacacagcagctggcggtgtgacggcggacctgactgtaaggacaaatcagatgaggagaactgcgcagtggcgacctgcagacccgatgaatttcagtgtagtgatggcaactgcatccacggctcacgacaatgcgaccgggaatatgactgcaaggatatgagcgatgaagttggatgcgttaacgttactttgtgcgagggccctaataagtttaagtgtcactcaggcgagtgtatcacactggacaaggtgtgtaacatggctagagattgccgagattggagtgacgagccgatcaaggagtgtggcaccaacgagtgtctagataacaacgggggttgcagtcacgtgtgtaacgacctgaagattggggccgaatgtctgtgccccgatggcttccagctggtcgcccaaaggcgctgcgaggacattgatgaatgccaggacccagatacctgttcccaattgtgcgttaacctcgagggaggctacaaatgtcagtgcgaggaaggttttcagctggatccccacacaaaggcttgtaaggcagtgggcagcattgcttacctcttctttactaaccgacacgaagttagaaaaatgacattagatagaagcgaatatacgtccctgatccctaacttgaggaatgtggtggccctggatactgaagtagcttcaaaccgtatctactggtctgatctgtcacagaggatgatttgcagcactcaactggacagggcccatggcgtatcctcatatgacactgtgatcagccgcgacatacaagcacccgacgggcttgcggtggattggatacatagcaatatctactggaccgattcagttctcggtaccgttagcgttgcagataccaagggagtgaagagaaagactctgttccgtgagaacgggtctaagcctcgggctattgtggtggaccctgtgcacggctttatgtattggacagactggggcacacccgcgaaaattaagaaaggtggtttgaacggtgtggacatctattcccttgtgacggaaaacatacagtggcccaacggcatcacccttgacctattatccggtaggctctactgggttgacagtaagcttcatagtataagcagcatcgatgtgaacggcggcaaccgtaagaccattctggaagacgaaaaacgccttgctcatcccttctctctggccgtgtttgaagataaagtcttctggactgatataatcaacgaagcaattttcagtgccaaccgcctgacagggtcagacgtaaacctgctggctgaaaacctgctgagcccagaggatatggtgctgttccacaatctcacacaacctcgcggagtaaattggtgcgaaagaacgaccctttctaacggcggctgccagtatttgtgcttgcctgctccccaaattaacccacactcacctaaattcacttgtgcatgcccggatgggatgttgctggcccgggacatgcggagctgtctcactgaggccgaggccgcagtggccacacaggaaaccagcaccgtcaggttgaaagtatcctcaactgccgttagaacccagcacacaacgacaaggccagttccggacacatcccgcctacctggggccactcccggcctgacaactgttgagattgtgacaatgtctcaccaagcgctcggtgacgtcgccgggaggggcaacgagaaaaaaccttcctcagtgcgggctttatcgatagttttgcccatcgtgcttctggtgtttctgtgtctcggggtgttcctcctttggaagaattggagactcaagaatatcaactcaataaatttcgataaccctgtctatcagaagacaacagaggacgaagttcacatctgtcacaatcaggacggctactcttaccccagtcgccagatggtttcattggaagacgacgtcgcc

SEQ ID NO: 16332 - DNA, 2580 bp, synthetic construct
  misc_feature 1..2580: note = source = /note="Description of Artificial Sequence: Synthetic coding sequence"
  source 1..2580: mol_type = other DNA
atgggaccgtggggctggaagctccgctggactgtcgcgctgctgctggcagcggctggaaccgccgtgggggatcgttgtgagcgaaacgaattccaatgccaggacggcaagtgcatttcctataagtgggtgtgcgacggttccgccgagtgccaagacggatcggatgaatcgcaggagacttgcctttccgtgacttgtaagtcgggagacttcagctgcggaggccgggtcaatcggtgcattccacagttttggcggtgcgacggtcaagtggactgcgataacggatccgacgagcagggctgcccgccgaaaacttgctcgcaggacgaatttcgctgccacgatggtaaatgcatctcgcggcaatttgtgtgcgactcggacagggactgcctggacggatcggacgaagcctcgtgccctgtgcttacctgcggcccggcatcatttcaatgcaactcctcgacctgcatccctcaactgtgggcctgcgataatgatccggattgcgaggatggaagcgacgaatggccgcaacggtgtcgggggttgtacgtgttccagggagattcatcgccctgttcggccttcgagttccattgtctgtcaggtgaatgtattcactcatcgtggcgctgcgacggaggcccggattgtaaggataaatcagatgaggaaaattgtgcggtggccacttgtcgccccgatgagttccaatgctccgacggaaactgcattcacggaagccggcagtgtgaccgcgaatacgactgcaaagacatgtcggacgaagtgggatgcgtgaatgtgactctgtgcgaagggccgaacaagttcaagtgccattcaggggaatgcatcactctggacaaagtgtgcaacatggcccgggattgtcgggactggtcggatgaaccaatcaaggaatgcgggaccaatgaatgcctggataacaacggggggtgctcacacgtgtgtaacgacctcaagatcggtgcggaatgcctgtgccctgatggtttccagctggtggcccaacgccggtgcgaagatattgatgaatgtcaagatccagacacctgctcccagctgtgtgtgaacctggagggaggatacaagtgccagtgtgaggaaggttttcagctcgacccgcacaccaaggcctgtaaggccgtgggatccatcgcttacctcttcttcaccaatcggcacgaggtccggaagatgactttggacagatccgaatacaccagcttgatcccgaacctcaggaacgtcgtggcgctggatactgaggtcgcatcaaacagaatttactggtcggatctctcacagcggatgatctgctccactcagctcgaccgggcgcacggggtgtcgagctacgacaccgtgatctcccgcgacatccaggctccagacggactcgctgtcgactggatccattcgaacatctactggactgattccgtcctggggaccgtttcggtcgccgacaccaagggagtgaagcggaaaactctcttccgggaaaatgggagcaaaccgcgggccatcgtggtggatccagtgcacggattcatgtactggaccgactggggcactcctgcgaagatcaagaaggggggactgaacggagttgatatctactccctcgtcaccgaaaacattcagtggcccaatggaataactctggacttgctctcaggcagactctactgggtggactcgaagctgcactccatcagctccatcgacgtgaatggcggaaaccgcaagactattttggaggatgagaaacggctggcacacccgttttctctggcggtgttcgaagataaagtgttttggacggacattatcaacgaagccatcttcagcgccaatagactgaccgggagcgatgtgaacctcctcgccgaaaacctgctgagcccggaagatatggtgctcttccataacctgacccaacctcggggagtcaactggtgtgaacgaaccaccctgtcgaacggaggatgccagtacctctgtttgccagccccgcagatcaacccgcactcgccgaagttcacttgcgcatgtcctgacggaatgctgctggcccgcgacatgcgctcgtgcctgacggaagcggaggccgccgtggcaacccaagagactagcactgtgagactgaaagtctcaagcaccgcggtgaggactcagcacaccaccactagacctgtgcccgacacctccagactccccggagccacgccgggactgactactgtggaaatcgtcacgatgtcgcaccaagcactgggagacgtggcgggcagaggcaacgagaaaaaaccatcgtcagtccgcgccctctccatcgtcctcccgatcgtgctgctcgtgttcttgtgcttgggcgtgttcctgctgtggaaaaactggcgccttaagaacatcaattccatcaattttgacaacccggtgtatcaaaagaccactgaggatgaagtacatatctgccataaccaagacggatactcgtacccatccagacaaatggtgtcgctcgaggacgatgttgcc

SEQ ID NO: 16333 - DNA, 2580 bp, synthetic construct
  misc_feature 1..2580: note = source = /note="Description of Artificial Sequence: Synthetic coding sequence"
  source 1..2580: mol_type = other DNA
atgggtccttgggggtggaaactgcgctggacagtcgccttgctgctcgccgctgcgggcacagccgtgggggatcgatgtgaaagaaatgaatttcagtgccaggacgggaaatgcattagttataaatgggtctgtgatggatccgctgagtgccaggacggatcagatgagtcccaagaaacatgtctcagtgtcacctgcaagtcgggggactttagctgcggcggaagagtgaatagatgcattccccagttctggagatgtgatggccaggttgactgtgacaatggcagcgacgagcagggctgtcccccaaagacctgttcacaggatgaattcagatgccacgatggcaagtgtatctctaggcaatttgtgtgcgactctgaccgtgactgtctggacggatccgatgaagcatcctgccccgtgcttacgtgtggcccggcgagcttccaatgcaattcctctacttgcatcccacagctgtgggcctgcgacaatgaccccgattgtgaggacggttcggatgagtggccacagagatgtcgcggactctatgtatttcaaggggatagtagcccctgttctgcattcgaattccactgtttgagcggcgaatgcatccatagctcctggcgatgcgacggggggcctgactgtaaagacaagtctgacgaagagaattgcgccgtggctacatgtcggccggacgagttccagtgctcagatggcaattgcatacatggaagccggcagtgtgatcgggagtacgactgcaaggatatgtcagacgaggtaggatgtgtgaatgtgacactctgcgaaggccccaacaagttcaaatgtcacagcggtgagtgtataaccctggataaggtgtgtaatatggcccgcgattgtcgcgattggagcgatgagcctatcaaggagtgtggtacaaacgaatgcttggacaataacggaggttgctcacatgtgtgtaatgacctgaaaataggcgccgagtgtctttgcccagacggtttccagttggttgctcaacgtcgatgcgaagacatcgacgagtgccaagacccggacacctgtagccagctgtgtgttaatctcgagggtggttacaaatgtcagtgcgaagagggctttcaacttgacccacacaccaaagcctgcaaggcagttggatcaatcgcatacctgttctttactaaccgacacgaggtgcgaaagatgacgctggaccgatccgagtataccagtctgattcctaacctcagaaatgtggtggcccttgacaccgaggtagcgtctaaccgtatctattggagcgatctgtcccagcgcatgatatgctccacacagttggatagagcccacggtgtctcaagttatgacacagtgatcagcagggacatacaagcaccggacggactggctgttgactggatccattccaacatctattggacagactctgtcctcggcactgtcagcgtggccgacacaaagggtgtaaaacggaagacgctcttccgggaaaacgggtccaaaccccgggcaatcgtggtcgacccggtgcacggctttatgtactggacagactggggaacaccggccaagattaagaaaggcggcttgaatggtgtggacatatactccctggtaacggagaacatccagtggccgaacggcataaccctcgacctgctctcaggcaggctctactgggtggactctaaactgcatagtatctcatcaattgatgtgaacggcgggaatagaaagaccatactggaagatgagaaacgactagcgcatcctttctcgcttgccgtgtttgaggacaaagtcttctggactgacattattaatgaggctatcttctccgctaaccggctcaccggatccgatgttaacctactggccgagaacttactgtcacccgaagacatggtactctttcacaacctgactcagcctcggggcgtgaattggtgcgaaaggactaccttgagtaacggaggttgccagtacttgtgtctccccgccccccagatcaatccccattcccctaaatttacatgtgcttgtcccgacgggatgttactcgcaagagatatgcgtagttgcttgacagaggccgaggctgcagtagcaacgcaggagactagcacggtcagattgaaggtctcgtctacggccgttaggacccagcacactaccacaagaccagtgccggatacaagcagattaccaggggctacccccggcctcactaccgtcgagatagtaacaatgtcacatcaggccttgggcgatgtagcaggcagaggcaatgaaaaaaagccatccagcgtgcgagcactctcaatcgtgctccctatcgttctcctcgtttttctgtgcttgggagtttttctgctttggaaaaattggcgactaaaaaacatcaactcgattaatttcgataaccctgtgtatcagaagacaactgaagacgaggtgcacatctgccacaaccaggacggctattcctacccctcgcggcagatggtaagtttagaggatgacgtcgct

SEQ ID NO: 16334 - DNA, 2580 bp, synthetic construct
  misc_feature 1..2580: note = source = /note="Description of Artificial Sequence: Synthetic coding sequence"
  source 1..2580: mol_type = other DNA
atgggcccctggggatggaaattacgttggacagttgcgctgctgcttgccgccgcgggtaccgcggttggcgaccggtgtgaaaggaatgagttccagtgtcaagacggaaaatgtatcagctacaaatgggtctgcgatggatccgcggagtgccaggacggaagcgatgaatcccaggaaacctgtctaagcgtgacatgcaaaagtggagatttttcatgcggcggacgggtcaaccgctgcattccacagttttggcggtgcgatgggcaagtcgactgtgacaatggctctgatgagcagggttgccctccaaagacctgtagccaggacgaattccgctgccatgacggaaagtgtatctcaaggcagttcgtgtgcgatagtgacagggattgcctggatgggtcggacgaggcttcctgcccggtgcttacttgtggccccgctagctttcagtgcaatagtagcacgtgcattccacaactgtgggcatgtgataacgatccagactgcgaggatggatctgatgagtggccccagcggtgtcgcggactgtatgtgtttcagggtgactccagtccctgctccgccttcgaatttcactgtctgagtggagaatgtatccactcgagttggagatgtgatggggggcctgattgcaaagacaagagtgatgaggagaattgtgcagttgcaacttgccggcctgacgaatttcaatgcagtgacggaaactgcatccatggcagccggcagtgcgatcgggagtacgattgtaaagatatgtcagatgaagtggggtgcgttaacgtgaccctttgtgagggccctaacaagtttaagtgccatagtggggagtgcatcactctggataaagtctgtaatatggcaagagattgtcgtgattggtcagatgagccaatcaaagaatgtgggaccaacgaatgcctggacaataacggcggatgctcgcatgtctgtaatgacctgaagattggtgctgaatgtttgtgtccagatggcttccagctagtggcccaacggcggtgcgaggatatagacgagtgccaggacccagatacctgttctcagctgtgcgttaacctcgaggggggctacaagtgtcagtgcgaggagggatttcagcttgatccgcacactaaagcttgtaaagcggtcggatccatcgcatatttgtttttcacgaacaggcatgaagtccgcaagatgaccctggatagatccgagtatactagtcttatacctaatctgcgaaatgttgtagcgctcgacacggaagtggcctctaatcgcatctattggagcgatttgtctcaacgcatgatttgttccacccagttggatagggcacacggggtcagctcatatgacaccgtgatctcccgggacatccaggctccggacggattggctgttgactggattcacagtaacatttactggaccgactccgtcctagggacggtgagtgtggcggacactaaaggcgtgaaacggaaaaccctgttccgcgaaaatgggagcaaaccccgcgctatcgtggtagacccagtgcacggttttatgtactggactgactggggcacaccagccaagattaaaaaaggtggtctgaatggggtggatatttattccttagtgaccgaaaatattcagtggcccaatggaatcaccctggatcttctgagcggtaggctctactgggtggactcaaaactgcactcaatttcctccatagacgtgaatggtggtaaccgcaagactattcttgaggatgagaagagacttgcacaccctttttcccttgcagtttttgaggacaaggttttttggacagacataattaatgaggctatattttccgctaacagactcacagggagcgacgttaacctcttggcagagaatttgctgagtcctgaggatatggtgctctttcacaacttgacacaaccaagaggagtgaattggtgcgagaggactacgctcagcaacggaggctgtcagtacctttgcctaccagccccacaaattaatccccattcccctaagttcacctgcgcttgtccagatggaatgcttcttgcccgggacatgagatcttgcctcaccgaagccgaagcagccgtagctacccaggagacgtctactgtgagacttaaagtctctagtactgccgtgcgcacccagcacacgacgacacggcctgtcccagatacgtctaggttacctggtgctacacctggcctgacaacagtcgagattgttaccatgagccatcaagcccttggggatgtggcaggcaggggtaacgaaaagaagcctagtagcgtgagggcgctctccattgttcttccaatagttctgctggtgttcctgtgcctcggtgtattcctgctatggaaaaactggcgattgaagaatatcaactccatcaattttgataatcccgtgtaccagaagacaactgaagacgaagtccacatctgtcataatcaggacggctattcctatccctccagacagatggtgtctctggaagatgacgtggct

SEQ ID NO: 16335 - DNA, 2580 bp, synthetic construct
  misc_feature 1..2580: note = source = /note="Description of Artificial Sequence: Synthetic coding sequence"
  source 1..2580: mol_type = other DNA
atggggccctggggatggaagttgcggtggaccgtggcattgctcctggcagccgcaggaaccgccgtgggagatagatgtgaacgcaacgaattccaatgtcaggacggcaagtgtatttcctacaagtgggtgtgtgatgggtcggcggagtgtcaggacggatccgatgagagccaagagacttgcctgtcggtcacctgtaaatccggagatttctcgtgtggtggtcgcgtgaataggtgtattcctcagttctggcggtgtgatggacaagtcgattgcgataatggatcggatgaacaaggatgccctccgaaaacctgcagccaggacgagtttagatgtcatgatggcaagtgtatctccagacagtttgtctgtgattcagatcgggattgtctggatgggtccgacgaagcgtcgtgccctgtgcttacttgtggccccgcttcctttcaatgcaactcctcgacctgcattccccaactgtgggcatgcgacaatgatcccgattgcgaggacggatcggatgagtggccgcaaagatgccgcggactttatgtgtttcaaggtgattcctcaccatgctcggcgtttgaatttcactgtctgtccggagaatgtattcatagcagctggcgctgtgatggaggaccagattgtaaagacaagtcggacgaggagaactgtgcggtcgctacgtgtagaccggatgaatttcaatgtagtgatggcaactgtatacatggttcccgtcaatgcgatcgagaatacgattgtaaggacatgtcagatgaggttggatgcgtgaacgtcactctctgcgagggtcctaacaagtttaagtgccattccggagagtgcattaccctcgataaggtgtgtaacatggccagggattgtcgggattggtccgatgagccaatcaaggagtgcggaacgaacgaatgtctggacaacaatggcggatgttcacacgtttgcaacgatctgaagattggcgcggaatgcctgtgcccagatggattccagctcgtggcacagagacgatgtgaagatatcgacgaatgtcaagatccagacacgtgttcccagctctgtgtgaaccttgagggtggttacaagtgccaatgcgaagaaggatttcagctcgacccacacactaaggcatgtaaagcggtcggttccatcgcatatctctttttcacgaaccgacatgaggtccgaaagatgacgctcgacaggtcggaatacaccagcttgataccaaaccttagaaatgttgtggctcttgacactgaagtggcctcgaaccgaatctactggagcgacctttcccagagaatgatttgctcaacccagctggatcgggctcatggtgtgtcctcctatgataccgtcatttcgcgggatattcaagcacctgatgggcttgcagtcgactggattcacagcaacatttactggactgactcagtgcttggaaccgtgagcgtggctgatactaaaggtgtcaagcggaaaaccctttttagagaaaacgggtcaaaacctagggcgatcgtggtggatcctgtgcatggttttatgtactggaccgattggggcacccctgccaagattaagaagggtggacttaatggcgtggacatatactcgcttgtgactgagaacattcagtggccaaacggcataactctggatttgctttcgggaagattgtactgggtggactcgaagttgcatagcatttcttcgattgacgtcaacggaggcaatcggaaaaccattctggaagatgagaagaggcttgcccatccgttttcactcgcagtctttgaagataaggtcttttggactgatatcattaacgaggccatcttctccgcaaacaggcttactgggtcagacgtgaatctcctggccgagaacctgttgtcgccagaagatatggtcctgtttcacaaccttactcagccaagaggtgtgaactggtgtgaacgcactaccctttccaacggcggctgccaatacctgtgccttcctgcaccgcagattaatccccattcaccaaagttcacctgcgcctgtccggatggaatgcttctggcacgagatatgcgctcgtgtttgaccgaagccgaagccgccgtggcgactcaggaaacttccactgtgcggttgaaggtgtcgagcactgcggtgcggacgcaacacactaccactcggcccgtgcctgacacttccagactcccgggggcaaccccaggtctgactaccgtcgagattgtcactatgtcgcaccaggcactgggcgacgtggccggacgcggcaacgaaaagaaaccttcatcggttcgtgccctgagcattgtgctgcctatcgtgcttcttgtctttctttgtctgggggtgttccttctgtggaagaattggcggctgaaaaacatcaactcgatcaattttgataacccggtctaccaaaagaccacggaagatgaggtgcatatatgtcacaatcaggatggttactcgtacccctcacggcaaatggtgtcgctggaagatgacgtggca

SEQ ID NO: 16336 - DNA, 2580 bp, synthetic construct
  misc_feature 1..2580: note = source = /note="Description of Artificial Sequence: Synthetic coding sequence"
  source 1..2580: mol_type = other DNA
atgggaccgtggggctggaagttgcgctggacggtggcccttcttctcgccgccgcaggtactgccgtcggggaccgctgcgagcggaatgagttccaatgccaagacggaaagtgtatctcgtataagtgggtgtgcgacgggagcgctgaatgccaagatgggtcagacgagtcccaggaaacttgcctgagcgtgacttgcaagagcggagatttctcgtgtggtggtcgggtgaataggtgcatccctcagttctggagatgcgacgggcaggtggactgcgataatggaagcgacgagcaaggctgcccgcccaagacttgctcacaagacgagttcagatgccacgacggcaaatgcatatcacggcagttcgtgtgtgattcagacagagattgcctggacggatcagacgaagcatcctgcccggtgctgacttgcgggccggcttccttccagtgtaatagctcaacttgcatcccgcagctgtgggcgtgtgacaatgatcctgactgcgaagatggatccgacgaatggccgcaacggtgcagaggactctacgtgtttcagggagattcaagcccctgctcggcctttgagttccattgtctgtcaggtgaatgcatccactcttcgtggcgctgcgacggtggacccgactgcaaggacaaatccgatgaagaaaactgcgccgtggccacctgccgcccggacgagtttcagtgttcagacggcaactgcattcatggaagccgacagtgcgatcgcgaatacgattgcaaagatatgagcgatgaagtgggatgcgtcaacgtcaccctgtgtgaaggacccaataagttcaagtgccatagcggagagtgtatcactctggacaaggtctgcaacatggctagagactgtcgcgattggagcgatgaaccgattaaggaatgcggaactaacgaatgtctggataacaacggagggtgttcccatgtgtgcaacgatctgaaaatcggagctgaatgcctgtgtccagacggattccaactcgtggcgcagcgccggtgcgaggatatcgatgaatgccaggacccagacacctgttcacaactgtgcgtcaacctcgagggaggctacaaatgccagtgtgaagagggtttccagctggacccacataccaaggcgtgcaaagcggtcggctcgatcgcctacttgttctttacgaaccgacacgaagtcagaaagatgaccctggaccgctcagagtataccagccttatcccgaatctgagaaatgtggtcgcactggataccgaagtcgcctccaatcgcatatactggtcagaccttagccaacggatgatctgttcgacccagctggaccgggctcacggagtgagctcctacgacaccgttatctcgagggacatccaagcgccggatggattggcggtggactggatccactccaacatatactggaccgactcagtgctgggaaccgtgtccgtggccgatactaagggagttaagcgcaagaccctgttccgggaaaacgggagcaagccaagagcgatagtggtggacccggtccacggttttatgtactggactgattggggaactccagcaaagattaagaagggcggactcaacggcgtggacatttacagcctggtgactgagaatatccaatggccgaacggaatcactctggatctgctttcggggcggctctattgggtggattcaaagctgcactcgatctcttcaatcgatgtgaatgggggtaataggaaaactatcctcgaggacgaaaaacgcctcgcccatcctttctccttggcagtctttgaggacaaagtgttctggaccgacatcataaacgaagctatcttttcggcaaaccggctgaccggctccgacgtgaacttgctggcggagaacctcctttcgccagaggacatggtcctcttccacaatctgactcagccacgcggcgtcaattggtgcgagaggaccactctctccaacgggggctgccagtacctttgtctccccgctcctcagatcaacccacactcgcctaagttcacctgtgcgtgccctgatggaatgctgttggcgagagacatgcggtcctgcctgaccgaggcagaggctgccgtggcaacgcaagaaacctcaacggtgaggttgaaagtctcgtcgactgccgtgaggacccagcacaccactacccggcctgttcccgataccagccgactgccgggagccactcctggactgaccactgtcgaaattgtgaccatgtcccatcaggccttgggcgatgtcgccgggagaggaaatgagaagaagccgtcgtcggtgcgcgccctgtccatcgtcctgccgatcgtgcttctcgttttcctgtgcctgggcgtctttctcctctggaagaattggcgcctcaagaacattaactcgatcaacttcgacaaccctgtgtaccagaaaacgacggaggatgaagtgcacatctgccacaaccaggacgggtactcgtacccatcccgacagatggtgtccctcgaagatgacgtggct

SEQ ID NO: 16337 - DNA, 2580 bp, synthetic construct
  misc_feature 1..2580: note = source = /note="Description of Artificial Sequence: Synthetic coding sequence"
  source 1..2580: mol_type = other DNA
atgggaccatgggggtggaaacttcgatggaccgtggcactcctgctggccgccgcggggaccgcggtgggagacaggtgcgagcgaaacgagtttcagtgccaggacggcaagtgtatctcctacaagtgggtctgcgacggctcggcagaatgtcaagacgggtcagatgagtcccaggaaacctgcctgtccgtgacttgcaagagcggagacttctcctgcggagggcgggtcaaccgctgcattccgcagttctggaggtgcgatggacaagtggactgtgacaacggatctgacgagcaggggtgcccgccgaaaacctgctcccaagatgaatttcgctgccatgacggtaagtgcatctccaggcaatttgtgtgtgactccgaccgggactgcctggacggatcggacgaagcctcctgcccagtgctgacttgtggcccggcgagcttccaatgcaattcgtcgacctgcatcccgcagttgtgggcttgcgacaacgacccagactgcgaggatggatccgacgaatggcctcagagatgcagaggactctacgtgtttcagggagacagctcgccgtgctcggcattcgagtttcactgcctgtcgggagagtgcatccactcgtcatggagatgcgacggcggacctgattgcaaggacaagtcggatgaggagaattgcgccgtggccacctgtcggccagatgaatttcagtgttcggacggaaattgcatccacggctcgcgccagtgcgaccgcgagtacgattgcaaagacatgagcgatgaagtgggatgtgttaacgtgaccctgtgcgagggtccgaacaagttcaagtgccattcaggggaatgtatcacgctggataaggtgtgtaacatggctagggactgtcgggattggagcgatgaacccatcaaggaatgcggaactaacgaatgccttgataacaacggcggctgtagccacgtctgcaacgatctgaagatcggagctgagtgcctctgcccggacggttttcagctggtggcacaacgccggtgcgaggacatcgatgaatgtcaggaccctgacacttgctcacagctgtgtgtgaacctggaaggcggttacaaatgccagtgtgaagaggggttccagctcgatccacacacgaaggcctgcaaggccgtgggctccattgcctacttgtttttcaccaatcgccacgaggttagaaagatgactctcgacagatccgagtacacttccttgatccctaatctccggaacgtggtggccctcgataccgaggtggcgagcaaccgtatctactggtccgacctctcacaacgcatgatctgctcaacccagctcgaccgggcgcatggagtgtcatcatacgacaccgtcatctcaagggacatccaagctccagatggactggcggtcgactggatccactcgaatatctactggaccgattcagtgcttggcacggtcagcgtggcggataccaagggggtgaagcggaaaactctcttcagagaaaacggaagtaaacctcgggccatcgtggtggacccggtgcatggatttatgtactggaccgactggggaacgccggccaaaatcaaaaaggggggcctgaacggagtcgatatctattcactggtgaccgagaatatccagtggcctaacggcataaccctcgatctgctgtcaggacgcctgtattgggttgattcaaagttgcactccatttcgtccatcgatgtgaacggaggtaataggaaaaccattctggaagatgaaaaaaggcttgctcacccgttttcattggccgtgtttgaggacaaggtgttctggactgacataatcaacgaagcaatcttttccgctaatcggctgaccggaagcgacgtcaatcttctggcggaaaacctgctgagcccggaggacatggtcctgttccacaaccttacccagccgcgcggagtcaactggtgcgaacggactactctgtccaatggaggatgccaatacctttgcttgccggcaccgcaaatcaacccccacagcccaaaattcacctgcgcgtgcccagacggaatgctgctggcaagagatatgcgctcctgtctgaccgaggctgaagccgcggtggcaactcaggagactagcaccgtgcggcttaaggtgtcctccaccgcagtgagaacccagcacaccaccactcgccctgtgccggatacctcgcggcttccaggagctactccaggcctcacgacggtggagatcgtgaccatgtcgcatcaagccctgggagacgtcgccggaagaggaaatgagaagaaaccgagctccgtgagagccctgagcatcgtgctgccgattgtcctcctggtctttctttgccttggcgtctttctcctctggaagaactggcggctgaagaacatcaactccatcaactttgataatccggtctaccaaaagactaccgaggacgaagtgcacatttgccacaaccaagacggttactcctacccgtcccggcaaatggtttcgctggaagatgatgttgca

SEQ ID NO: 16338 - DNA, 2580 bp, synthetic construct
  misc_feature 1..2580: note = source = /note="Description of Artificial Sequence: Synthetic coding sequence"
  source 1..2580: mol_type = other DNA
atgggaccctgggggtggaagctgcgatggacggtggccttgctgcttgccgcagccggcactgccgttggcgacaggtgcgagagaaacgagttccagtgtcaggacggcaagtgcatttcctacaagtgggtgtgcgatggttccgctgagtgccaggatggctcggatgagagtcaggaaacttgtcttagtgtaacttgtaagtctggcgacttttcctgcggaggccgagtgaatcgctgcattccccagttttggcggtgcgatggccaggttgattgtgacaacggatccgacgagcagggctgtcccccaaagacctgctcacaggacgagttccgatgtcacgacggcaaatgtatatccaggcagtttgtgtgcgactcagaccgggattgtctggacggctccgacgaagcgtcctgccccgtgctgacctgcggccccgccagctttcagtgcaattcctccacctgtattccacagttatgggcctgcgataatgatccggactgcgaggatggttcggacgaatggcctcagaggtgcaggggactgtatgtgttccagggcgatagctctccctgtagtgcatttgagtttcactgcttaagcggggagtgtatccacagttcctggcgctgcgatgggggtcctgactgtaaagataaatctgatgaggagaattgcgccgtcgctacctgccgcccagacgagttccagtgcagtgatggaaattgtatccacgggtctaggcagtgcgaccgagagtacgactgcaaagatatgagcgatgaggtgggctgtgtgaacgtgacactgtgcgaaggacccaacaagtttaagtgccattccggagaatgcatcaccctggataaagtatgcaacatggctagggattgtcgcgactggtcggatgagcccattaaagaatgcggtacgaacgagtgtttagataacaacggaggctgtagtcacgtgtgtaacgacctgaagataggggccgaatgcctctgccctgacggtttccagctggtcgctcagaggaggtgtgaagatatcgacgaatgtcaggatcccgacacatgttcccagttatgcgtgaacctcgagggaggatataagtgtcagtgcgaagaggggtttcagttagatccccataccaaagcgtgcaaggctgtaggaagcattgcttatctgttctttaccaatagacatgaagtcaggaagatgacgcttgacagatctgaatatacctctctgatccccaacctcaggaacgtcgtggctctcgatacagaggttgcatctaacaggatctactggagcgacctgtcccagcgcatgatctgtagtacgcaactggaccgtgcgcatggagtgtccagctacgacactgtcatcagccgcgacatccaagcccccgatggattggcagttgactggatccattccaacatctactggactgattccgtgctgggcactgtgagcgttgcagataccaagggtgttaagcgtaagaccctgtttcgtgaaaacggtagcaagccgcgggccatcgtagtggaccctgtacacggctttatgtattggacagattggggaaccccagccaagataaaaaaaggtgggttgaacggtgttgacatttatagcctggttacggagaatatccagtggccaaacgggatcacccttgacctgctgtccggccgcctatactgggtggattccaagctccactcaatttcttccatcgacgttaacggaggcaaccgtaaaaccattctggaggacgagaaaagattagcccaccctttcagcctcgctgtgtttgaggataaggtgttctggaccgacattattaatgaagccatcttttcggccaatagactcacaggtagcgacgtgaaccttctggctgagaaccttctaagccctgaagatatggttcttttccataacctgacccagcctagaggtgtaaattggtgcgagaggactactctctctaatggtggctgtcagtatctatgcctacctgcaccacagatcaatccccattccccaaaatttacctgcgcatgcccggatggaatgctgcttgcacgcgacatgcggtcatgcctgacggaggctgaggccgccgtggccacacaggagacaagcaccgtgaggctgaaagtgagctcgactgcagtcaggacccaacacaccactacccgcccagtacctgatacctccagactgccaggtgctactccgggtcttacaaccgtcgagattgtgacaatgtcccatcaggccttgggtgacgttgcgggcaggggaaacgaaaagaagccttccagcgtgagagcgctgtccatcgtgctgcccatcgtactcctggtgtttctgtgtctaggagtgttcctcttatggaaaaactggcgattgaagaatataaatagtatcaattttgataacccggtgtaccaaaaaacaaccgaagacgaagtccatatttgccataaccaggacggctatagctatcctagtaggcagatggtcagcttggaggatgatgttgct

SEQ ID NO: 16339 - DNA, 2580 bp, synthetic construct
  misc_feature 1..2580: note = source = /note="Description of Artificial Sequence: Synthetic coding sequence"
  source 1..2580: mol_type = other DNA
atggggccctggggttggaagctccgatggaccgtcgctctgctgctggcagccgctggcaccgccgtgggtgaccgctgtgaaaggaatgagttccagtgccaagatggaaagtgcatcagttacaagtgggtctgtgatggctcggccgagtgtcaagacggcagcgatgagagccaagagacttgcttatcagttacatgcaagtccggagacttcagttgcggcggcagagtcaatcggtgcattcctcagttctggaggtgtgacgggcaggtggactgcgataacggctctgatgagcaggggtgtccgccaaagacctgttcgcaggacgaattcaggtgtcacgatggtaaatgcatcagccgacagtttgtctgtgactctgacagggactgtctggatggcagcgacgaggccagttgtcccgtactgacctgtgggccagccagcttccagtgcaacagtagcacctgtatcccacagttgtgggcctgtgacaacgaccccgactgcgaagacgggagtgacgaatggcctcagcgctgtagaggcctttacgtatttcagggcgatagcagcccatgttcagcttttgagttccactgcttgtcaggcgagtgcatccactcctcatggagatgtgatggtggaccagactgcaaggataaatcggacgaggaaaattgtgctgtcgcaacctgcaggccggacgagttccagtgctccgacgggaactgtatacacggctctcggcagtgcgacagagagtatgattgcaaagatatgtccgatgaagtaggctgtgtaaatgtaaccttgtgcgaggggccaaacaagtttaagtgccactctggtgagtgcatcactctagacaaagtgtgtaatatggctagagactgcagggattggtctgatgaacccatcaaagagtgtgggacaaatgaatgcctggacaacaatggcggctgcagccatgtgtgcaatgacttgaagattggtgccgagtgtttatgcccggatgggtttcagctcgtggcccagcgtcgttgcgaagacatcgatgagtgtcaggatcccgacacatgtagccagctatgcgtaaacctggaagggggctacaagtgtcagtgcgaggaggggttccaacttgatccacacaccaaagcatgcaaggccgtgggatcaattgcctacttgtttttcaccaaccggcacgaggtgcggaagatgacactggatcggtctgaatatacctcactgatacctaatctaaggaacgtggtggcgctggacactgaagtggccagcaaccggatctactggtcagacctcagccagagaatgatatgtagcacccagctagacagggcacacggagtttcttcatatgacactgtaatttcccgggacattcaggccccagatggcctggcggtggactggatccacagtaacatatactggaccgatagtgtgctaggaaccgtttccgtggccgatactaaaggagtgaaaaggaagactttgttccgggaaaatggaagcaagccgcgagcgattgtggttgacccagttcacggcttcatgtattggaccgattggggcaccccggccaagatcaagaagggaggcttgaacggcgttgatatctacagtttggtgaccgagaatatacagtggcctaacggaatcacactggacctcctcagcggcagactgtattgggttgatagcaagctacattctatctcaagtatcgacgtcaacgggggcaaccggaaaacaatcttggaggacgagaagcggctcgcccaccctttttcactagccgtctttgaagacaaggtgttttggactgatatcattaacgaggccatattttccgcgaatcggctgactggcagtgatgtgaatctgctcgcggagaacctgctgagccctgaagacatggttctatttcataacctcacacaaccccgaggggtcaactggtgcgagaggacaacactgagcaacggcggatgtcagtacctgtgcctgccagctccccagatcaaccctcactcgccgaaattcacctgcgcttgcccagatgggatgctcctcgctagggatatgaggtcctgtctgactgaagcagaagccgctgttgccacacaagaaacctctactgtcagactgaaggtttccagcaccgccgtccggactcagcacactacaactcgtccagttccagacacgtcccgcttaccaggagcaaccccgggcctgaccacggttgaaattgtgactatgagccatcaggccttgggggatgtagctggacgcgggaatgaaaaaaaaccatcttccgtgcgggctttatctatcgtgctacctatcgtgctcctggtgtttctctgtctgggagtctttctcctctggaagaattggagattgaaaaatatcaattcaatcaattttgataaccctgtctaccagaagacaactgaggacgaagtccacatctgtcacaatcaggacggctactcctatcctagcagacagatggtcagcctagaggatgacgtcgcc

SEQ ID NO: 16340 - DNA, 2580 bp, synthetic construct
  misc_feature 1..2580: note = source = /note="Description of Artificial Sequence: Synthetic coding sequence"
  source 1..2580: mol_type = other DNA
atgggaccatggggttggaaattgaggtggaccgttgccctactgcttgctgccgcgggaactgccgtgggagatcgctgtgaaaggaacgagttccagtgtcaggacgggaagtgcatctcctacaagtgggtgtgtgatgggagcgctgaatgtcaagacggctccgatgaaagccaggaaacgtgccttagtgtgacatgcaaatctggcgacttcagctgtggggggagagtgaatagatgtataccacagttttggaggtgcgacggccaggtggattgtgacaacgggtccgacgagcagggttgcccgcctaagacgtgttctcaggacgagtttcgttgtcatgacggaaaatgtattagccgtcaatttgtctgtgacagtgaccgggactgccttgatgggtccgatgaggcaagctgcccggttttgacttgtgggcccgcctctttccagtgcaactcgtccacatgtattcctcaactttgggcctgcgataatgacccggactgcgaagacggaagcgacgagtggcctcagcgatgtcgggggttatatgttttccagggcgatagctcaccttgtagcgccttcgagttccattgtctcagcggagaatgtattcactccagttggagatgtgacggagggcccgactgtaaggacaagagcgacgaggaaaactgcgctgtggcaacatgcagacccgatgagtttcagtgtagcgacggtaactgtatccacggttccagacagtgcgatcgcgaatatgactgcaaggacatgagtgatgaagtcgggtgcgtgaacgtgacgttgtgtgagggcccaaataagtttaaatgtcactccggagagtgtatcacacttgacaaagtatgcaatatggcacgggactgtagagattggtctgatgaacccatcaaggagtgtggaactaacgaatgcctggataataacgggggctgttctcacgtttgcaacgatctaaagattggcgcagaatgcctatgccctgacggattccaactggtggcacaacggcgctgtgaagatatagacgagtgccaggatccagacacctgcagccagctgtgcgtgaacctcgagggtgggtacaagtgtcaatgtgaagaggggttccagctggacccccatacaaaggcttgcaaagccgtcggctctatcgcctatctctttttcaccaacaggcacgaagtgagaaaaatgacgctggatcgctcagaatacacgtccctcattcctaacctgcgaaatgttgtggcactcgatacggaggttgcgtcaaataggatttattggtcagacctgtcccagaggatgatctgtagcactcagcttgatcgggcccacggagtaagttcttatgatacagtgatcagccgggacatccaagctccagatgggcttgccgttgactggatccattccaatatctactggacggattcagtgttgggaaccgtgtctgttgcagacacaaaaggtgtgaagaggaaaaccttgttcagggaaaacggctcgaagcctcgagccatcgttgtggaccccgtccatggttttatgtactggaccgattggggcacacctgccaagatcaagaaaggaggactcaacggagtagacatctattccctcgtgaccgaaaacattcagtggccgaatggcatcaccctggatctgctctccggccgcctgtactgggtggattccaaactgcattcaatttcttccattgacgtcaacggtgggaaccgaaaaactatcctcgaggacgagaaacggctggcccatcctttctccctagctgtgtttgaggacaaagtgttctggaccgacatcattaacgaagcaatattttctgccaatcgcctgaccggttccgacgtgaatcttttggcagaaaatctgctgagcccagaggacatggtgttgttccataacctcacacagcctaggggcgttaactggtgtgagcgcaccactctgtccaatggcggctgccaatatttatgtcttcctgccccacagatcaacccacactctccgaaattcacctgtgcttgtccagacggaatgctcctcgctagggatatgagatcctgtctgacagaggcagaggccgcggttgccacacaggagacatctaccgtacgtttgaaagtcagcagcacagcagtgcggacacagcacacaaccacccgacctgtgcccgacaccagtaggttacccggagctactccgggcctaaccactgttgagattgtaaccatgtctcatcaggccctcggcgatgtcgctgggagagggaatgagaaaaaaccaagcagtgttcgggccctatcaatcgtcctgccaatcgtgctgctggtttttctatgtcttggagtgttcctcttatggaagaactggcggcttaaaaatattaacagtatcaatttcgacaacccggtgtaccaaaagacaacagaagatgaggtgcacatttgtcataatcaagatggatactcgtacccaagcaggcagatggtatcgcttgaggatgatgtggcc

SEQ ID NO: 16341 - DNA, 2580 bp, synthetic construct
  misc_feature 1..2580: note = source = /note="Description of Artificial Sequence: Synthetic coding sequence"
  source 1..2580: mol_type = other DNA
atggggccgtggggatggaaactcaggtggacggtcgcccttctgttggcggcagcgggaactgccgtgggtgacaggtgtgaacgcaatgagttccagtgccaagatggaaagtgcatctcttataagtgggtctgcgacggctcggcagagtgtcaagacggatcggacgagtcgcaagaaacgtgtctgtcagtcacctgtaagtccggagacttcagctgtggaggcagggtgaatcgctgtatcccccagttctggcgatgcgacggccaagtggactgcgacaacggaagcgacgaacagggctgcccacctaagacctgtagccaggatgagttccgctgtcacgatggaaaatgtatctcacggcagttcgtctgcgacagcgatcgggattgtctcgatggttcggacgaggcgtcctgccccgtcctgacctgcgggccggcatcgttccagtgcaactcaagcacctgcatccctcaactttgggcatgtgataatgacccggactgcgaagatggctcagatgagtggccgcaacgttgccggggcttgtacgtgttccagggagactcgagcccctgctcagcgttcgaatttcactgcctgtccggcgagtgcattcatagctcatggagatgcgacggcggacctgactgcaaggataaatcggacgaagaaaattgcgcagtggccacctgccgcccagatgaatttcagtgctccgacggcaattgcattcatggatcgcgccagtgcgatcgggagtacgactgtaaagacatgtcagacgaggtgggatgcgtgaacgtgaccctgtgcgaaggccctaataagttcaagtgccattcgggtgaatgcatcactctcgataaggtctgtaacatggcccgcgactgtcgcgattggagcgatgaaccgatcaaggaatgcggtactaacgaatgcctggacaataatgggggctgctcccacgtgtgcaacgacctgaagatcggagccgagtgcctttgcccggacggatttcaacttgtggcacagagaaggtgcgaggacatcgacgagtgccaagatccggacacttgttcccagctgtgtgtcaacctggagggcggttacaaatgtcaatgcgaggagggcttccaactggatccacataccaaggcgtgcaaagccgtcggaagcattgcgtaccttttctttacgaaccggcatgaagtgcgcaagatgactcttgatcggtccgagtacacctccctgatcccaaacctgcggaacgtcgtggccctggacactgaagtcgcaagcaatcgcatctactggtccgacctgtcgcaacggatgatatgctccacccaattggacagagcgcacggggtatccagctacgacaccgttatttcgcgcgatattcaggcaccggacggactggccgtggactggatccactcgaacatctactggactgactcagtcctcggtactgtgtcagtggccgatactaaaggagtcaagcgcaaaacgctctttcgtgagaatggaagcaagccgcgcgcgattgtggtggaccccgtccacggatttatgtactggaccgattggggaaccccggccaagataaagaaaggcgggctgaacggcgtggacatctacagcctggtgaccgagaatatccaatggcctaacggaattaccctggaccttctgtcgggaagattgtactgggtggactcaaagctgcactctatctcatcgatcgacgtgaacggaggtaaccgcaagaccatcctggaagatgaaaagcgactggcacacccgttcagcctcgcggtgttcgaagataaggtgttttggaccgacatcatcaacgaagcaattttcagtgcgaatcgcctgactggttctgacgtgaacctcttggcggaaaacctcctgtccccggaagatatggtgctgttccacaacctcactcagccgagaggagtgaactggtgtgagagaaccaccctgtcaaacggaggatgtcagtacctttgcctgccagcccctcagatcaacccccattccccaaagtttacgtgtgcttgtcctgatggaatgctgctcgcccgggatatgcggagctgcctgaccgaggccgaagcagccgtcgcgactcaggaaacgtcaactgtgcgcctgaaggtttcgtcgactgccgtgcggacccagcacactactacccgcccggtgccggatacctccaggctgccgggagctaccccaggcctgactaccgtggaaattgtcactatgtcccaccaagccctgggagacgtggcggggaggggcaatgagaaaaagccttcgtccgtgcgggccctgtcgatcgtgctgccaatcgtgctgctggtgttcctgtgcttgggagtctttctcctgtggaagaattggcggctgaagaacattaacagcatcaattttgacaacccggtgtaccagaaaactactgaggatgaggtgcatatctgccacaatcaagacggatactcgtacccctcccgccagatggtgtcgctggaggacgatgtggct

SEQ ID NO: 16342 - DNA, 2580 bp, synthetic construct
  misc_feature 1..2580: note = source = /note="Description of Artificial Sequence: Synthetic coding sequence"
  source 1..2580: mol_type = other DNA
atgggaccgtggggatggaagttgcgttggactgtcgccctcctgttggctgccgccggtactgccgtcggtgaccgctgcgagcgaaacgagttccagtgccaggatggtaagtgcatcagctacaagtgggtttgtgatggaagcgcggagtgtcaggatggatctgatgagtctcaggagacctgcttgtccgtcacctgcaagtccggtgacttctcctgcggtggccgtgtgaaccggtgcatcccgcagttctggcgttgcgatggtcaggtggactgcgacaacggttccgacgagcagggatgcccgcccaagacgtgctcacaggacgagttccgctgccacgacggcaaatgtatcagccgtcagttcgtgtgcgactctgatcgcgattgtttggacggctctgacgaggcttcgtgcccggttctcacgtgcgggcctgcctccttccaatgcaacagctctacctgtattccccagttgtgggcctgcgacaatgaccccgattgcgaggacggtagtgacgagtggccccaacgctgtcgaggtctctatgtcttccagggcgattccagcccttgctccgccttcgagtttcattgtctcagcggtgagtgcattcacagctcctggcgttgtgacggtggtcccgactgcaaggataagtctgatgaggaaaactgcgccgtcgcgacatgcagaccagacgaatttcaatgctcggatggtaactgcatccacggttcccgccaatgtgaccgcgagtacgactgcaaggatatgagtgacgaggttggctgcgtgaacgttacactctgtgagggtcctaataaattcaagtgtcactccggcgaatgcatcaccttggacaaggtctgtaacatggcgagggattgcagggactggagcgatgagcccattaaggagtgcggcaccaacgagtgtctcgataacaacggtggctgctctcacgtctgcaacgacctcaagatcggtgcagagtgcctgtgcccggatggtttccagctcgtcgcccagcgccgatgcgaggatatcgatgagtgccaagatcccgatacttgctctcagctctgcgttaatctagaaggtggttacaagtgtcagtgcgaggaaggtttccagctggacccccacacgaaggcttgcaaagcggttggttcaatcgcttaccttttcttcaccaatcgccacgaggtaagaaagatgacattggatagatccgagtataccagcctcatcccgaatctgaggaacgtcgtggctcttgataccgaagttgctagtaaccggatttactggtctgacctcagtcagcggatgatctgcagcacccagctggacagagcccatggtgtcagcagctacgacactgtcatttctcgtgacatccaggcccctgatggacttgccgtcgattggatccactcgaatatctactggaccgattccgttctgggcaccgtcagtgtcgcggacacaaagggagttaagagaaagactcttttccgtgagaacgggtccaagccccgagccatcgtggtcgatccggtccacggctttatgtattggaccgattggggaacccctgctaagatcaagaagggcgggctgaacggcgtcgatatctattctctcgtcaccgagaacatccaatggcccaacggtatcactcttgacttactttcgggtcgtctctactgggttgattctaagctgcattctatctccagcattgacgttaacggtggtaatcggaagactatcctggaggatgagaaacgtctcgcccatcctttctccctggcagtgtttgaagacaaggtgttttggacggacatcatcaacgaagcaattttctcggctaatcgtctgaccggctctgacgtcaaccttctcgccgaaaatctcctgtcgcccgaggatatggtgttgttccacaacctcacccagcctcgaggagttaactggtgcgagagaacgacgttgtctaatggtgggtgccagtacctctgccttcctgcccctcagatcaacccgcactccccgaagttcacctgtgcttgtcctgatggtatgctgctcgcccgagatatgcgttcctgcttgacagaggccgaggctgcggtcgcgactcaggagacctccaccgtaagactgaaggtctccagtacagccgtccgcacccagcacaccactacccgtccggtccctgatacttcccgcctacctggggcaacgcctggactgacaaccgttgagatcgtcactatgtcccatcaggcccttggagacgtcgctggaagaggcaacgagaagaagccgtcctcagtgcgcgccctaagcatcgtgttgcctatcgtcttgctcgtgttcttgtgcctcggggtgtttcttctgtggaagaactggcgcctgaagaacattaactcaattaacttcgataatcccgtctatcaaaagaccaccgaggacgaggttcacatctgtcataaccaggatggttacagttatccgagtcgccagatggtctcgttggaagacgacgtcgcg

SEQ ID NO: 16343 - DNA, 2580 bp, synthetic construct
  misc_feature 1..2580: note = source = /note="Description of Artificial Sequence: Synthetic coding sequence"
  source 1..2580: mol_type = other DNA
atgggtccctggggctggaagctgcggtggacggtagcactcctcctggccgcagcaggaaccgcagtgggcgaccggtgcgaacggaacgagtttcagtgtcaagatggaaaatgcatttcgtacaaatgggtctgcgacgggtcggcggagtgccaggacggatctgatgaatcacaggagacttgtctttccgtcacttgcaagtccggagatttctcgtgcggaggacgcgttaatagatgtatcccccaattttggcgttgcgatggacaggtggactgcgacaatggctcagatgaacaggggtgtcctccaaagacttgttcacaagatgaattccgctgccatgatggcaagtgcatctcaaggcagttcgtgtgcgattcggatagagactgcctggacggaagcgatgaggcttcgtgcccggtgctgacttgtggcccagcctcgttccagtgcaattcgtccacttgtatccctcaattgtgggcgtgcgataatgatccagactgcgaggacggctccgatgagtggccccaacgctgcagaggactctacgtgttccagggagactctagcccgtgctccgccttcgaatttcattgcctcagcggagaatgcattcattcgagctggcggtgcgacggaggccctgattgcaaggacaaatccgacgaggaaaactgcgctgtggccacttgccgcccggacgagtttcaatgctcagacgggaactgcatccatgggtcgcggcagtgcgatcgcgaatacgactgtaaggatatgtccgatgaagtgggatgcgtgaatgtcaccctgtgcgaaggaccgaacaaattcaagtgccactccggagagtgcataaccttggataaagtatgcaacatggctcgggactgcagggactggtccgacgaacccatcaaggaatgtggaactaacgaatgtctggacaataacggaggatgcagccacgtctgtaacgatctgaagatcggcgctgagtgcctgtgtccggatgggttccagcttgtagcccaaaggcggtgcgaggacatcgacgaatgccaagaccctgacacctgttcccagctttgcgtcaacctggaaggaggatacaagtgtcaatgcgaggaaggattccagctggacccacacaccaaggcatgtaaagccgtgggaagtatcgcgtacctgttcttcaccaaccggcacgaagttcggaagatgaccttggacaggagcgaatacacttccctgatcccaaacctgcgcaatgtggtggccctggatactgaggttgcctcgaataggatttactggtccgatctgtctcagcgcatgatctgtagcacccagttggaccgggctcatggcgtgtcatcctacgacactgtcatatctcgcgacatccaagcgccggacggactggcggtggattggatccactcgaatatctactggaccgactccgtgcttgggacggtttcagtggccgacaccaaaggtgtgaagcgcaagaccctctttagagaaaacggctcgaagccacgcgctatcgtcgtcgacccggttcatggcttcatgtactggacggactggggtactcccgcgaagatcaagaaggggggcctgaatggagtggatatctatagccttgtgactgaaaacatccaatggccgaacggaataacgctggacctgctgtcgggccgtctctactgggtcgactcaaagctgcacagcatctcgtcaattgatgtcaatggaggtaatcgcaaaaccatcctcgaggacgagaaacggctggcccacccattttccctggccgtgtttgaggataaggtgttttggaccgacattatcaacgaagcgatcttttccgccaatcgactcactgggtcggacgtgaaccttctggccgagaaccttctctcaccggaggacatggtgctgttccacaatctcacccagccgagaggtgtgaactggtgtgaacgtaccactctgtcgaacggcggatgccaatacctttgcctgccggctccacagatcaacccgcactctccgaaattcacctgtgcatgcccagacggaatgctgttggcccgcgatatgaggtcttgtctgacggaggccgaggccgctgtggcaacccaggaaacttccaccgtcagattgaaggtgagctcaacggcagtccgaacccagcacactactacccggcccgtcccggatactagccgcctgccgggagccactcccggactgactacggtggaaatcgtcaccatgtcacatcaggcccttggagacgtggcaggtcgcggaaacgagaagaagccctcatccgtgagagccctgtcgatcgtgctcccgatcgtgttgcttgtgttcctctgcctcggcgtgttcctgttgtggaagaactggcggctgaagaacatcaactcgattaactttgataaccctgtctaccagaaaaccactgaggacgaggtccacatctgtcacaatcaggacggttatagctacccgtcccgccaaatggtttccttggaagatgatgtggcg

SEQ ID NO: 16344 - DNA, 2580 bp, synthetic construct
  misc_feature 1..2580: note = source = /note="Description of Artificial Sequence: Synthetic coding sequence"
  source 1..2580: mol_type = other DNA
atggggccgtgggggtggaaacttcgatggaccgttgcactgctgttggcggctgcggggactgcggtcggggatcggtgtgagagaaacgaattccaatgccaggacggaaagtgcatctcgtacaagtgggtctgcgacggatccgccgaatgccaggatggctccgatgagagtcaggaaacttgcctgtcggtgacttgcaagagcggggacttttcttgtggaggacgcgtgaaccgatgtatcccacaattctggcggtgcgatggtcaagttgactgcgacaatggatccgacgaacagggatgccctcctaagacgtgctcacaagatgaatttcggtgccacgatggcaagtgtatctcgcgccagttcgtgtgtgatagcgatcgggactgcctcgacggctccgacgaggcttcatgcccggtgctgacctgcggaccggcctcgttccagtgcaattcctccacgtgcatcccgcaattgtgggcgtgtgacaatgatcccgattgcgaggacgggtcagatgaatggccgcaacgctgccggggactgtacgtgttccagggggattcctcgccgtgtagcgcattcgagttccattgcctctcaggcgaatgcatccactcgagctggagatgcgacggtggaccggactgtaaggataagtcggacgaggaaaactgtgctgtggccacgtgccgccctgatgagttccagtgctcagacggcaattgcatccatggatccaggcaatgtgacagggagtacgattgcaaggacatgtcggacgaagtcggctgcgtgaacgtgactctttgcgagggacctaataagtttaagtgccactcgggagagtgcatcaccctcgacaaggtgtgcaatatggcgcgcgactgccgggactggtcagacgagccaatcaaggaatgtggcactaatgaatgcctcgacaacaatggaggatgttcgcacgtttgcaatgatctcaaaatcggcgctgaatgtttgtgcccagacggttttcagttggtggcgcagcgccgatgcgaagacatcgatgaatgccaagacccggatacttgctcacagctctgtgtgaatttggaaggaggctacaagtgccaatgcgaggaaggattccaactggatccgcataccaaagcctgcaaggccgtgggatcaatcgcatatctgttcttcaccaaccggcacgaagtgcgcaagatgaccctggaccgctccgaatacacctccctcatccctaacctccgcaatgtcgtggccctggacaccgaagtggcctccaaccggatctattggtccgatctgtcccagcggatgatctgtagcacccagttggatagggctcacggagtgtcgtcttacgacaccgtcatctcgcgcgatatccaggcgccggatggactggcggtggactggatccatagcaacatctactggaccgattcggtgctcggtactgtgtcagtggccgatactaagggagtaaagcgcaagaccttgtttcgcgaaaacggatccaaaccgcgggccatcgtcgtggaccctgtgcatggctttatgtactggactgattggggtacgccggccaaaatcaagaagggtggcctgaacggcgtggacatatactcgttggtgaccgaaaacatccagtggcctaacggcattactctggatctcctctcgggcaggctgtactgggtggattcgaaactgcactcgatctcatccatcgacgtgaacggaggaaacagaaagaccatccttgaagacgagaaacgcctcgcccacccgttttccctcgcagtgtttgaggataaagtcttttggaccgacatcatcaacgaagccatcttctccgcaaatcggctgactgggtcggacgtgaacctgctcgccgagaacctgctgtcgccggaagatatggtgctcttccacaacctcacccaaccgagaggcgtgaactggtgcgaacggaccactctctcgaatggcggatgccagtacctttgtctgccggcccctcagatcaatccccacagcccaaaattcacctgcgcctgcccggacggaatgcttcttgcgagagatatgcgcagctgcttgacggaagcggaggctgcggtcgccactcaagaaacttcgaccgtgcggttgaaggtgagctccactgccgtccgcacgcagcacaccactactcggccagtgcccgacacttctcgtttgccaggcgcgactcccggcctgactacggttgagatcgtgactatgtcccaccaagccctgggagacgtggcaggaagaggaaacgaaaagaaaccatcctccgtgcgggcgctctccatcgtcctgcctatcgtgctgctggtttttctgtgcctgggagtgttcctgctgtggaagaattggagactcaagaacatcaattcgatcaatttcgacaaccccgtgtaccaaaagactaccgaagacgaggtgcacatctgccacaaccaggatggctactcgtacccttccagacaaatggtttcactcgaggatgacgttgcg

SEQ ID NO: 16345 - DNA, 2580 bp, synthetic construct
  misc_feature 1..2580: note = source = /note="Description of Artificial Sequence: Synthetic coding sequence"
  source 1..2580: mol_type = other DNA
atgggcccttgggggtggaagctccgatggactgtggcattactgctggctgccgctgggaccgctgtgggcgatcgatgtgagagaaatgaatttcagtgccaagacggcaagtgcattagttacaaatgggtatgcgacggttccgcagaatgtcaggatggctctgacgagagtcaagagacctgtctgtcagtgacttgtaagtctggagatttctcctgcggaggtagagttaacaggtgcattccgcagttctggcgatgtgacggccaggttgactgcgacaatggatccgacgagcagggctgtcccccaaagacctgtagccaggatgaatttcgctgccatgatggaaaatgtattagccgccagtttgtttgcgacagcgatcgtgattgtctggatggctccgatgaagcaagctgccctgtgttgacatgcggcccggcttccttccagtgcaactcctcaacctgtattccccagctatgggcgtgcgataatgatccagattgtgaggatgggtccgacgagtggcctcaacgctgccgagggctgtatgtcttccagggcgactcttccccctgttctgcttttgagtttcactgtctgtctggagagtgcatacatagctcttggcgttgtgacgggggcccggactgtaaggataagagcgatgaggagaattgtgctgttgctacctgtcgcccagacgagttccaatgcagcgacggaaactgcattcacgggtcgcgccagtgtgacagagaatacgactgcaaggacatgtcggatgaagtgggatgcgtgaatgtgaccctttgtgaaggccctaacaagttcaaatgtcactcgggcgaatgcattactttggacaaagtgtgcaatatggctagagactgccgggattggtccgacgaaccgattaaggagtgcggaaccaatgagtgcctcgacaataacggcggttgctcccacgtctgtaatgatcttaagataggagcagagtgtttatgccccgacggatttcagttggtggcacagcgtagatgcgaggacatcgacgagtgtcaggaccctgacacttgctctcaactgtgcgtcaacttagaaggtggttacaaatgccagtgtgaagaaggatttcagctcgatcctcataccaaggcttgtaaggccgtgggatccattgcttatctgttctttaccaacagacacgaagtgcgtaagatgacactggatcgctctgaatacactagcttgatccctaatctgcgcaacgtggtggctctcgacactgaggtggccagcaaccgcatctattggagtgacctgagccagagaatgatctgctcgactcagctcgatcgtgcccatggagttagctcttatgacacagtcatctcacgggatatacaagccccggacgggctcgcagttgattggatccactcaaacatctactggaccgattcagtgttgggaacagtgtccgtggccgataccaagggagttaaacggaaaaccctgtttagggagaatggctcgaagcccagggcgatagtcgtggaccccgttcacgggttcatgtactggaccgattggggcacacccgctaaaattaagaagggtggcctcaatggcgtggacatttacagtctggtgacagagaacatacagtggcccaacggaatcactctggacttactcagtggcaggctttactgggtcgattccaaattgcattccatatcaagcattgatgtgaacggaggcaaccgcaagaccatactagaagatgagaaacggctggcacaccctttttctctcgcagtgttcgaggacaaagtattctggaccgatataattaacgaggcaatcttttccgccaacagactgacgggatcggatgttaacttgttggcggaaaacctgctgtccccggaggatatggtgctatttcacaacctgacacagcctcgcggcgtcaattggtgcgaacggacaaccctttcaaatggtggatgccagtatctctgcctgcccgctccacaaatcaacccccactcaccgaaatttacttgcgcatgcccagacggaatgttactggccagggacatgagaagctgtctgacagaggctgaggctgctgtcgcgacacaggagacctccaccgttcgcctcaaggtaagctctacagcggtgcgcactcagcatacaacaactcgaccagtgcccgatacctcgcgattgcccggcgctacccctggcttaacaactgtagagatcgtgacaatgtcccaccaggctttgggcgatgtcgctgggcggggcaacgagaaaaaaccttcttctgtccgagctctctcaattgtattgcctattgtgctgctggtgttcttgtgtctcggggtcttcctgctgtggaaaaactggaggctgaaaaacataaactccattaatttcgataatcccgtctaccagaaaacaaccgaggatgaagtgcatatctgccacaatcaagacggctactcttacccctccaggcagatggtttctctggaggacgacgttgct

SEQ ID NO: 16346 - DNA, 2580 bp, synthetic construct
  misc_feature 1..2580: note = source = /note="Description of Artificial Sequence: Synthetic coding sequence"
  source 1..2580: mol_type = other DNA
atggggccctggggatggaagctgaggtggactgtcgctctgcttcttgcggcagccgggacagcggtcggcgatcggtgtgagcgcaacgagttccagtgccaggatgggaagtgtattagctataagtgggtgtgtgacgggtccgccgagtgccaggacggcagcgatgaatcacaagagacgtgcctaagtgttacctgcaagagcggcgactttagctgtgggggtcgcgtgaaccggtgcataccacagttctggcggtgcgacggccaagttgattgtgacaatggcagtgatgaacagggatgccctccaaaaacatgtagccaggacgagtttcgatgccacgacggcaagtgcatttcgcgccagtttgtttgcgactcagaccgcgactgtctggatggcagtgacgaagccagctgccccgttctgacttgcggccccgcatcctttcaatgtaattccagtacttgtatccctcagctgtgggcgtgcgacaacgacccggattgcgaggatggaagcgatgaatggccccagcggtgtaggggcctctacgttttccagggagactcaagcccgtgtagtgcattcgagtttcactgccttagtggagaatgcatccacagtagttggagatgtgacgggggtcccgactgtaaggacaagtcagatgaagaaaattgtgctgtcgccacgtgccggccagacgagtttcagtgcagtgatgggaattgcatccacggaagcaggcaatgcgatagggaatatgattgtaaagatatgtctgacgaggtgggttgtgtaaatgtgactctttgcgaaggcccaaataagtttaaatgtcattcaggcgaatgtatcaccctggacaaggtctgtaacatggctcgcgactgtcgcgactggagcgacgagccaattaaggagtgtggtaccaatgaatgcctcgataataatggtgggtgttcccacgtctgcaatgatctgaagattggagcggagtgcctgtgcccagacggttttcagctggtggcccagcggagatgtgaagacatagatgagtgccaggatccagatacctgttcacaactctgtgtgaatctggagggggggtataagtgtcagtgcgaggaaggcttccagctggatccacacacaaaggcctgtaaggccgtgggctcgatagcctacctcttcttcaccaaccgtcatgaagtgagaaaaatgaccttggatcggagtgagtacacatcactcattccaaacctccgaaacgtggtggccctggatacggaggttgcttccaaccgcatttattggagcgacctaagccagcggatgatatgttcgacgcaactggatagagctcatggcgtaagctcttacgacacagtgatttccagggatatacaagcgccggacggattggccgtggactggatccactcaaatatctattggacagacagcgtgctgggcacagtgagcgttgcagacaccaaaggagtgaagagaaaaacattattccgcgagaacgggtcaaagcccagggcaattgtagtggatcctgttcatggattcatgtactggaccgactggggaacacctgcaaagataaagaagggtggtcttaacggagtggacatctactccttggtcacggagaacatccaatggcccaacggcattaccttggacctgctttctggacgcctgtattgggttgactcaaagctgcacagtatctcttcgattgacgtgaatgggggcaatcggaagacgattctggaagacgagaaacgtttggcacaccctttctcattagcggtgttcgaagacaaagttttctggacagacattatcaatgaggccatttttagcgcaaaccgacttactggctctgatgtaaacttgctggccgaaaacctccttagtcctgaagatatggtactgttccataatctgacccagccgagaggggtcaactggtgcgaacgcacaacattgtccaatggcggatgtcagtacctctgcctgccggccccccagattaatcctcactctccaaagttcacctgcgcttgccctgatggaatgcttctagctagggatatgcgatcctgtctcaccgaagccgaagctgctgtggccactcaagaaacgagcactgtccgtctgaaggtgagctctacagcagtgcgtacacagcacaccacaacccgccctgtgcccgacacgtcccggctaccgggagcaacaccagggttgaccactgtggaaattgtgaccatgtcccaccaggctctcggcgatgtggctgggcggggaaatgaaaagaagccctcttctgtacgggcgctgtccattgttctgcccattgtcctcctcgtgtttctgtgcctcggcgtgtttctgctctggaagaattggaggctaaagaacataaacagtattaattttgacaaccctgtctaccagaagaccaccgaggatgaggtccacatctgccataatcaggacggatattcataccccagccgacagatggtgtctctggaggacgacgtggct

SEQ ID NO: 16347 - DNA, 2580 bp, synthetic construct
  misc_feature 1..2580: note = source = /note="Description of Artificial Sequence: Synthetic coding sequence"
  source 1..2580: mol_type = other DNA
atggggccgtggggttggaaactccggtggaccgtcgccctgctgctggccgcggcaggaactgccgtgggagacaggtgcgaacggaacgagttccaatgccaggacggaaagtgtatttcctacaagtgggtgtgcgacggatccgcagaatgccaagatggtagcgacgaaagccaggaaacgtgcctctccgttacctgcaagtcgggagatttctcatgtggagggcgagtgaatcggtgtatcccccaattttggagatgcgatggacaggtcgactgcgacaacggctccgatgagcaaggatgccctcccaaaacgtgctcgcaagatgagttccggtgccatgatggaaaatgcattagccgccagtttgtgtgcgacagcgaccgggactgcctggacggctcggacgaagcctcatgtcccgtgttgacctgtggcccggcgtccttccagtgcaactcgtcaacctgcatcccgcaactgtgggcctgcgacaacgacccggattgcgaggatgggagcgacgagtggccccagcgctgccgcggactctacgtgttccagggagacagctcgccgtgttcggccttcgaattccactgcctgtcgggcgaatgcatccacagctcctggaggtgcgatgggggaccagactgcaaggataaatccgacgaagagaactgcgccgtggccacctgtagaccagatgagttccaatgttcagacggtaactgcatccacggctcacgccaatgtgaccgcgaatacgattgcaaagacatgtcggatgaggtgggatgcgtcaatgtgactctgtgcgagggccctaacaaattcaaatgccattccggtgaatgcatcaccctggacaaggtgtgcaatatggcacgggactgtagggactggagcgacgaaccaatcaaggaatgcggaactaacgaatgtctcgataacaacggaggatgcagccacgtgtgtaacgatctgaagatcggcgcggagtgcttgtgtcctgatggattccaactggtggcccagagacgctgcgaggacattgacgaatgtcaggatccagatacctgctcccagctgtgcgtaaatctcgaggggggatataagtgccagtgcgaggaaggcttccagctcgatccgcatacgaaagcatgcaaggccgtgggaagcattgcctatctgttcttcaccaaccggcacgaagtgcgcaagatgaccctcgacaggagcgagtacacctccctgatcccgaacctgcggaacgtggtggcactcgatactgaagtcgccagcaaccgcatctactggagcgacctgtcccaacggatgatctgttccacccagctggatagagctcatggcgtctcgagctacgacactgtgatctcgcgcgacatacaggcccctgatggtttggccgttgattggatccactccaacatttactggaccgactcggtgctgggtaccgtgtcggttgccgatactaagggggtgaagcgcaagaccttgttcagagaaaacggaagtaaaccgcgcgccattgtggtggatccggtccacgggttcatgtactggactgactggggcacccccgcgaagatcaaaaaaggaggactgaatggagtggatatctacagcctcgtgactgagaatatccaatggcctaatggaatcaccctggatctcctctcaggacgcttgtactgggtggatagcaagctccactcgatctcgtcgatcgatgtcaatggaggaaaccgaaaaacgatccttgaagatgagaagagattggcgcatccattctctttggctgtgttcgaggacaaagtcttttggactgacatcatcaacgaagctatcttttcggcgaacagactcactgggtctgacgtgaatcttctggcggaaaacctcctctcaccagaggatatggtgctcttccacaatctgacccagcctcggggtgtgaattggtgtgaaaggacgactctgagcaacggtggatgtcagtacctctgtctccctgccccgcagatcaatccgcactcccccaaattcacttgcgcgtgccctgacggcatgctgctggcccgcgacatgcgctcctgcctcactgaagccgaagcagcggtcgcgacccaggagacttccaccgtgcgactcaaagtctcaagcaccgccgtgcgcactcaacacaccactactcggccggttcctgacacctcccgcctgccgggcgctaccccgggactgaccactgtggaaatcgtgacgatgtcccaccaggcgctgggagacgtggctggacgtggaaacgagaagaagccatcttccgtgagagcactgagcatcgtgctccccatcgtgctcctggtctttctgtgcctcggagtgtttctgctctggaagaactggagactgaagaacatcaacagcattaacttcgacaacccagtgtatcaaaagaccactgaagatgaagtccacatctgccacaatcaggatggatactcgtacccgtcacgccagatggtgtcactcgaggacgatgtggcc

SEQ ID NO: 16348 - DNA, 2580 bp, synthetic construct
  misc_feature 1..2580: note = source = /note="Description of Artificial Sequence: Synthetic coding sequence"
  source 1..2580: mol_type = other DNA
atggggccgtggggctggaagcttcggtggacagtggcactgcttctggctgccgcaggaactgccgtgggcgatcgctgcgaacggaacgagttccagtgccaggacggaaagtgtatcagctataagtgggtgtgtgatggtagcgccgaatgtcaagatggatccgatgagagccaggaaacatgcctctcagtcacttgcaagagtggagacttttcttgcggaggtcgggtgaaccgctgcatcccacagttctggcgatgtgacggtcaggtcgattgtgacaatggatctgatgagcagggatgtcctcctaagacctgttctcaggatgagttccggtgccacgacggtaagtgcatctcacggcagtttgtgtgtgactctgaccgagattgtcttgacggatcagatgaggcaagctgtcccgtcttgacttgcggccccgctagcttccagtgcaattcatcaacatgtataccccagctgtgggcctgtgacaacgaccctgattgtgaagacgggtccgacgaatggcctcaaaggtgccgggggttatacgtgttccagggcgactccagcccttgctccgcttttgagttccactgtctgtctggcgagtgcatccactcgtcctggaggtgcgacggaggcccagactgcaaagataaatcagatgaggaaaattgcgccgtggccacctgtagaccggatgagttccaatgttcagatggcaattgtattcatggcagcaggcagtgcgacagggaatacgactgcaaagacatgagcgacgaagtgggctgcgtgaatgtgacgctgtgcgaaggccctaacaagtttaaatgccattccggggagtgtattactcttgataaggtttgcaacatggcccgggattgtcgagactggagcgatgagcccatcaaagagtgtggcaccaatgagtgtctggacaataacgggggatgctctcatgtgtgcaatgacctgaaaatcggggctgaatgcttgtgcccagatgggttccaactcgtcgcgcagaggaggtgtgaagatatagacgagtgccaggaccctgatacttgctcccaactatgcgttaacctggaagggggctacaaatgccagtgtgaggaaggtttccaactcgatccccataccaaggcctgtaaagctgtcggcagcatcgcttatttgttctttaccaacagacacgaagtgcgtaagatgaccttggatcgctccgaatacactagcttaattccaaacctccgcaacgtggtggccctggataccgaggttgcttctaaccgcatttactggtctgatttatcccagagaatgatctgctcaacacagcttgacagggcccacggggtctcaagctacgacactgttatctcacgcgacattcaagctcccgatggcttggccgtggactggatacactcaaacatctattggactgactcagtactggggacggtctccgtggcagatacgaagggagtgaaacgcaagaccttattccgggagaatggcagcaagcctcgtgccatcgtggtggaccccgtacacgggtttatgtactggactgactggggtacacccgctaagatcaagaaaggcgggctgaatggggtcgatatctactctcttgtcactgagaacatccagtggcccaatgggatcacgcttgaccttctgtcagggaggctgtactgggtagattccaaactgcatagcatcagttccattgacgtgaacggcggtaatcgaaagaccattttagaggacgaaaagaggctcgcccaccccttttctctggctgtctttgaggacaaggtgttctggacagatatcatcaacgaagctatcttctctgctaacaggctgacaggcagtgatgtgaatctgcttgctgagaacctgcttagcccggaggatatggtgctgtttcacaacctcacgcaacctcgaggcgtgaactggtgcgaaaggacaacgctgtcgaacgggggctgccagtacttatgtctgcccgcccctcaaatcaaccctcattcccccaagtttacctgcgcctgtcccgacggtatgttgttggcacgcgacatgcgctcatgccttactgaggcagaggccgccgtggccacccaggagactagcacagttcgactgaaggtgtcatctacagcggttaggacccagcacacgaccacgagacccgttcctgacacctcaagattacccggtgccacacctggcctcaccaccgtagaaatcgtcacaatgagtcaccaggcccttggcgatgtcgccgggcgcgggaacgagaaaaaaccatccagtgtgagggctctgtccattgtgctgccaatagtccttctagtgttcctttgcctcggggtgttcctcctgtggaagaactggaggctcaaaaatattaactctatcaattttgacaatccagtgtaccagaagacaactgaggacgaggtgcacatctgtcacaatcaggatgggtactcatacccttctagacagatggtctcactcgaagacgacgtggct

SEQ ID NO: 16349 - DNA, 2580 bp, synthetic construct
  misc_feature 1..2580: note = source = /note="Description of Artificial Sequence: Synthetic coding sequence"
  source 1..2580: mol_type = other DNA
atgggcccatggggctggaaactgcgctggactgtagctcttctgctggcagccgcagggactgcagtaggagatcgttgtgaacgcaatgagtttcagtgccaggatgggaagtgcatctcttataaatgggtgtgcgacggctctgccgagtgccaggacggatcagacgaatctcaagaaacatgcttgagcgttacttgtaaaagcggcgatttcagctgcggagggagggttaacaggtgtattccacagttctggagatgtgatggacaggtggattgcgataacgggtccgacgagcaggggtgccctcccaaaacctgcagccaggatgaattcagatgccacgacggcaaatgtattagtcggcagttcgtttgtgattctgatcgggattgtctcgacgggtcagacgaggcgtcgtgtcctgtgctgacctgcggtccggcctcgtttcagtgcaatagcagcacctgtattccccagctgtgggcctgcgataacgacccagactgcgaggatgggtctgatgagtggccccagcgctgccgaggcctttacgtctttcagggggattccagcccttgctctgcttttgagttccactgtctaagcggggagtgtatccacagcagttggcgttgcgatggcggccccgattgtaaagacaagagcgacgaagaaaactgtgcggtggctacctgccgccccgacgagtttcagtgctcagacggcaactgtatccatgggtccagacagtgcgatcgagagtacgactgcaaagatatgtcagacgaggttggatgtgtcaacgtgacgctgtgtgaaggcccaaacaagttcaagtgtcacagcggcgaatgcatcacactggataaggtctgcaatatggcaagggactgtcgagactggagcgatgaacccataaaggagtgcgggacgaacgaatgtttagacaataacggaggatgctcacacgtgtgtaatgacctgaaaatcggcgcagagtgcctgtgccccgacggatttcagctggtcgcacaaaggcgttgtgaagacatagacgaatgccaggatcccgatacttgctcacagctgtgcgtaaatctcgagggcggatacaaatgccagtgcgaggaagggtttcagctggatccacataccaaggcttgtaaagctgtcgggtctatcgcttacctgtttttcactaaccggcacgaggttaggaagatgactcttgataggagcgagtataccagtttaattccgaatctaagaaatgtggtagcattggacaccgaggtagcatctaatcgcatatattggtctgacttgagtcagagaatgatctgtagtacccagctagatagagcacacggtgtgtcctcatacgataccgtgatctctagagatattcaagcccctgacggattagccgtggactggattcacagcaacatctattggaccgacagtgtgctaggtacggtgagcgtggcagatactaagggtgtgaaacgaaagacactctttcgagagaacgggtcaaagccccgggctatcgtggtggatcctgtacacggcttcatgtattggactgattgggggacaccggcgaagatcaagaagggaggactcaacggggttgacatctactcactcgttaccgagaatattcagtggccgaatgggatcacactggatctgctgagtgggagactgtattgggtcgattccaagctgcacagcataagctccatcgacgtgaatggcggtaatcgtaaaacaattctggaggatgagaaacgcctggcacaccctttttcactagccgtgttcgaagataaagtgttctggaccgacatcatcaatgaggccattttttcagctaatagattaaccggttccgacgttaatcttcttgctgagaacctgttgtctcctgaggatatggtactctttcacaacttgacacagccgaggggtgtaaactggtgtgagcgaactaccctgtcaaatggcgggtgccagtacctgtgtttaccggcacctcagatcaacccacactctccaaaattcacatgtgcctgcccagatggcatgctcttggcacgagacatgaggtcgtgcttgacggaggccgaagctgctgtggccactcaggagacgtcaaccgtgaggctgaaagtgtcaagtactgccgtgagaactcaacacactacaacgcgccctgttccagatacgagcagactacctggagccactccaggcctcacaactgttgagatagtgactatgtctcatcaagcccttggggatgtggccggccgaggaaacgaaaaaaagccatcctccgtgcgggccctatcaattgtcctccctattgtacttctagtgtttctgtgtctcggggtctttcttctctggaaaaattggaggcttaagaacatcaattctattaactttgacaatcctgtttaccagaaaacaacagaggacgaggtgcacatatgccataatcaagacgggtacagctacccgagccgtcagatggtgtcattggaggatgatgtcgcc

SEQ ID NO: 16350 - DNA, 2580 bp, synthetic construct
  misc_feature 1..2580: note = source = /note="Description of Artificial Sequence: Synthetic coding sequence"
  source 1..2580: mol_type = other DNA
atggggccatggggatggaaactgcgttggacggttgccttgctcctcgcggcagcaggtactgcggtcggtgacaggtgcgaacggaatgagttccaatgtcaggatggtaagtgcatctcttacaaatgggtgtgcgacgggtccgccgagtgccaagacggatcggacgagtcccaggaaacctgcttgtcggtgacctgcaagtccggagacttctcatgtgggggaagggtgaaccgctgcatccctcaattctggagatgcgatggtcaagtggactgtgataatggatctgatgaacaggggtgcccaccaaagacttgcagccaggacgagttccggtgccacgacgggaagtgcatttcccggcagttcgtgtgcgatagcgaccgggactgcctggacggatccgacgaagctagctgcccggtgctgacctgtggtccagcctccttccaatgtaattcgtccacttgcatcccgcagctgtgggcatgcgataacgatccggattgtgaagatggcagcgacgaatggccgcagaggtgtagaggcctttacgtgttccagggagactcgtccccctgtagcgccttcgaattccattgcctgagcggggagtgcattcattcgtcgtggcgctgcgacggcggaccggactgcaaggacaaaagcgacgaagagaactgcgcggtggcgacttgccgaccagatgaattccaatgcagtgacggcaattgtatccacgggagccgccagtgcgaccgcgagtacgactgtaaggacatgtccgacgaggtaggttgcgtcaatgtgaccttgtgcgagggcccgaacaaattcaagtgtcattcgggcgagtgtatcaccttggacaaggtttgcaacatggcccgcgattgccgggattggagcgatgagccgatcaaggagtgtggaaccaatgagtgcctcgacaataatggcgggtgttcacacgtgtgcaacgatttgaagatcggagccgaatgtctgtgccctgatggcttccagctggtagcccaaagacggtgcgaagatattgatgaatgtcaagatcccgacacctgctcccagctctgcgtgaacctcgaaggtggttataagtgtcagtgcgaagagggtttccagctggatcctcacacgaaggcatgcaaggccgtcggaagtatcgcttatctgttcttcaccaacagacacgaagtccgaaagatgacgctggaccgctcagaatacacctcactcatccccaacctgcgcaacgtggttgctctggacaccgaagtggcaagcaaccggatttactggtccgacctctcccagaggatgatctgctcaactcaattggaccgggcacacggagtgtcctcatacgacaccgtgatctcccgggacatccaagcgccggacggactcgccgtggactggatccattccaatatctactggactgattcggtcttgggaacggtttcggtcgcagatacgaaaggtgtgaagcgtaagactctgtttagggagaacgggtcgaagccaagagctatcgtggtcgacccggtgcatggattcatgtactggacggattggggaactccagccaagataaagaaagggggactgaatggagtcgatatctactcgctggtcactgagaacattcagtggccgaacggaatcaccctcgacctcctgtccggtagactgtactgggtggactcaaagctccacagtatctcctctatcgacgtgaatggcggcaaccggaaaactattctcgaggacgaaaagcgcctggcacaccccttctcgctggccgtctttgaggacaaagtgttttggaccgacatcatcaatgaagccatcttctcagccaatcgcctgaccggaagcgacgttaaccttcttgctgaaaatctgctgagcccggaagatatggtgctctttcataacctcacgcagccgagaggcgtaaactggtgcgaaaggactaccctcagcaacggtggatgccaatacctttgcttgcctgcaccgcagatcaatccgcattcacccaagtttacgtgtgcctgccctgacggcatgctgctggctcgagatatgagatcgtgcctgaccgaggctgaagcagctgtggcgactcaggagacgagcacggtccgccttaaagtcagtagcaccgccgtgcgcactcagcacaccactactcggcctgttcctgacaccagccgcctgcctggagccaccccaggactcactaccgtggagatcgtgacgatgtcgcaccaagccctgggcgacgtggcgggaagagggaatgagaagaaaccatcatcggtgcgtgcgctctccatcgtgctcccgatcgtgctccttgtttttctgtgcctgggagtgttcctgctgtggaagaactggcgacttaagaacatcaactcgattaactttgataacccggtgtaccagaaaactaccgaagatgaagtccacatttgccacaaccaggacggatactcgtacccatctcgccaaatggtgtccctggaggatgatgtggcg

SEQ ID NO: 16351 - DNA, 2580 bp, synthetic construct
  misc_feature 1..2580: note = source = /note="Description of Artificial Sequence: Synthetic coding sequence"
  source 1..2580: mol_type = other DNA
atgggcccctggggatggaagctgcgttggactgttgccctgctattagcggccgcagggacggcggtaggtgaccgctgtgagcggaatgaattccaatgtcaagatgggaaatgcattagttacaaatgggtgtgtgatgggagcgccgagtgtcaggatggctctgacgagtcccaagagacctgcttgtcagtcacttgcaagagtggagacttcagttgcggaggacgggtgaatcgttgcatcccccagttctggcgatgtgatggacaggtagactgcgacaatggatcggatgaacagggttgccctcccaagacatgctctcaagatgagtttagatgtcacgacggaaagtgtatctccaggcagtttgtctgtgactctgatcgcgattgcctagacgggtctgacgaggcttcctgccccgtcctgacatgcggacctgcctctttccaatgtaatagcagcacatgcattccacagctttgggcatgtgataatgatccggactgtgaggacggaagtgacgaatggccacagagatgccgcggcctgtatgtattccagggcgactcatcgccctgtagcgccttcgaattccattgcttgtccggtgagtgtatccacagcagctggcggtgtgacggtgggcccgattgcaaggataaaagcgacgaggagaactgcgccgtggctacgtgtagaccggatgagtttcagtgttctgacggcaattgcatccacgggtccaggcaatgcgacagagagtacgattgcaaggatatgagcgatgaagtgggctgtgtgaacgtgacactctgcgaagggcccaataagttcaaatgtcacagcggtgaatgtattactctggataaagtgtgcaatatggcacgggattgtcgtgactggagcgacgaacccattaaggaatgcgggaccaacgaatgtttagacaataacggggggtgttctcacgtctgcaacgatctgaaaatcggggctgagtgcctttgccctgatgggttccagttggttgctcagagacgctgcgaggatattgacgaatgtcaggatcccgacacctgtagtcaactctgcgtgaacctcgagggaggatacaaatgccaatgcgaagaggggtttcagctagaccctcataccaaagcctgcaaggcagtgggtagcattgcttatctattttttacaaaccggcacgaggtgaggaaaatgacccttgacaggagtgagtatacctctctgatacccaatttacgtaatgtggtggccttggacacagaagtggcttccaataggatctactggtcagacctgtcacaacgaatgatctgcagtacccagcttgacagagcacatggcgtgtctagttacgacacggttatttcccgtgacatccaggcacccgatgggctggctgtagattggatccattccaatatatactggactgattcagttttggggactgtgtccgtggccgacaccaaaggagttaaaaggaagacactgttccgggagaacggttccaagccgagggctattgtggtggaccccgtgcatggctttatgtactggacagactgggggacacctgcaaagataaagaagggagggttaaacggcgtggatatttatagccttgtgactgagaacattcagtggcccaacgggatcactctggatttgcttagtggacggctctattgggttgatagcaaactgcatagcatctcctcaatcgatgtgaacggggggaaccgcaagaccatcctagaggacgaaaaacgtttagcacatcccttttccctggctgtcttcgaggataaggtcttctggaccgacattattaatgaggctatattcagcgcgaacaggctgactggttctgatgtgaatctgcttgctgagaatctgttatcacctgaagacatggttctcttccacaatctgacacagcctcgcggtgttaattggtgtgaacgcaccaccctgagtaatggcggttgtcaatatctgtgtttgcccgctcctcagataaacccccattcaccaaagtttacatgtgcctgtcccgatggaatgctcctcgcgcgagacatgagatcctgcctgactgaggccgaagccgctgtggctacacaggagacatcgaccgtacgactgaaggtgtctagcacagccgtgagaacacagcacaccacaactcgacccgtccctgatacatcccgtctgccaggcgcaacccccgggctgacaactgtggagatcgtgacaatgtctcatcaggccctgggtgacgtagcagggaggggtaatgagaaaaagcctagcagcgtgcgtgccctcagtatcgtactccccatagtgttgcttgtgttcctgtgcctcggcgtgtttcttctgtggaagaactggaggctgaagaacatcaacagtattaattttgacaaccccgtttaccagaagacaaccgaggacgaagttcatatctgccacaaccaggatggctactcctacccctctcgccagatggtgtcccttgaggatgacgtggct

SEQ ID NO: 16352 - DNA, 2580 bp, synthetic construct
  misc_feature 1..2580: note = source = /note="Description of Artificial Sequence: Synthetic coding sequence"
  source 1..2580: mol_type = other DNA
atgggcccctgggggtggaagctgagatggacagttgcacttttactggcagcggcgggtacggccgtcggggaccggtgcgagcgcaacgagttccagtgtcaggatggaaaatgtatctcatataagtgggtgtgtgatggctccgctgagtgccaggatgggagtgatgagtcccaagagacctgcttaagtgtaacttgcaagtctggagatttcagttgtggcggaagggtcaaccggtgcatccctcagttttggagatgcgatggacaggtagattgtgataacggctctgatgaacagggctgtcccccaaagacctgtagtcaggacgagtttaggtgccatgacggaaagtgcatcagccgacaatttgtatgcgattctgaccgcgactgtctcgatggaagcgacgaggcatcgtgtccagtgctgacttgcggccctgcctcgttccagtgcaatagttccacctgcatccctcagctatgggcatgtgataatgatccagattgtgaggacgggagcgacgaatggccccaacgatgtcgtggactctacgtattccaaggcgactcttcgccttgctcagcattcgaattccattgtctgtcaggagagtgtatccatagttcttggcggtgtgacggtggccccgattgcaaagataaaagtgatgaggagaactgcgcagtggctacctgcaggccagatgaattccagtgttcggacgggaattgcatccatgggtcccgccagtgcgatagggagtacgactgcaaggatatgtccgacgaggtcggatgcgttaacgtgacattgtgcgaggggcctaacaaattcaagtgccacagcggggaatgtataaccctggataaggtgtgcaatatggcccgcgattgtagggattggagtgatgagccaattaaagagtgcggaacaaacgagtgtctcgataataacgggggctgctcacatgtttgcaacgatctgaaaattggcgcggagtgtctctgtcccgatgggttccagctggtggctcagagaaggtgtgaagatatagatgagtgtcaagatcctgacacctgttctcagctgtgcgtcaaccttgagggagggtataaatgccagtgtgaggaaggcttccagctggatccccatacgaaagcctgcaaagcggtgggctcgatcgcctatctctttttcaccaatcgacatgaggttcggaagatgacgttggataggtccgagtacaccagtctgatccccaatctgcggaacgttgtcgcattggacaccgaggtggcatcgaacagaatctattggagcgacctgtcccagcgcatgatctgctctacccagcttgacagggctcacggggtgagctcttatgatactgtgatcagtagagacattcaggccccggatggcctggccgtggattggattcacagcaacatctattggacagatagcgttctcggaactgtttctgtcgcggacaccaagggcgtgaagagaaagactttattccgcgagaacggctctaaaccccgggctatcgttgtagaccctgttcacgggtttatgtattggactgattggggaacaccggccaagatcaagaaagggggattgaacggggtggacatctattcgctggtgaccgagaacatccagtggcccaatgggattacattggatctcctgagcggacggctgtactgggtggacagcaagttgcattccattagcagtatcgatgtgaacggaggaaatagaaagactattttggaggatgagaagaggctcgcccatcccttctcactagccgtattcgaggacaaggtattctggaccgatataatcaatgaggccattttctccgcgaaccggctcacagggtctgatgtgaatctgctagcagaaaatctgctctcccctgaagacatggtgctgtttcacaacctaacccagccacggggagtgaattggtgtgagcggaccaccctgtccaatgggggctgccagtacttgtgtctgccagcccctcaaatcaacccacacagccctaaatttacgtgcgcttgccctgatggcatgctcctagcgcgggatatgaggtcgtgcctgaccgaggccgaagctgcagtcgccacacaggagacttcgactgtgcgtctgaaggtgagttctaccgcagtgagaactcaacacaccactacccggccggtgcctgacacttcccgactgcctggagcaaccccaggacttaccacagtggagatagtaaccatgtctcaccaggcattgggagatgtggcaggcagaggaaacgaaaagaagccatctagtgtcagagcgctcagcatagtgctgccaatcgtccttctcgtgtttctgtgtctgggcgtcttcctgctgtggaagaattggcggttgaaaaatatcaactccatcaattttgacaaccctgtgtatcaaaaaactactgaagacgaggtccacatctgccataaccaggacggatattcctaccccagccgtcagatggtgtctctggaagacgacgtggca

SEQ ID NO: 16353 - DNA, 2580 bp, synthetic construct; identical to SEQ ID NO: 16305
  misc_feature 1..2580: note = source = /note="Description of Artificial Sequence: Synthetic coding sequence"
  source 1..2580: mol_type = other DNA

SEQ ID NO: 16354 - DNA, 2580 bp, synthetic construct
  misc_feature 1..2580: note = source = /note="Description of Artificial Sequence: Synthetic coding sequence"
  source 1..2580: mol_type = other DNA
atgggcccctggggttggaagctgcgatggaccgttgcacttctactggctgcagctggaactgccgtgggagataggtgtgagcgcaatgaattccaatgccaagatgggaagtgtatcagttacaaatgggtttgcgacggatccgcagagtgtcaagacgggtccgatgaaagccaagagacttgtttgtctgtgacctgcaaatcaggagatttctcttgtggtgggcgagtgaaccggtgtatcccccagttttggagatgcgatggccaagtggattgtgataacggcagcgatgaacaggggtgccctccaaagacctgctcacaggatgagtttcgctgccatgatgggaagtgcatctctagacagttcgtctgtgatagcgacagggactgcttggatggcagtgacgaggctagttgcccagtcctgacgtgcggccccgccagtttccaatgcaacagttcgacatgcattcctcagctgtgggcctgcgacaatgacccagactgcgaggacggaagcgacgagtggccacagaggtgtcggggattatacgtgtttcagggagatagttcgccctgctcggccttcgagtttcattgcctcagcggggaatgcattcacagtagttggaggtgcgatggagggccggattgcaaggataaatccgatgaggagaattgcgccgtggctacctgtcgacctgacgagtttcagtgttccgatggcaattgcatacacggatctcggcaatgcgaccgagagtatgattgtaaagatatgtccgatgaagtcggatgtgttaatgtgacactgtgtgaggggcctaacaagtttaaatgccatagtggcgagtgtatcacactcgacaaagtgtgcaacatggctcgggactgtagggactggtcagacgaaccaatcaaggagtgtgggacaaacgaatgtttggacaacaacggcgggtgctcccatgtgtgtaacgatttgaagattggcgccgagtgtttgtgtccagatgggttccagttggtggcccagaggcgatgtgaggatattgacgagtgtcaggatccagatacgtgttcccaactttgtgtgaatttggagggcggttacaagtgccagtgtgaagagggatttcagctggatccgcataccaaggcttgcaaggccgtcgggagcatcgcttatctgttctttactaaccgccacgaggtccgaaagatgactctggatcgcagcgaatatacatcactaattcccaacctgaggaatgtcgtggcccttgataccgaggtggcttccaaccgtatttactggagtgacctatcccagcggatgatctgttcaacacagctggatcgtgcacatggagtaagctcgtatgatactgtgatctcccgtgatattcaggcaccagacggtctggccgtcgactggatccatagcaatatctattggactgactctgtgttgggtacagttagtgtcgctgacactaagggagtcaagaggaagacactatttagggagaacggcagcaaacctagagccattgtagtcgacccggtccacgggttcatgtattggactgactgggggactcccgcaaagattaaaaaggggggactgaacggcgtggacatctacagtctggtgaccgagaatattcagtggcctaacggcattacccttgatttgctaagcggccgactgtactgggtcgactcaaagctccactcaatcagctcaattgatgtcaatggggggaataggaagacaatcttggaagacgagaaaaggctcgcccacccattctcactggcagtgtttgaggacaaagttttttggacggacatcatcaacgaggcaatcttctccgccaatagactgacaggctcagacgtgaacctgctagcagaaaacttactgtccccagaagacatggtgcttttccataatctgacccagcctcgaggtgtaaattggtgcgaaaggacaaccttgtctaacggggggtgccaatacctgtgtctcccagctcctcagatcaacccacactcccccaagtttacatgcgcttgtcccgacggaatgctcctagcgagagatatgagatcatgccttactgaagctgaagcagcggtggctacccaagaaacaagcaccgtgagactcaaagtctctagcactgccgtgcggacgcagcacacaaccacccggcccgtccctgatacgtcacggctgccaggcgcaacccctggacttaccaccgtcgagatcgtaacaatgtcccaccaggccctcggcgacgtggctggcagaggcaatgagaagaagcctagcagcgtgagggcgctgagcattgtgctcccaatcgttttgctggttttcctgtgtctgggggtatttctcctttggaaaaattggaggctgaagaatattaattctatcaacttcgataatcccgtttaccaaaagaccactgaggacgaggtgcacatatgccataatcaggacgggtattcgtacccttcaaggcaaatggtgtctttagaggatgacgtcgca

SEQ ID NO: 16355 - DNA, 2580 bp, synthetic construct
  misc_feature 1..2580: note = source = /note="Description of Artificial Sequence: Synthetic coding sequence"
  source 1..2580: mol_type = other DNA
atgggtccctggggatggaagctccgctggaccgtggccctcctcctggcagccgcaggaaccgccgtgggcgatcggtgtgaaagaaacgaatttcaatgtcaagacggaaaatgtattagctacaagtgggtgtgcgatggatcggcagaatgtcaggatggctcggacgaatcgcaggaaacctgtctctccgtaacctgtaagagcggggatttttcatgcgggggcagagtgaacagatgcattcctcagttttggaggtgcgacgggcaagtggattgtgataatggttccgatgagcaaggctgtccacctaagacgtgttcccaggatgaatttcgctgccatgatggcaaatgcatttctcgtcaattcgtgtgtgattccgatagagactgcctggacggtagcgacgaagcatcgtgtcctgtgctcacctgcgggccagcatcattccaatgtaacagctccacttgtattccgcaactttgggcatgtgataatgatcctgactgtgaagatggttcagatgagtggccccagcgttgtaggggtctgtacgtgttccagggggatagctcaccatgttcggctttcgaattccattgcttgtcgggagagtgtatccattcctcgtggcggtgtgatgggggacccgactgtaaggataaatcggatgaagaaaactgcgcagtcgcaacctgccgcccagatgaatttcagtgttcagatggaaattgcattcatggttcgagacagtgtgacagagaatatgattgtaaggacatgtcagatgaggtcggttgtgtgaatgtcactctttgcgaaggtccaaataagtttaagtgtcatagcggggagtgcataacccttgacaaggtgtgcaatatggcaagggactgtagagactggtccgatgaacctattaaggagtgtgggaccaacgaatgtctcgacaacaacggaggctgttcacatgtctgtaacgatctgaaaataggtgctgaatgtctgtgcccagatgggtttcaacttgtggcgcaaagaagatgcgaggacatcgatgaatgtcaagaccctgatacctgcagtcagctgtgtgtcaacctcgaagggggatacaagtgccaatgtgaggaaggattccagctggatccccacactaaagcatgtaaggccgtgggctccatagcatatctgtttttcaccaaccggcatgaggtgaggaagatgactcttgaccggtctgaatacacttcgctcattccgaacctccgcaatgttgtcgccctggacaccgaggtggcgagcaaccggatttactggtccgacctcagccaacgcatgatatgctccacccaattggaccgggcacatggagtttcctcgtacgacaccgtgatttcgcgagatatccaagcaccagatggcctggccgtggactggattcattcaaacatttactggaccgatagcgtccttggcaccgtcagcgtggccgatacgaagggtgtcaaacgaaagactctctttagagaaaatggttcgaaaccacgcgccatagtcgtggatcctgtccacgggtttatgtactggactgactgggggactcctgcaaaaatcaagaagggaggtctgaacggagtggacatctactccttggtcaccgagaatattcagtggcccaatggaattacgcttgaccttctttccggtaggctttactgggtcgactctaaacttcacagcattagcagcattgatgtgaatggtggcaacagaaagactatcctggaagatgaaaagagactggcccatcccttttcgctcgcagtgttcgaggacaaagtgttttggacggatatcatcaacgaagctatcttctcggccaacagacttactggatccgatgtcaatcttctcgccgaaaacctgcttagccctgaagatatggtgctttttcataaccttacccagccacggggagtgaactggtgtgagcgcacgaccttgtctaatggcggatgccagtatctttgtctgcctgcaccccagattaacccgcactcgccaaagtttacttgtgcgtgccctgacggaatgcttctggcaagggatatgcggagctgtctgacggaggcagaggcagcagtggcaacccaagaaacctcaaccgtgcgcctcaaagtctcatccaccgccgtgcggacgcagcacactaccacgcggccagtaccagatacttcgcgcctgcctggagccacccctggactcaccactgtggagatagtgacgatgtcgcatcaagctctgggtgacgtggccggaagaggaaatgagaaaaagcctagctccgtgagagctctttcgatcgtacttccaattgtcctgctggtgtttctctgcctgggtgtgttcctgctgtggaagaactggcggcttaagaatatcaactcgatcaactttgataatcctgtatatcaaaagaccactgaagatgaggtgcatatatgccacaatcaggacgggtactcatacccttcacgtcaaatggtgtcacttgaagatgacgtcgcg

SEQ ID NO: 16356 - DNA, 2580 bp, synthetic construct
  misc_feature 1..2580: note = source = /note="Description of Artificial Sequence: Synthetic coding sequence"
  source 1..2580: mol_type = other DNA
atgggtccttggggatggaaattgcgatggactgttgcattactactcgcagcagccggaacagctgtcggagacagatgtgagcgtaatgaatttcagtgccaggatggaaaatgtatctcgtacaaatgggtctgtgacggaagtgctgaatgtcaagatggaagtgatgagagtcaggaaacttgtctttctgtcacttgcaagtcgggagattttagttgcggaggtagagttaatagatgtattccacaattctggagatgtgatgggcaggtagactgcgataacggaagcgatgagcagggatgtccaccaaaaacatgttctcaggatgagttcaggtgtcacgacggaaagtgcatctctcggcagtttgtatgcgattcagacagggactgccttgatggctcagatgaagcatcgtgtcctgttcttacatgcggtcctgcctctttccagtgcaatagttctacgtgtattccacagttgtgggcttgcgacaacgacccggattgtgaagatggaagtgatgaatggccgcaaagatgtagaggactttacgtgttccaaggcgatagttcaccatgttccgcttttgaattccattgtttaagcggcgagtgtatacattcctcttggagatgtgatggtggccccgattgtaaagataaaagtgatgaagaaaattgcgcagttgctacgtgtagaccagatgaatttcagtgcagcgatggaaattgtattcatggatctcgacaatgcgacagagagtatgattgtaaggatatgtctgatgaggttggatgtgttaatgtcacgctctgtgagggtcctaacaagtttaaatgtcattcaggagaatgtattactttggacaaagtgtgtaatatggctcgtgactgccgagactggtcggacgagccgattaaagagtgtgggacaaatgaatgtcttgataataacggcggttgctcacatgtgtgtaacgacctaaaaattggagctgagtgtttgtgcccggatggattccaactcgtcgcacagagacggtgtgaagacatcgatgaatgccaggacccagatacatgctcacaattatgcgtgaacctcgaaggaggatataagtgtcaatgtgaagaaggtttccaattggatcctcatacaaaagcttgcaaggccgttggatccattgcatacctcttcttcactaaccgacacgaggtgcgtaagatgacattagatagaagcgaatatacttcactcatccccaacttgcgtaacgttgttgcacttgatacggaagttgccagtaaccgcatttactggtctgacttgtcacaacgtatgatttgctcaacccaactcgatcgagcacacggagtctctagttacgatacagtgatctctcgagatatccaagcgccagatggattggcagtcgactggatccacagtaatatctattggacggattcagtgttgggtacagttagcgtggctgataccaaaggcgttaaacgtaagaccctttttagagaaaatggaagtaaaccaagagctattgttgttgacccggttcatggattcatgtattggactgattggggaacaccagctaaaatcaaaaaaggagggttgaacggagtggatatatactctcttgttactgaaaatattcagtggccgaacggaattactctcgatttgctgagtggaagactttactgggttgatagcaaactccatagtattagcagtattgatgtaaatggaggtaatcgtaagacaattctggaagacgagaagagactcgctcacccattctccttggcggttttcgaagataaggtattttggacagacataattaatgaagcaatctttagcgcaaatagacttacgggctcagatgtaaatttgttggcggaaaatctcctatctccggaagatatggttttgtttcacaatttgactcaaccaagaggagttaactggtgtgaacggactacactatccaacggaggatgccaatatctgtgtcttccggctccacagattaacccgcacagtccaaaattcacgtgcgcgtgccctgatggaatgttgctcgcacgagacatgagatcctgtttgacagaggcagaggctgccgtggctacccaagaaacatcaacagtcaggctcaaagtttcctctacagcagttagaacacaacatactaccacaagacccgtgcctgatacatctagattaccaggagccacccctggacttacaacggtagagattgtgactatgagccatcaagctttaggagacgtcgctggacgtgggaacgaaaaaaaaccaagttcagttcgtgctttgtcaattgtgctgccaattgtgttgcttgttttcctctgcttgggagttttcctgctttggaaaaactggcgtttaaaaaatattaacagtattaatttcgataatccagtgtatcaaaagacaacagaagacgaagtccacatctgtcacaaccaagacggctattcctacccatctaggcaaatggtgtcgttggaggatgacgtagct

SEQ ID NO: 16357 - DNA, 2580 bp, synthetic construct
  misc_feature 1..2580: note = source = /note="Description of Artificial Sequence: Synthetic coding sequence"
  source 1..2580: mol_type = other DNA
atgggcccgtgggggtggaagctccggtggacggtagcgctgctgttggctgcagccggaactgccgtgggagatcgctgcgagaggaacgaattccaatgccaagacggcaagtgcatctcctacaagtgggtgtgcgacggatcagcagagtgccaggatggctccgacgaatcccaggagacttgcctcagcgtcacctgtaaaagtggagacttctcgtgcgggggtagagtgaaccggtgtatcccgcaattttggagatgcgacggacaagtggactgtgacaacggatccgacgagcagggatgccccccaaagacttgctcgcaggatgagttccgctgccacgacggaaagtgtatatcccgccaattcgtgtgcgatagcgaccgggattgcctggatggttcggacgaggcttcctgcccggtgctgacttgcgggccggcgtccttccagtgcaattcgtccacgtgcatcccacaactttgggcatgtgataacgacccggactgcgaagatggatccgatgagtggccgcagcgctgtcggggcttgtacgtgttccagggcgactcttccccgtgctcggcatttgaattccactgccttagcggagagtgcatccacagctcgtggaggtgcgatgggggtccggactgtaaggataaatcagacgaagagaattgcgccgtagctacctgtcgcccggatgagttccagtgctccgatgggaactgtatccatggatcccgccagtgtgacagggaatacgattgcaaagacatgtcagacgaggtgggctgcgtgaacgtgactctgtgcgagggcccgaacaagttcaagtgccacagcggagaatgtatcaccctggataaagtctgcaacatggccagagactgtcgggattggagcgacgagccaatcaaagaatgcggtactaatgagtgcctggacaataatggaggatgctcgcacgtgtgtaatgacttgaaaattggcgccgagtgcctgtgcccggacggattccagctggtcgcccagcggcgctgcgaggatatcgacgagtgtcaagaccccgacacttgttcccaactttgcgtcaacctcgagggaggatacaagtgtcagtgcgaagaagggtttcaattggacccacataccaaagcgtgtaaggccgtgggctccatcgcctacctgttcttcactaataggcatgaagtgcgtaagatgacgctggaccgctcggagtatacctctctgatcccaaacctgaggaatgttgtggccctcgataccgaggttgcgtccaaccggatctattggagcgacttgagccaacgcatgatttgttcgactcagctcgaccgggcacacggtgtctcttcttacgacaccgtcatctcccgggatattcaggcccccgacggactggctgtcgactggatccattcgaacatctactggaccgatagtgtgctcggcactgtgtctgtggcagacaccaagggtgtgaaaagaaagaccctctttcgcgagaacggcagcaaaccaagggccattgtggtggatcctgtgcacggatttatgtattggaccgattggggaacccctgctaagatcaagaagggaggactgaatggcgttgacatctactctctcgtgactgagaatatccagtggcctaacgggatcacccttgacctgctctcaggcagactgtactgggtggatagcaaactgcattcgatctcctcaattgatgtgaacggaggaaaccgtaagaccattctggaggacgagaaaaggttggcgcacccatttagcctggcagtgttcgaggacaaggtgttctggactgacatcatcaatgaagcaatcttctcagccaacagactgactggatcggatgtcaacctgctcgcggaaaatctgctgtcgccagaagatatggtcttgttccacaacctgacccagccaagaggagtgaactggtgtgagcgcaccacgctgtcaaacggcggctgccaatacctgtgccttccggctccgcagatcaacccgcatagcccgaaattcacttgtgcgtgcccagacggcatgctgctggcgagagatatgcgcagctgcctgactgaagccgaagcagctgtggccacccaagagacttcgactgtgcggctgaaggtgtcgtcaaccgcagtgcggacccaacacaccactactagaccagtgccagacacttcgcggttgcctggagccacccctggacttaccaccgtcgagattgtgaccatgtcgcaccaagctctgggtgacgtggcgggacgcggaaatgaaaagaaaccctcaagcgtgcgcgcgctctccatcgtgctcccgatagtcctgctggttttcctttgcctcggcgtctttctgctgtggaagaattggcggctcaaaaacatcaattcaatcaacttcgacaacccggtctaccaaaagaccacggaggacgaagtgcacatctgccacaatcaggatggttactcgtacccgtcgaggcagatggtgtccctggaggatgatgtggca

SEQ ID NO: 16358 - DNA, 2580 bp, synthetic construct
  misc_feature 1..2580: note = source = /note="Description of Artificial Sequence: Synthetic coding sequence"
  source 1..2580: mol_type = other DNA
atgggtccgtggggctggaaactcagatggactgtcgctctactgctggcagcagcggggaccgccgtcggtgatcgatgcgagcgtaacgaatttcagtgtcaagatgggaaatgcatttcctacaagtgggtctgtgatgggtcggctgaatgccaggatgggtcggacgagtctcaagagacgtgcttgtcagtaacgtgtaagtctggggatttctcttgcggggggcgagttaatcgatgtatcccgcaattttggcgctgcgatgggcaggttgactgcgacaacggcagtgatgaacaaggctgcccccctaagacgtgttctcaagacgaatttcgatgccacgatggcaaatgtatttcgcggcaattcgtatgtgattcggaccgggattgtctcgatggaagtgacgaagcctcatgcccagtgctcacctgcggacctgcatcatttcaatgcaactcgagtacttgtattcctcaactttgggcctgcgacaatgatccagattgtgaagacggctctgatgaatggccccagagatgtagaggtctctacgtctttcaaggcgattcgtcaccatgttcggcctttgagtttcattgtcttagcggtgagtgtatacatagctcctggcggtgcgacggcgggccggactgcaaagataagagcgacgaggaaaactgcgctgttgcgacctgtcggccagacgagtttcagtgctctgacgggaactgtatccacggatctcgacaatgcgatagagaatatgattgcaaggacatgagtgatgaagtcggatgcgtgaatgttacactctgcgagggtccgaacaagttcaagtgccactccggagagtgcattacgcttgacaaggtgtgtaacatggctcgcgactgccgtgattggtctgatgagccgataaaggaatgtggcaccaatgagtgcctagacaacaatggtggttgtagccatgtgtgcaacgacttgaaaatcggggccgagtgcttgtgtcctgacgggttccagctggttgcccagcgcaggtgcgaggatatagatgagtgccaagatccggacacgtgcagccagctgtgtgttaatttggagggcggttataagtgccaatgcgaagaaggttttcagcttgacccacatactaaggcctgcaaggcggttggcagcatcgcctatctcttctttacaaatagacacgaggtgagaaaaatgactctggacagaagtgaatatacatcgctgatccccaacttgcggaatgtcgtagccctcgatacagaagtcgcttcaaatcgcatctactggtccgacttgtcccagaggatgatttgctcgacacaacttgacagggcccacggggtctcttcgtacgacaccgtcatcagtcgtgatattcaggcgccagatggactcgccgttgactggattcattcaaacatctattggaccgactcggtcctgggtacagtctccgttgcagacacaaaaggcgtaaagcgcaagactttgtttcgtgaaaacggctcgaaacctcgagcaattgtagtggatcctgttcacggttttatgtattggacggactgggggacgccagccaagatcaagaagggcggactcaacggtgttgatatctacagccttgtcaccgagaacattcagtggccgaatggcatcacgcttgatttacttagcggtcggctttactgggtcgattccaagttgcattcgatttctagcatcgacgtcaacggaggtaaccggaaaaccattttggaggacgagaagcgcctagcccatcccttcagcctggctgttttcgaagacaaagttttctggactgatataatcaatgaggccatcttctccgccaaccgactcacgggctccgacgttaatctgttagctgaaaacctcctctcgccagaagatatggttctgtttcacaacctgactcaacctcgtggtgtcaactggtgcgagagaaccacgcttagtaacggaggttgtcaatatctgtgtctccccgcccctcagatcaacccgcattctccaaaatttacctgtgcgtgccctgacggtatgcttctagcccgggacatgcggagttgtctcaccgaggcggaagcggcagtcgctacgcaggagacatctacagtgcgactaaaagtctcctcaactgcagttcgcactcaacatactactactcgaccagtccctgacacttctcgtcttcctggtgccacacccgggttgactaccgttgagatcgttaccatgagtcaccaagcacttggggacgttgcaggacgcgggaatgagaaaaaaccgagtagtgtccgcgcactctcaattgtcctcccaatcgtgcttttagtcttcctctgtctgggagtcttccttctgtggaagaactggagattgaaaaatatcaactcgattaatttcgataacccggtctaccaaaagacaaccgaagacgaagtgcatatctgtcacaaccaggacggttattcctacccaagccgacagatggtctctctcgaagatgacgtcgcc

SEQ ID NO: 16359 - DNA, 2580 bp, synthetic construct
  misc_feature 1..2580: note = source = /note="Description of Artificial Sequence: Synthetic coding sequence"
  source 1..2580: mol_type = other DNA
atggggccatggggctggaagctgagatggacagtcgctctattgctggctgcagcaggaacagctgtgggggataggtgcgagaggaatgaatttcaatgccaagatggcaaatgtatatcgtataagtgggtatgtgacggctcggctgagtgtcaggatgggtcagatgaatcgcaggaaacctgtctgtccgtcacatgtaagtcgggggactttagctgcggtgggcgagtcaaccggtgtatcccccagttttggcggtgtgacgggcaggtcgattgtgacaacggttctgacgaacaagggtgtcctcccaagacctgcagtcaggacgagtttaggtgccatgacggcaagtgtatcagccggcaattcgtgtgtgattctgatcgcgactgcctggatggctccgacgaagcctcatgccccgtactaacgtgtggtccagcaagctttcagtgtaactccagcacctgcattcctcagctctgggcgtgtgataacgaccccgattgtgaggatggaagcgatgagtggccacagaggtgccggggactctacgtgttccagggagattcatcgccctgtagcgccttcgagttccactgtctgtcaggagaatgtatccactctagttggcgctgcgatgggggccctgactgtaaagacaaatcagacgaagaaaattgcgcagtcgcaacatgccgcccggacgaattccagtgtagtgacggcaactgtatccatgggtcacgacagtgcgatcgagaatatgactgcaaagatatgagcgatgaggtgggctgtgtaaatgtgactttatgcgagggacctaacaagttcaagtgccatagtggcgagtgcattaccctggacaaggtctgcaatatggcacgcgactgcagagactggagtgatgaacccattaaggaatgtggcactaatgagtgcctggacaacaacgggggttgcagccatgtatgcaatgatctgaagatcggtgccgagtgcctgtgccctgacggctttcagctcgtggcccaaagacgttgcgaggatatagacgagtgtcaggaccccgatacatgcagccagctgtgtgtcaaccttgagggaggctacaagtgtcagtgcgaggaagggttccaactcgatccacacaccaaggcctgcaaggcggtggggtccatcgcctacctattcttcactaaccggcacgaagtgcggaaaatgacccttgaccgttcagagtacacttcgctgattcccaatttacggaacgttgttgcactggatactgaggtcgcctccaaccgaatttactggtccgacctttcgcagcgtatgatctgcagtacgcagctcgaccgcgctcacggcgttagctcctatgacacagtgatttctagggacatccaggcccctgacggcctggcagtggactggatacacagcaacatctactggaccgactcggtcctggggacagtctccgtcgcagataccaaaggggtgaaacggaagacactgtttcgggaaaatgggtctaagccccgtgcaattgtggttgaccctgtacatggctttatgtattggaccgattggggaacccccgcaaaaataaagaagggcggtctcaatggcgtggatatctactccctagtgacagagaatattcagtggcccaacggaatcaccttggacctcctgtcaggcaggctctactgggttgactcaaaattgcattctatctctagcattgacgtgaacggggggaatcgtaagaccatactcgaagacgagaagcggctggcacacccgttcagtttggcagttttcgaggacaaagtattctggacagatatcattaatgaagccatattctcggctaatcgcctcaccggatcagacgttaacctgctagctgaaaatttgttatccccggaggacatggtactgtttcacaacctgacacagcccaggggggtgaactggtgcgaacgcaccacactgtccaacgggggctgccagtacctgtgcttgcctgcgccccagattaaccctcatagccccaagttcacctgcgcctgtccagacgggatgcttctagcacgagacatgcggagttgccttacagaggccgaagccgctgtggccacgcaggagaccagtactgtgagactgaaagtcagctcaaccgcggtgagaacgcagcacacaaccacgaggccggttcccgatacctctcgactccccggagcaacacctggattaacaacggtggaaatcgtgactatgagtcaccaagccctgggggacgttgcgggccgcggtaatgagaaaaagccgagctcggtccgcgctctttccatcgtcctacccatcgtgctcttagtctttctgtgtcttggcgtctttctcctttggaaaaactggcgattgaagaacatcaatagcattaacttcgacaatcccgtttaccaaaaaaccactgaagatgaggttcacatctgccataaccaggacggctacagctacccttcgagacagatggtgtctctagaagacgatgtcgca

SEQ ID NO: 16360 - DNA, 2580 bp, synthetic construct
  misc_feature 1..2580: note = source = /note="Description of Artificial Sequence: Synthetic coding sequence"
  source 1..2580: mol_type = other DNA
atggggccttggggttggaagctcagatggacagttgccctgcttctggcagctgctggtacggctgtgggtgatcgctgtgagcggaatgagttccaatgccaggacgggaagtgcatctcttacaaatgggtgtgtgacggctctgcggaatgccaagacggctccgacgagtcacaggagacatgtctgtccgtgacttgcaaaagcggtgatttctcctgcgggggtagagtgaaccgatgtatcccacagttttggaggtgtgatgggcaggtggactgcgataacggatcagacgagcagggttgtcccccaaaaacttgtagtcaggacgagttcaggtgccatgatggcaaatgtatcagtaggcagttcgtgtgtgactcagatcgggactgtctggatggcagcgatgaggcgtcttgccctgtgctcacctgtggtccggcaagcttccagtgtaatagttctacttgcattccccagctgtgggcctgcgataacgatccggattgcgaggatggatctgacgaatggccccagcggtgtaggggcctctacgtgtttcaaggggatagtagcccttgtagcgctttcgaattccactgtctgagtggcgaatgcatacattcaagctggcgctgcgatggaggacctgattgtaaggataagtctgacgaggaaaattgtgctgtcgccacttgccggcccgacgaattccagtgttccgacggaaattgtatccatggcagccgccagtgtgatcgagaatacgattgcaaggacatgtccgacgaggttggttgtgtcaatgtgactctttgcgagggcccaaataaatttaagtgccattctggagaatgcatcacattggataaggtgtgcaacatggcacgagactgccgggattggagcgatgaacctattaaggaatgcggcactaatgaatgccttgacaataatgggggctgttcccacgtttgcaatgatctgaagattggagcggaatgcctctgccctgatgggttccagctggtggcgcagagacgctgcgaggatattgatgaatgtcaggaccctgacacatgttcccagctgtgcgtgaacctggaaggtggttataagtgtcaatgcgaggagggctttcagctggatccgcacacaaaggcctgcaaagcagtgggaagcatcgcttacctgtttttcacaaatcgccacgaggtccggaaaatgaccctcgatcggagcgaatatacctcccttattcctaacttgcgcaatgtggttgcactggataccgaggtggcgtctaatagaatctattggagtgatctcagccagagaatgatctgctccacacaattggaccgcgctcacggtgtgtcaagctatgataccgttatatctagggatattcaggcacccgatggactcgcagttgattggattcattccaacatttactggacagatagcgtgttgggtaccgtgagtgtcgctgatacaaagggcgtgaagcggaagaccctctttagggaaaatggtagtaagcctcgggccatagtagttgatccggtccacggatttatgtattggaccgactggggcactcccgctaagattaagaagggcggcctgaacggcgttgatatttacagcctggtgacggaaaacatccagtggcccaacggcatcactctggacctgctgtccggcagactgtactgggtggattctaagctgcacagcatcagctctatcgatgtcaacgggggaaacaggaagacgattctggaggatgaaaaacggctggcccacccattcagcctggcagtgttcgaagataaggtgttttggacggatattatcaacgaggccatattcagcgccaacaggcttacgggctctgacgtcaatctgctcgccgaaaatcttctgagcccagaggatatggtgctcttccacaatctgacccagccacgcggtgttaactggtgcgagagaactactctgagcaacgggggctgtcagtacctgtgtctgccagctccccaaatcaacccccattcaccaaaatttacctgcgcttgtcccgatggcatgttgctggccagggatatgaggtcctgcctcacggaggctgaagcagcagtggccactcaggagacttctactgttcggcttaaagtcagctctactgctgtgaggacacaacatacaacgaccagaccagtgcccgacacctctcggctgccgggggccacccccgggctgaccaccgtggagattgtcacaatgtcacaccaggctctgggggacgtagcaggcaggggtaacgaaaagaagcccagctcagtgagggcactcagcatcgtgctgccaatcgtactgctggtcttcctttgtctgggcgtctttcttctgtggaaaaattggaggctgaaaaacatcaacagcattaactttgacaatccggtgtatcagaagaccacagaagatgaggtacacatatgtcacaatcaggacggatactcctatcctagcaggcaaatggtatctctggaggacgatgtggcc

SEQ ID NO: 16361 - DNA, 2580 bp, synthetic construct
  misc_feature 1..2580: note = source = /note="Description of Artificial Sequence: Synthetic coding sequence"
  source 1..2580: mol_type = other DNA
atgggcccatggggatggaagttgcgttggactgtagcgctcctattagctgcagcgggtactgccgtgggagatcgctgcgagcggaatgaatttcaatgccaagacggcaaatgcatatcgtacaagtgggtgtgtgatggttctgcagaatgccaggatggtagcgatgaatctcaggagacctgtctgagcgtaacatgcaagtccggcgacttctcatgtggaggtagggtgaaccgatgtattccccaattctggagatgtgacgggcaagtcgattgtgataatggatcagatgaacaagggtgcccccccaagacatgctctcaagatgaattccgatgccatgatggtaagtgtattagtcgacagtttgtgtgcgactctgatagagattgtctggacggcagtgatgaagcctcgtgccctgtgctaacctgcgggccagcctctttccagtgtaactcgtctacttgtataccacaactttgggcttgtgataacgatcccgattgcgaagatgggagcgatgaatggccacaacgttgtagggggctttacgttttccaaggggattcgtcgccgtgctcagccttcgaattccattgcctgtcaggtgagtgcatccacagtagctggaggtgtgatggcggccctgactgtaaggataagagcgacgaggagaattgcgccgttgctacctgcaggcctgatgaattccaatgttctgacggaaattgtattcatggttccagacagtgtgacagagagtacgactgcaaggatatgtccgatgaggttgggtgtgtgaatgttacgctttgtgagggaccaaacaagttcaaatgtcatagtggtgaatgtattacattggataaagtctgcaatatggctagagattgtagggattggtcagacgagccaattaaagagtgtggaaccaatgaatgcctggataataatgggggttgttctcatgtatgcaacgatctcaagattggagcagagtgcctttgtccagacggcttccagcttgttgcccagaggagatgcgaagacattgatgagtgtcaagaccctgatacctgttcacaattgtgtgtgaatttggaaggcggttacaaatgtcaatgcgaggaaggatttcaactggacccgcatacaaaggcttgcaaagcagttggctcaatagcttacttattctttaccaaccggcacgaggttaggaaaatgactttggaccgttcggaatacacttctcttatccccaacctaagaaacgttgtggcactagacactgaagttgcttcaaacaggatttattggtctgaccttagccaaaggatgatttgcagtactcaacttgacagggcccatggggtgagctcatatgacactgtaatctctagagacatacaagctcccgacgggcttgctgtggactggattcatagtaacatctattggactgatagcgttctagggaccgtctcggtagccgatacaaaaggcgtgaagagaaagacgttgtttcgtgaaaacgggtcaaagccccgagctatcgtggtggatccagtccatggtttcatgtattggaccgattggggaacgcctgctaagattaaaaaaggtgggctaaatggtgttgacatatatagcctcgtgaccgaaaatatacaatggccaaatggaatcacgctcgatttgcttagtggaagactttactgggtggactctaaattgcactcaatatcaagtattgatgtaaacggtggaaacaggaagacaattcttgaagatgaaaagaggcttgcacatcccttctcactcgctgtttttgaagataaagtgttttggaccgatattattaacgaggcgatctttagtgctaatcgtttgaccggttccgatgttaaccttttggcggaaaacttgctttctcctgaggatatggtattattccataaccttactcagcctcgcggtgtgaattggtgtgaaaggacaactcttagcaatggtgggtgccaatatttatgtttgccagcccctcaaattaacccacactcccctaagttcacatgcgcttgccctgatggtatgctgcttgcccgagatatgcgctcgtgtctgacagaggctgaggcagcagttgctacccaggaaacttcaactgtgagactcaaggtgtcatcaaccgccgtgaggacccagcataccacgacaaggcccgttcctgatacgtcacgtttgccgggagcgacaccaggcttaactactgtggagatagttaccatgtctcatcaagctctaggtgacgtcgccggccggggaaatgaaaaaaaaccttcgagtgttcgagctctgtctatcgtgttgcctatcgttctgcttgttttcctttgtcttggtgtgttcttgctctggaagaactggagactgaaaaacatcaactcaataaattttgataaccctgtttaccaaaagacaacggaagacgaggtacatatttgccataatcaagatgggtattcttatccttctcggcagatggtaagcttagaggacgatgtggct

SEQ ID NO: 16362 - DNA, 2580 bp, synthetic construct
  misc_feature 1..2580: note = source = /note="Description of Artificial Sequence: Synthetic coding sequence"
  source 1..2580: mol_type = other DNA
atgggaccgtggggttggaaacttcggtggactgtcgcactgcttctggccgcagctggcactgcggtgggtgatcggtgtgaaagaaacgaatttcagtgccaggatggcaagtgtatatcgtacaagtgggtgtgcgatggatccgcggaatgccaagacggaagcgatgaatcacaggagacttgcctgtcagtcacctgcaagtcaggtgacttttcatgcgggggtagggtcaaccggtgcattccccaattttggcgctgtgacggccaagtcgactgcgacaatggatccgatgaacaaggttgcccacccaagacctgttcgcaggacgagttcaggtgtcacgatggaaagtgcattagtcgccagttcgtgtgtgacagcgaccgtgactgtctggatggatcggacgaagcaagctgccctgtgttgacttgcggaccagcatcctttcagtgcaacagctcgacttgcatccctcagctctgggcatgtgataacgatcctgattgcgaggatggttccgacgaatggcctcagcggtgtcgtggtctgtacgtctttcaaggtgattcgtccccttgtagcgcatttgagtttcattgtctctcgggagagtgcattcattcctcctggcgctgtgatggaggtccagattgtaaagataagtcagatgaagaaaattgtgcagtggcaacctgccgccccgatgaatttcagtgtagcgatggcaactgtattcatggatcgagacaatgtgatagggaatacgactgtaaggatatgtccgacgaagtagggtgcgttaacgtgactctgtgtgaaggaccgaacaagtttaagtgtcactccggagaatgcattaccctcgataaggtctgcaatatggcaagagattgccgtgattggagcgacgaacccatcaaggaatgcggtaccaatgagtgtctggataacaatggcggatgttcgcatgtgtgcaacgatctgaagatcggcgcagagtgtctctgtcccgatggtttccaactggtggcacaaagaagatgtgaagatattgatgagtgtcaagacccggacacctgcagccaactgtgtgttaatcttgaaggtggatacaagtgtcaatgcgaagaaggttttcagctcgatccccacactaaggcgtgtaaggcagtggggagcatagcgtacctgtttttcactaatagacatgaagtgagaaagatgactctggaccgttcagaatacacttcacttatccctaaccttcgcaacgtggtcgccctggatactgaggttgcaagcaaccgcatttactggtcggatctttcacaaagaatgatttgttctactcagcttgatcgagctcatggcgtgtccagctacgataccgtgatcagccgtgacattcaggctccagacggcctcgcagtggattggatacattcaaacatctattggacggattcggtcctgggaaccgtctccgtcgccgataccaagggtgtgaagagaaaaacgctgtttcgtgaaaatggatctaaacctagagcaatcgtcgttgaccccgtgcatgggttcatgtattggactgattgggggactcctgccaagatcaaaaagggaggattgaatggtgtggatatctattcgctggtgactgaaaacattcagtggcctaatgggattaccttggatctgctgtccggtcgtttgtactgggtggattcgaagctgcattccatctcctctattgatgtgaacggcggaaaccgtaagaccatccttgaagatgaaaagcgtctggcacaccctttctccctggccgttttcgaggacaaggtcttttggactgacattatcaacgaagctatcttttcagcgaatcgcttgaccggttcagatgtgaaccttctggctgagaatctgctgtcccccgaagatatggtgctgttccacaacctgacccaacccaggggagttaattggtgcgaaaggaccacgctcagcaacggaggatgccagtacctctgccttcctgccccacaaatcaatcctcattcccccaagttcacctgtgcatgcccggatggaatgttgcttgccagagacatgcgaagctgtcttactgaagcagaagcagcggtggcaacccaggaaacctcgactgtgcgcctgaaggtgtcgagcaccgcagtccgcactcagcacaccaccaccaggccagtccccgacactagcaggcttccaggagctactccagggcttaccaccgtggagattgtgactatgtcccaccaggcactgggtgacgtcgcaggacggggaaatgagaaaaaaccctcgagcgtgagggcattgtcgattgtgcttcctatcgtgttgctggtctttctgtgtctcggagtgtttcttctctggaagaactggagactgaagaacataaacagcatcaactttgacaacccagtctaccaaaaaactactgaagatgaagtccatatctgccataatcaagacggttactcctacccctccagacaaatggtgagcctcgaggatgacgtggcc

SEQ ID NO: 16363 - DNA, 2580 bp, synthetic construct
  misc_feature 1..2580: note = source = /note="Description of Artificial Sequence: Synthetic coding sequence"
  source 1..2580: mol_type = other DNA
atgggaccgtggggttggaagctgaggtggaccgtcgctctgctcctggcagccgcaggaaccgcggtcggggatcgctgcgagcggaacgagtttcaatgtcaggacggaaagtgcatctcttacaaatgggtgtgcgacggctccgccgagtgccaggatggttccgacgaatcgcaggaaacttgcctgagcgtgacttgcaaatccggagacttctcgtgcggaggacgggtgaatagatgcatcccacagttctggaggtgtgacggacaggtcgactgcgataacggatccgacgagcagggctgccctccgaaaacctgttcgcaagatgagtttcggtgtcacgatggaaaatgcatctcgagacaattcgtgtgcgattcagatcgggactgcctggatggctcagacgaagcatcctgtcctgtgctcacctgcggcccagcttctttccagtgcaattcgtccacgtgtattccgcagttgtgggcgtgcgacaacgacccggattgcgaggacggtagcgacgaatggcctcaacggtgcaggggactctacgtgttccaaggggactcatcaccgtgctcagccttcgagtttcactgcctgtcgggagaatgtattcactcctcctggcgctgcgatggagggcccgactgcaaggataaatcagatgaagaaaactgcgcggtggctacttgcagaccggacgaattccaatgcagcgatggtaactgcattcatggatcccggcaatgcgaccgggagtatgattgcaaagatatgtcagatgaagtgggttgtgtgaacgtgaccctgtgcgaaggcccgaacaagtttaagtgtcattcgggggaatgcatcactctggacaaggtgtgcaacatggcgcgtgactgcagggattggtccgacgagccgataaaggagtgtggtaccaacgaatgtctcgataacaatggcggatgctcccatgtgtgcaatgatctcaagatcggggctgagtgtctgtgcccagacggattccagctggtcgctcagcgccggtgtgaagatatcgatgaatgtcaggacccagacacctgctcacagctctgcgtcaatctggaaggtggatacaagtgccaatgtgaggaaggtttccaactcgacccgcacaccaaagcgtgtaaagccgtggggagcattgcttatctctttttcactaatcggcatgaagtcagaaagatgacccttgacagatcagaatacacctcccttatcccgaatttgagaaacgtggtcgccctggataccgaggtggcgtccaacagaatctactggtcggacctgagccagcgaatgatttgttcgacccaactggatcgggctcacggcgtgtcgagctacgacaccgtgatctcgagagacatccaggccccagatggactcgccgtggattggatccactctaacatctactggaccgactcagttcttggcaccgttagcgtcgccgacactaagggagtgaaacgaaagaccctgtttagggaaaatggaagcaaaccacgggcgatagtggtggaccccgtgcatggcttcatgtactggacggactggggaacgcccgcaaagatcaagaagggtggactcaacggcgtggacatctactcgctggtgactgagaatatacagtggcctaacggaatcacgttggatctgttgtcgggcaggctgtactgggtggattccaagctccatagcatttcgagcatcgatgtgaacgggggaaaccgaaagactatcctcgaagatgagaaacgcctcgcgcacccgttctccctcgccgtgttcgaggataaggtgttctggaccgacatcatcaatgaggcaatcttcagcgccaatcggttgaccgggtcggatgtgaacctgctggcggagaacctgctttctccggaggacatggtcttgttccacaacctcacccagccccgaggagtcaattggtgtgaacgcactactctgtcaaacgggggatgccaatacctgtgcctgcctgccccgcagatcaacccacactccccgaaattcacctgcgcatgcccggacggaatgctgctggccagagacatgcgctcttgcttgactgaagctgaagccgccgtggccactcaagagacgtccactgtgcgccttaaagtctcctcgacggctgtgagaacccagcacaccaccacgcggccggtgcctgacactagcagactcccgggtgcaacgccgggactgaccaccgtggagattgtgaccatgtcgcaccaggcccttggcgacgtggcaggacgcggcaacgagaagaagccgtcctccgttcgcgctctgtcgatcgtcttgcccatcgtgctcctcgtgtttctgtgccttggagtctttctgctgtggaagaattggcgtctgaagaatatcaattccatcaacttcgacaacccagtttaccagaaaactaccgaagatgaggtccatatctgccataaccaagatggctacagctatccatcccgccagatggtgtcgctcgaagatgacgttgcc

SEQ ID NO: 16364 - DNA, 2580 bp, synthetic construct
  misc_feature 1..2580: note = source = /note="Description of Artificial Sequence: Synthetic coding sequence"
  source 1..2580: mol_type = other DNA
atgggaccctggggttggaaactccgctggaccgtggccctgctgttggccgccgcgggtaccgcggtcggagataggtgcgaacgcaatgagtttcaatgccaggacggaaaatgcatctcgtacaagtgggtgtgcgacggatccgctgagtgccaggatggatcagacgaatcacaagaaacttgcctctccgtgacttgcaagagcggagacttcagctgtggtggaagagtgaatcgttgtatcccccagttttggcggtgcgatgggcaggtcgactgcgataacgggtccgacgaacagggttgtccaccgaaaacctgctcccaggacgagtttagatgtcatgatggcaagtgcatcagcagacagttcgtgtgcgactccgatcgggactgtctggatggcagtgatgaagcctcctgccccgtcctgacgtgcggaccggccagcttccagtgcaattcgtcgacttgcatacctcagctttgggcctgtgacaatgaccctgactgtgaagatgggtccgacgagtggccgcaacgctgtaggggcctttatgtgttccaaggtgattcgtctccgtgctcggctttcgaattccactgcctcagcggagaatgcatccattcctcctggcgctgcgatggcggtcctgactgcaaggataaaagcgacgaggagaactgcgccgtggcaacttgccggccggacgagtttcagtgttccgacgggaactgcatccatgggtcaaggcaatgcgacagagagtacgactgtaaggacatgtccgatgaggtcgggtgcgtcaacgtgactctgtgcgagggaccgaacaagttcaaatgtcatagtggcgaatgcattaccctggacaaggtgtgcaacatggctagagattgccgggattggagcgacgagcctatcaaggagtgtggcacgaacgaatgccttgacaacaacggtggatgttcgcacgtctgcaacgatctgaagattggagctgaatgtctctgccctgacgggtttcaactcgtggcacagcgtcgctgcgaggacattgatgaatgtcaggacccagacacctgctcgcaactctgtgtcaacttggaaggagggtacaagtgccaatgcgaggaaggcttccaactcgacccgcataccaaggcttgtaaagcagtgggctctatcgcctacctgttcttcaccaatagacacgaggtgcgcaagatgacgctggatcggtcggaatacaccagcctcatccctaacttgcggaatgtggtcgccctggacactgaagtcgcgagcaaccgcatctactggtcagacctgtctcagcgaatgatctgttccacgcaactcgacagagcccacggcgtgtccagctacgacaccgtgattagccgggatatccaggccccagacgggctggctgtggactggattcactccaatatctactggaccgactcggtgctcggcactgtctccgtggcggacaccaagggtgtgaagcgaaagaccctcttccgcgaaaacggttcgaagcctagagcaattgtggttgaccctgtgcacgggttcatgtactggactgattggggaaccccggccaagatcaagaagggaggactcaacggagtggatatctactcgctggtcaccgagaatatccagtggccaaatggaatcaccctcgatctcctttcagggcgtctgtactgggtcgactccaagctgcactcaatctcctcaatcgatgtaaacgggggcaatcggaaaactatcttggaagatgaaaagcgcctcgcccatcctttttcgctggctgtgttcgaggataaagtgttctggaccgatatcattaatgaggccatcttttcggcgaatcgccttactggaagcgacgtgaaccttctggcggagaatttgctgtcgccggaagatatggtgttgttccataacctgacccaaccacggggcgtgaactggtgcgaacggactactctgtcaaacggcggatgccagtacctgtgcctccccgcaccacaaatcaatccgcactcgcccaaattcacgtgcgcgtgcccggacgggatgctgctggcacgggatatgcggtcctgcctgaccgaggccgaggcagccgtcgcgactcaggaaacgtcaaccgtgcgcctcaaggtgtcgtcgactgcggtccgaactcagcacactaccactagaccggtaccggatactagccgcttgcccggagctaccccaggcttgaccactgttgagatcgtaactatgtcgcaccaggcactgggcgacgtcgctggacggggaaatgaaaagaagccgtcgagcgtgcgggccttgtccattgttctgccgattgtgctgctggtgttcctgtgtctcggagtgttcctgctgtggaaaaactggcgactgaaaaacattaactcgatcaacttcgacaacccggtttaccagaaaaccactgaggatgaagtccacatctgccacaatcaagatggctacagctatccgtcaagacagatggtatccctggaggacgacgttgcc

SEQ ID NO: 16365 - DNA, 2580 bp, synthetic construct
  misc_feature 1..2580: note = source = /note="Description of Artificial Sequence: Synthetic coding sequence"
  source 1..2580: mol_type = other DNA
atgggtccctggggctggaaacttagatggactgtcgcactgctccttgcagcggcgggaactgctgtgggtgatcgctgcgaacgcaatgaatttcagtgtcaagacgggaagtgcataagctacaaatgggtctgcgatggatccgcggaatgccaggatggttccgatgagagccaagaaacttgcctttccgtgacttgtaagagcggcgacttctcgtgtggtggcagagtgaatcggtgcatcccacaattttggcggtgtgatggacaagtggactgcgacaacgggtccgatgaacagggatgcccaccgaaaacttgctcgcaggatgaatttagatgtcatgatggaaaatgtatctcccgccagttcgtgtgcgatagtgatcgggactgcctggatggttcggatgaagctagctgtccagtgctgacttgtgggcccgctagctttcaatgcaactcctcgacttgtattcctcagctttgggcctgtgataacgaccctgactgcgaagatggctccgatgaatggccgcagcggtgcagagggctctatgtgttccaaggcgatagcagcccttgctcagcatttgaattccattgtctgtcgggagaatgtatccactcaagctggcgatgcgatggtgggcccgattgcaaggacaaaagcgacgaggagaattgtgccgttgccacgtgtcgccctgatgagttccagtgttcggacggcaactgtattcatggatctcgacagtgtgatagagagtacgactgcaaagacatgtcggatgaagtgggatgtgtgaacgtgactctgtgtgaagggcccaacaagttcaaatgccactccggtgaatgtatcacgctggacaaggtgtgtaacatggcacgagactgtagggattggtctgatgaaccgattaaggaatgcggaaccaacgaatgtctggataacaatggaggatgctcccacgtctgtaatgatctgaagattggtgcagagtgcttgtgtcctgatggttttcaactggtggcccaaagacgttgcgaggatatcgatgaatgtcaagatcctgatacttgttcccagttgtgcgtgaacctcgaaggaggttacaaatgtcaatgcgaagagggattccaactggacccccacactaaggcctgtaaagcagtgggaagcatcgcatacctcttctttaccaatcgccatgaggtccggaagatgactctggataggtcggaatacacctcgctgataccgaacctcaggaatgtggtggccctggataccgaggtcgcatcgaatagaatttactggtcggatctctcccaaaggatgatttgctccacccaacttgatcgcgcccacggcgtctcatcctacgacaccgtgatctcgcgtgatattcaagccccagacggactggcagtcgactggatccattccaacatttactggactgactcggtcttgggtactgtctccgtggcagacactaagggtgtcaagagaaagactctctttcgcgagaacgggtcaaagccacgggcaatcgtcgtggatccggtgcacggctttatgtactggaccgattggggaaccccagcaaagatcaagaaaggaggtcttaacggtgtcgacatctattcgcttgtcaccgaaaacatacagtggccaaacgggataacccttgaccttctttcgggacgtctctactgggtggattccaagctgcacagtatctcgtccattgacgtgaatggaggtaatagaaagacgattcttgaagatgaaaagaggctcgctcacccgttttcgcttgctgtgtttgaggataaagtgttttggactgatatcattaacgaagccatattctccgcaaatagactgactggttcagatgtgaacctgcttgcagaaaacctgctttcaccagaagatatggtgctttttcataacttgactcaaccccgtggcgtgaactggtgtgaacgaaccacgctgagcaatggcggatgtcagtacctttgcctgcctgcaccccagatcaacccgcatagtcccaaattcacctgtgcatgccccgacggaatgttgctggccagagacatgcgctcttgtctgaccgaagcggaagcagctgtggcaacccaagaaacctctactgtgcgacttaaggtgtcatcgaccgcagtgcggactcaacacaccaccaccagacctgtccctgacacgtcgcggctgccaggtgcgactcccggcctgaccaccgtggaaatcgtgaccatgagccaccaagccttgggagacgtcgcaggtaggggaaacgagaagaaaccatcgtccgtgcgcgccctgtcgattgtgttgccaatagtgctgctggtgttcctttgccttggggttttcctgctgtggaagaactggcggctgaaaaacatcaattccattaacttcgataatccagtgtaccaaaagactaccgaggatgaagtgcatatatgtcacaaccaggacgggtacagctacccatcgagacagatggtgtccctggaggatgacgtggca

SEQ ID NO: 16366 - DNA, 2580 bp, synthetic construct
  misc_feature 1..2580: note = source = /note="Description of Artificial Sequence: Synthetic coding sequence"
  source 1..2580: mol_type = other DNA
atgggaccttggggttggaagctgcgttggaccgtggcactgctgcttgcagccgccggaaccgctgttggagatcgatgcgaacggaacgagtttcagtgtcaagacgggaagtgtatatcgtacaagtgggtgtgtgatggatcggccgagtgtcaggatggaagcgatgaatcccaggaaacttgtctttccgtgacttgcaaaagcggagatttttcgtgtggaggtcgtgtgaatagatgcatccctcagttttggaggtgcgatggacaagtggattgtgacaatggttctgatgaacagggctgccctcctaagacctgctcccaagatgaatttcgctgtcatgacggaaagtgcatttcccgacagttcgtctgcgattcagacagagactgtcttgacggatccgatgaagcatcatgtccagtccttacctgcggacccgcctcgtttcaatgcaatagctccacctgtatccctcagctctgggcttgtgataatgaccctgattgtgaggatggctcagacgaatggccacagcggtgtcgaggcctgtacgtattccagggcgattccagcccatgttcggcatttgaattccattgcctctcaggagagtgtatccattcgagctggcggtgtgatggaggtcctgactgtaaagataaatcagatgaagaaaactgtgccgtggctacgtgtagacctgatgaatttcagtgcagcgatggaaactgtatccatggctccagacagtgtgaccgagaatacgattgtaaagatatgtcagacgaagtcgggtgtgtcaacgtgactctgtgcgaaggaccaaacaagtttaagtgtcactcgggcgagtgcattactcttgataaagtgtgtaacatggcacgcgattgtcgggattggtcggatgagccaattaaggaatgtgggactaatgagtgcttggacaacaacgggggctgttcccatgtgtgcaacgatctgaaaattggtgcagaatgtctgtgtcctgatggctttcaactggtggcccagagaagatgcgaagatatcgatgagtgccaggatcccgacacttgttcgcaactctgcgtcaaccttgaggggggctacaaatgtcaatgtgaagagggcttccagttggatccccatactaaggcctgtaaggcggtgggttccatagcatacctgtttttcaccaatcggcatgaggtgcgtaagatgaccctggacagaagcgagtacactagcctgattcctaatctccgcaacgtggtggctctggatactgaggtggcatccaatcggatctattggtcggatctctcccagaggatgatctgttcgacccagcttgatagagcacatggtgtctcgtcgtacgataccgtgatttccagggacattcaggcacctgatggactcgcagtcgactggatccattcgaacatttactggactgattccgtgcttggaactgtgtccgtggccgacactaagggcgttaagaggaaaacgctcttcagagagaacggatccaagcctagagcaattgtcgtggaccccgtccatggatttatgtactggacggactggggaactccagcgaagataaagaaggggggattgaatggagtggatatctactcgcttgtgaccgaaaacatccagtggcctaacggcatcacccttgatcttcttagcggacgtctttactgggtggatagcaaacttcatagcatttcaagcatcgatgtcaacggtggtaacagaaagactatccttgaagatgagaagcgactggcacatcccttttcgcttgccgtgtttgaagataaggtcttttggaccgacatcattaacgaggcaatcttcagcgcaaaccgccttacggggagcgatgtgaatctccttgccgaaaaccttctgtcaccggaagatatggtgctgttccacaatctcacccaacctaggggagtgaactggtgcgagcggaccaccctcagcaacggcggttgtcaatacctgtgtctgccagcacctcagataaatcctcacagccccaagtttacttgcgcgtgtcctgacggaatgcttctggcacgagatatgcgtagctgtttgaccgaggcggaggcggccgtggcaactcaggaaacttccaccgtgagacttaaggtgtcctctaccgcagtgcggacccaacataccaccaccaggcctgtcccagacacctcaagacttccaggtgcgacgccaggtcttacgactgtggagattgtgactatgagccatcaagcactgggagatgtggccggccggggaaatgaaaagaagccttcatcggtgcgcgccctttcgatcgtcctgccaattgtgcttctggtgtttctttgtctgggcgtgtttttgctttggaagaactggcggctgaagaacattaacagcataaactttgataacccagtgtaccaaaagactaccgaggacgaagtgcacatatgtcataatcaagatgggtactcttacccatcgaggcaaatggtgtcgctggaagatgatgtcgca

SEQ ID NO: 16367 - DNA, 2580 bp, synthetic construct
  misc_feature 1..2580: note = source = /note="Description of Artificial Sequence: Synthetic coding sequence"
  source 1..2580: mol_type = other DNA
atgggcccatggggttggaagttgagatggacggtggcactgcttctggcagcagcaggaactgcagtgggagatagatgcgaaaggaacgaattccaatgccaggatggtaagtgcatttcatacaaatgggtgtgtgacggttccgcagaatgtcaggatggttctgatgagagtcaggaaacttgcctctcggtgacttgtaagagtggtgattttagctgtgggggacgtgtgaatcgctgcattcctcaattttggaggtgtgacgggcaggtggactgcgacaacggatccgacgagcaaggatgtccaccaaaaacctgttcgcaggacgagtttcggtgtcacgacggaaagtgtattagtagacaatttgtatgtgattcggatcgtgattgtcttgacggttcagatgaagccagctgccctgtgctgacctgtggcccagcctccttccaatgcaattcatcgacttgtattccccagctgtgggcatgcgacaacgatcctgattgtgaagatggttcggatgaatggccccagcgatgcagaggcctgtacgtgttccagggagatagctcaccgtgttccgcttttgaatttcattgtctttcgggggaatgcatacattcatcctggcgctgcgacggcggacccgattgcaaggacaagagcgacgaagagaattgtgcagtcgccacgtgtagaccagacgaatttcaatgctccgacggtaactgtatccacggttcgcgtcaatgcgatagagagtacgattgtaaggacatgagcgatgaagtgggatgtgtaaacgtgaccctttgtgagggtccaaacaagttcaaatgccattcgggtgaatgtatcacccttgacaaagtctgcaatatggcgcgcgattgccgcgattggtccgatgaacctattaaggaatgtggaaccaacgaatgtcttgacaacaacggcggctgctcgcacgtttgcaacgatctgaagattggagctgaatgtctttgtcccgacgggtttcaactcgtcgcacaacggcggtgtgaggacattgatgagtgtcaggatcccgacacttgtagccaattgtgtgtgaaccttgaagggggctacaaatgtcagtgcgaggaaggcttccaactcgatcctcatacgaaagcatgcaaggctgtcggatccattgcatacctgttctttactaatcgccatgaggttagaaaaatgactcttgaccgatcagaatatacttctcttatccctaacctgagaaatgtcgtggcactggatactgaggtggcctcaaatcgcatctattggagcgatctgtcccagaggatgatttgttccactcaacttgatcgagcgcacggtgtctcgtcgtacgacaccgtgatttcgcgggatattcaagcccctgatggactcgcagtagactggatccattcaaacatctactggactgattcagtgctgggaaccgtgtcagtggctgataccaagggagtcaaacggaaaaccttgtttagagagaacggatcgaagccccgagccatcgtcgtcgatccagtgcatggcttcatgtactggacggattggggcactcctgcgaagatcaaaaagggaggcctcaatggagtggacatttactcccttgtgaccgagaacattcagtggccgaacggcatcacgctggaccttctctcggggagattgtactgggtggactcgaagctccactctataagctccattgatgtgaacgggggcaatcggaaaactatccttgaagatgaaaagcgcctggcacatccgttttccctcgcggtgtttgaggataaggtattttggactgatatcattaatgaagcgatcttttcggccaatcgcctcactggatcggatgtcaaccttctggccgaaaaccttctttcccctgaggatatggtcctgttccataatctcacccaaccacgtggtgtgaactggtgtgaaagaaccacccttagcaatggaggctgccaatacctttgtttgcctgcccctcagattaaccctcactccccaaagttcacctgcgcgtgtccagacggtatgctgcttgcccgagatatgcgtagctgtttgactgaggcagaagcagcggtcgcaactcaggaaaccagcaccgttcggctgaaggtcagttcaaccgctgtgcggacccaacatacgacgaccagacctgtccctgacacgtcgcggttgccgggtgcaactcccggattgaccactgtggagatagttaccatgagccatcaagccctcggagatgtcgcaggaagaggaaacgagaaaaagccctcgtccgtccgagcactttccattgtccttcctatcgtgcttctggtgttcctttgtctcggtgtgtttctgctgtggaagaattggagactcaagaacataaactcgattaactttgataatccagtgtaccagaaaaccaccgaagatgaagtgcacatatgtcataatcaagacgggtacagctacccatcccgacaaatggtgtctctggaagatgacgtggca

SEQ ID NO: 16368 - DNA, 2580 bp, synthetic construct
  misc_feature 1..2580: note = source = /note="Description of Artificial Sequence: Synthetic coding sequence"
  source 1..2580: mol_type = other DNA
atgggcccatggggatggaagctccgctggactgtcgctctccttttggccgctgcaggaaccgcagtgggggataggtgcgagaggaatgagttccaatgccaggatggaaaatgtatttcatataagtgggtctgcgacggatccgcagagtgtcaggacggcagcgacgaatcccaggaaacatgcctctcagttacatgcaagtccggcgacttttcttgtggtgggagagttaaccggtgtattcctcaattctggcgatgcgacgggcaggtcgactgcgataatgggagcgatgagcaagggtgtcctcctaaaacttgtagtcaggacgagttcaggtgtcacgatgggaaatgtatttctagacagttcgtgtgtgatagtgatcgcgactgcttggacggctcagacgaggccagctgccccgttctgacgtgcgggcctgcttccttccagtgtaactcttctacttgcatccctcagctctgggcctgcgacaacgaccctgactgtgaagatgggtccgatgaatggccgcagcgctgcagagggctctatgtttttcagggagattctagcccttgctctgcattcgagttccactgcctgtcaggcgagtgcatccactcttcctggcggtgcgacggtggtcccgactgcaaagataagtccgacgaggaaaactgcgccgtcgctacctgccggcccgatgaattccagtgtagcgatggaaactgtatccacggctcaagacagtgtgatcgagagtacgactgtaaagacatgagcgatgaggtcggctgtgtaaacgtcaccttgtgtgagggccccaacaaattcaagtgtcactcaggcgagtgcatcaccctggataaggtgtgtaacatggctagggattgtagagattggagcgacgagcccattaaagagtgcggaacaaacgagtgcctggataacaacgggggatgctcacacgtgtgcaacgacttgaagattggagcagagtgcctgtgcccagacggctttcagctcgtggcgcagcggaggtgtgaagacatcgacgaatgtcaggatcctgatacctgcagtcagctgtgcgtcaacctggagggaggatacaaatgtcaatgcgaggagggctttcagctggacccccatactaaagcctgtaaagccgttggttctattgcgtatctgtttttcactaataggcacgaagtgcggaagatgaccctcgacaggagcgaatacacaagcttgattcctaacctgcgaaatgtcgtcgccctggacaccgaagtggctagcaataggatctattggagcgatctctctcaacggatgatttgctcaactcagctggatcgagcgcacggcgtgagctcttatgacacggtgatatccagggacattcaggcacctgatgggctggccgtagactggattcactctaatatctattggaccgactccgtgctcggaaccgtctctgttgctgataccaaaggggttaagcgaaagactttgttcagagagaacggtagtaaaccgcgggcgatcgtcgtggacccggtgcatggtttcatgtattggactgattggggcactccagcaaaaattaaaaaaggaggccttaacggggtagatatctactccttggtaacagagaatattcagtggccaaatgggattaccctggatctcttgagcgggcgcctgtactgggtggatagcaagctccatagcatctcaagtatcgacgtgaacggtggcaacaggaaaacaatcctggaggatgagaagcgcctggcccatcccttctcactggctgttttcgaagataaagtattctggactgatattataaacgaagcaattttttccgccaacaggctgacagggtccgacgtgaacttgctggcagaaaacttgttgagccccgaggatatggtcctcttccataaccttacccagccaagaggtgtcaactggtgcgagcgcacaacactgtcaaacggcggttgccagtacctgtgcctgccggccccgcagatcaaccctcacagccctaagtttacctgtgcatgccccgatggaatgcttcttgcacgggatatgaggtcctgtctgactgaggctgaagcggccgtggcgacacaagagaccagcacggtcagactgaaggttagtagcaccgctgtgaggacacagcacactactactaggcccgtgccagacacatcacggctgcccggggccacccccgggctgacaactgtggaaatagtgacgatgagccaccaggctttgggcgatgtggcaggaagaggcaatgagaagaaacccagcagtgttagggccctttctattgtactgcccatcgtgctgctggtttttctgtgcttgggtgttttcctcttgtggaaaaactggagactgaagaacatcaacagcattaactttgataaccccgtctaccagaaaaccacagaagatgaggtgcacatatgtcacaatcaggatgggtatagctacccctctcgccaaatggtgtcactggaagacgatgtggca

SEQ ID NO: 16369 - DNA, 2580 bp, synthetic construct
  misc_feature 1..2580: note = source = /note="Description of Artificial Sequence: Synthetic coding sequence"
  source 1..2580: mol_type = other DNA
atgggcccgtgggggtggaaactacggtggaccgtggccttgttgctggcagccgctggcaccgctgtgggcgacagatgtgagcggaacgagttccagtgtcaggacggtaagtgcatctcctacaagtgggtgtgcgatggcagtgctgagtgccaggacgggtctgacgagtcgcaggaaacgtgtctgagcgtgacctgcaagtctggtgatttctcatgtggagggagggttaaccgctgtataccgcagttctggaggtgtgatgggcaagtagactgtgataacggaagcgacgagcagggctgtcctccgaaaacatgcagtcaggacgagtttcggtgccacgacggtaagtgcatctccagacaattcgtctgcgactccgacagggattgtctggatggatccgatgaggcctcctgccctgtactcacctgtggccccgcctcgtttcaatgcaatagctctacgtgtattccccagctctgggcctgcgacaacgaccctgactgcgaggacgggtctgacgagtggcctcagagatgccgtggactgtacgtgttccaaggagactcctctccgtgttctgcttttgagttccattgcctctccggcgagtgcatccacagtagttggaggtgcgatggcggaccggactgtaaggacaaaagcgacgaagagaattgcgccgtggctacctgcaggcccgacgagttccagtgcagcgacgggaattgcatccatggtagccggcagtgtgaccgggaatatgactgtaaagacatgtcggatgaggtgggttgcgtaaacgttacactgtgtgagggcccaaacaaatttaaatgccattctggggaatgcattaccctcgacaaagtgtgtaacatggctagggattgtagagattggtctgatgagcccataaaagagtgtggtaccaatgagtgccttgacaataatggtggctgttctcacgtgtgtaacgatttgaagatcggagccgaatgtctatgtccggatgggtttcagttggttgcccagcgacggtgcgaggatattgatgagtgccaggatcctgacacctgctcccagctctgtgtcaacctggaaggaggctacaagtgccaatgcgaagaaggttttcagctggacccacacactaaggcatgcaaagccgtgggatctatagcgtaccttttcttcacgaatcgccatgaagttcggaagatgaccctggaccggagcgaatacactagtctgattcccaacctgcgtaatgttgtagctcttgacacagaagtcgcttccaatcgtatttactggtctgacttgtcacagaggatgatctgctcgacacagttggaccgcgcccatggagtgtccagctatgacacagtgatatcaagagatatccaagcccctgacggactagcagtggattggattcactccaacatttactggactgactcagtgctgggcacggtgtccgtcgctgacactaagggggtgaaacgaaaaaccctgttcagagaaaatggaagcaagccacgggcaattgtggttgaccccgttcatgggtttatgtactggactgactggggtaccccagctaaaatcaaaaaaggagggcttaatggcgtcgatatttactcgcttgtgacagaaaacattcaatggcctaatggaatcactctggacctgctaagcggaagactgtactgggtcgattcaaagctgcactctatcagctccatcgatgtgaatgggggtaataggaaaaccattctcgaagacgagaagcggttggcccaccccttctccctcgcggtatttgaagacaaagtgttttggactgacattatcaatgaggctatctttagcgccaatcggctaacaggctccgacgttaatttgctggctgaaaatctgttatctcccgaggatatggtcttatttcataacctaacacagccaagaggcgtcaattggtgtgagaggaccacgctgtccaatgggggctgccagtatctctgcctccctgctccgcagatcaacccccattctccaaagttcacatgcgcctgccccgacgggatgctgctggccagagacatgaggagttgtctcaccgaagccgaagctgcagtggctacgcaggagacttctaccgtacgactgaaagtgtcatccactgcggtcaggacgcagcataccacgacaaggcctgtgcctgacacctcgcggctccccggagcaactcccggcctgaccaccgtggaaatagttactatgagccatcaggcgttgggcgacgtggccggcagaggcaacgagaagaagccctcctctgtcagagccctctcaatcgtgctgccaatagtgctcctcgtctttctgtgcttgggcgtgtttctactatggaagaattggaggcttaaaaatatcaactcaattaactttgacaaccccgtttatcagaaaaccaccgaggatgaggtacacatctgtcataaccaggatggctacagctaccccagccggcagatggtcagcctggaggacgacgtcgcc

SEQ ID NO: 16370 - DNA, 2580 bp, synthetic construct
  misc_feature 1..2580: note = source = /note="Description of Artificial Sequence: Synthetic coding sequence"
  source 1..2580: mol_type = other DNA
atgggaccatggggttggaagctcaggtggaccgtggcgttgctcctggctgccgcagggaccgcggtgggtgatcgatgtgagcggaacgagtttcaatgccaagacggtaagtgcatctcttataagtgggtgtgtgacgggtcggccgaatgtcaagatggttcggacgaatcgcaagagacgtgtctgtccgttacctgtaagagtggagacttttcctgcggaggtcgagtgaaccgatgcattccccagttctggcgttgtgatggtcaggtcgattgtgataacggatccgatgaacagggttgcccacctaagacctgttcgcaagatgagtttagatgccatgacggaaagtgtatttccagacagtttgtgtgcgatagcgatagggactgtctggacgggtccgatgaagcaagttgccctgtcctgacctgcggccctgcatcctttcaatgcaattcctcgacttgcattcctcaactctgggcttgtgacaacgatccagactgtgaagatggctcggacgaatggccgcagcgctgtcgtggcctctacgtctttcagggcgacagcagcccttgttcggcatttgaattccactgtctgagcggcgagtgtattcacagcagctggcgatgtgacggaggacccgactgtaaggacaagtcggatgaggagaactgtgcagtggcgacttgcagacctgacgagttccaatgttcggatggtaactgtattcatggctcgagacagtgtgaccgcgaatacgattgtaaggatatgagcgatgaagtcggctgcgtgaacgtcaccctttgtgaaggaccaaacaagtttaagtgtcattccggagaatgcattaccctggataaggtgtgtaacatggcccgagattgcagggactggtcagacgagcccattaaagagtgtgggaccaacgaatgtctggataacaacgggggatgctcgcatgtgtgcaatgatctcaagatcggagcggaatgcctttgcccggatggattccagttggtggcacaaagacggtgtgaggatatcgacgaatgccaagatcctgatacctgctcccagctttgtgtcaacctggagggcggttacaagtgtcaatgcgaggaagggtttcagcttgatccacataccaaggcatgtaaggcagtgggaagcattgcctacctctttttcactaacagacatgaagtcagaaaaatgactttggaccgttcggagtatacctcgcttattccaaatctcagaaacgttgtcgccctcgacaccgaggtggcatcgaaccgtatatactggtcagacttgtcacagaggatgatttgttcgacgcagcttgacagagcacatggtgtgtcctcttacgataccgttattagccgcgacattcaggcccctgatgggcttgcagtggattggatccattcgaacatttactggactgatagcgtccttggtactgtgtcagtggcagatacgaaaggtgttaagagaaaaaccctgtttcgagaaaacggtagcaaacctagggctatcgtggtggatccggtgcacgggtttatgtactggaccgattggggaacccctgccaagataaagaagggtggtcttaacggcgttgacatttactcgctggtgactgaaaacatacaatggccaaatgggattactcttgatcttctgtccggtcggctgtactgggtggactccaagctccattcgatctcgtcaatagatgtcaacggaggaaaccgcaagactatccttgaagatgaaaaaagactggcgcatcctttttcgctcgcagtctttgaagataaggtgttttggactgatatcatcaacgaggcaatattctcagccaatcgtctcaccggttcggatgtcaatctcctggcagaaaatcttctgtcccctgaggatatggtgctttttcataacctgacccaaccacgcggcgtcaattggtgtgaacggactacgctttcgaacggaggttgtcagtacctgtgcctgcctgcccctcagattaacccccactcgcctaagtttacctgtgcatgccccgatgggatgcttctcgcgagagacatgcgctcatgcctgactgaagcagaggcggcagttgcaactcaggaaacgagcactgtgagactgaaagtgtcctccaccgcagtgagaacccaacacactaccacgaggcccgtgccggatacctccagactgcctggtgcgaccccagggcttactaccgtggaaattgtgaccatgtcccatcaggctcttggagatgtggcaggtagaggcaacgagaaaaagccctcctccgtgcgtgcattgtcgattgtgttgcctatcgtcctccttgttttcctctgtcttggcgttttccttctttggaagaactggagacttaagaacattaactcaattaacttcgacaatcctgtctaccaaaagacgacggaagatgaagtgcatatttgccacaaccaagacggatactcgtacccttcacggcaaatggtttcgctcgaagatgacgtggcg

SEQ ID NO: 16371 - DNA, 2580 bp, synthetic construct
  misc_feature 1..2580: note = source = /note="Description of Artificial Sequence: Synthetic coding sequence"
  source 1..2580: mol_type = other DNA
atgggaccatggggatggaagctcaggtggaccgtagccctcctcctggcggcagcgggaaccgccgtgggagatagatgtgaacgcaatgaattccagtgccaggatggaaagtgtatatcgtacaagtgggtctgtgacggtagcgcagaatgtcaagatgggtcggacgagagccaagaaacgtgcctgtctgtgacctgtaagagcggtgatttttcgtgtggaggccgcgtcaacaggtgcattccacaattctggaggtgtgatggtcaggtggactgcgataacggatcagatgaacagggctgtcctccaaaaacgtgctctcaggatgaatttaggtgccatgatggtaagtgcatctccagacaattcgtttgtgattcggatagggattgtttggatggtagcgacgaagcaagctgtccggtccttacctgtggccccgcctcattccaatgtaactcgtcaacctgtatccctcaactttgggcatgcgataacgatccagattgtgaagatggatcagacgaatggcctcaaagatgtcgcgggctctacgtgttccagggtgacagctcgccatgctcggcatttgaatttcactgtctgtccggagagtgcatacattccagttggagatgtgacggtggacccgactgcaaagacaagagcgacgaagaaaattgtgcggtcgcaacttgtagaccagatgaatttcaatgcagcgatggaaactgtattcacggcagcagacaatgcgatcgcgagtacgactgtaaggacatgtccgacgaagtgggctgtgtcaacgtgaccctgtgcgagggtcccaacaaattcaagtgtcactctggcgaatgtataactctcgacaaagtgtgtaacatggctcgggactgcagagactggtctgacgaacctattaaggagtgtggtacgaacgaatgccttgataacaatggtggatgctcgcatgtctgtaatgatctcaagattggcgccgaatgtctgtgccctgatggctttcagttggtggcccaacgtagatgtgaagatatcgatgagtgtcaagacccggacacctgctcccaactgtgtgtgaatctggaaggtggatacaagtgtcaatgcgaggagggttttcagcttgaccctcacactaaggcctgcaaggcggtgggttcgatagcctacctgtttttcaccaaccgtcatgaagtcagaaagatgaccctggacagatccgaatacacctctctgattccaaacctgaggaacgtggtggcactggacactgaggtcgcatccaatcgcatttactggagcgatctgagccagcggatgatatgctctacccagctggatagagcacatggtgtgagctcgtacgatactgtcatttcacgtgatatccaggcacccgatgggcttgctgtggattggatacattccaacatatactggaccgactccgtgcttggaacggtgtcggtcgcagatactaagggggtcaaaagaaaaacgctgtttcgggagaatgggtcaaaacctcgagctatagtggtcgatcctgtgcacggattcatgtattggaccgattggggaactccagcaaagataaagaaaggtggacttaatggagtcgacatttactccctggtcaccgaaaacattcagtggcccaatggcattacgctggacctgctgtccggcagactttactgggttgattcaaagctgcattccatttcgtcgatcgatgtgaatggcggcaatcgcaagactattctcgaagatgagaaaagacttgcgcatcctttttccctcgcagtctttgaggacaaggtgttttggaccgatatcattaacgaggccatcttttcggccaatcgcctgaccggatcggatgtgaaccttcttgccgagaaccttctttccccagaagatatggtcctttttcacaacctcacccaaccacgaggcgtgaactggtgcgagcgtaccactctgagcaatggaggttgtcagtacttgtgtctcccagcgcctcagatcaaccctcattcgcccaagttcacctgcgcatgccctgacggcatgctgctggctcgcgatatgcgcagctgcctcactgaagcagaagccgccgtcgctactcaggaaacgtcaacggtgcggctgaaagtcagctccacggccgtgcgtacgcaacacactactacgaggccggtgccagatacttcccgattgcctggagcgactccaggactcactactgtggaaatcgtgaccatgagccatcaggcacttggagacgtggcaggtcggggcaacgaaaagaaaccaagctccgttagggccttgtcaattgtgctgccaatagtacttttggtgtttctgtgtcttggcgtgttcctgctgtggaagaactggaggctgaagaatatcaactcgattaactttgacaaccctgtgtaccaaaagaccactgaggatgaagttcatatatgtcataaccaggatggatacagctacccttcgcgccaaatggtgtcactggaggacgatgtggca

SEQ ID NO: 16372 - DNA, 2580 bp, synthetic construct
  misc_feature 1..2580: note = source = /note="Description of Artificial Sequence: Synthetic coding sequence"
  source 1..2580: mol_type = other DNA
atgggcccttggggctggaagctgcgctggacagttgcacttctgttggcagctgccggcacagctgtgggggaccgctgcgagcgtaacgagttccagtgtcaggacggaaaatgtatcagctacaaatgggtgtgcgatggaagtgcagaatgccaagacgggtcggacgaatcacaggagacctgtctttctgtgacgtgcaaatctggtgatttttcatgcggcggccgcgttaatcgctgtattcctcaattttggagatgcgatggacaagtagattgcgacaatggcagcgatgaacaagggtgccctccaaagacatgctctcaggatgagtttagatgtcacgatggtaaatgcattagtcggcaatttgtgtgcgacagtgatagggattgcctcgatgggagcgacgaagcaagttgtcccgtcctgacctgcggaccagctagtttccagtgtaatagcagcacctgcatcccgcagctctgggcttgtgataacgacccggactgcgaggacggatcagatgaatggccccagaggtgtcggggactttacgtattccagggagactcttcaccatgcagcgcctttgagttccattgtctgtccggggaatgcatccacagttcttggaggtgtgatggcggcccagattgtaaagataaaagcgatgaggaaaactgcgcggtcgccacctgtaggccagatgagttccagtgctcagacgggaactgcatacacggtagcagacagtgtgaccgagagtatgattgcaaggacatgtctgacgaagtgggctgcgtgaacgtcactctttgtgaaggacccaacaaattcaaatgccactctggcgaatgcatcacactcgataaggtgtgtaacatggccagagattgcagagactggagcgatgagccaatcaaggaatgtggcacaaacgaatgcctggacaacaatggcgggtgcagtcacgtatgtaacgatctgaagataggggccgagtgcctgtgtcccgatggattccagctcgtcgcgcaacgaaggtgtgaagatatcgacgaatgccaagatccagatacctgcagccagctttgtgttaatctcgaggggggatacaagtgccaatgtgaggaaggctttcagctcgatcctcacaccaaagcgtgcaaggccgtcggaagtattgcgtacctcttctttactaacaggcacgaagtacgcaagatgactctggaccggagcgagtataccagtctgattcctaacctaaggaacgtggttgcgctggacacagaggttgcatccaacagaatatactggagcgatctgtcgcaacggatgatctgttcaacccagcttgacagggcccacggcgtgtcaagttacgacacagtgatctcccgcgacattcaggctccggacgggctcgcagttgattggatccacagtaacatatattggaccgatagtgtactgggcaccgtgtctgtcgctgataccaagggcgtaaaacgcaaaactttgtttagagagaacggaagcaaaccaagagcaatcgtggttgacccagtacacggcttcatgtattggaccgactggggaactcctgccaagataaaaaaggggggactgaatggtgtggacatctacagcctcgtcacagagaacatccagtggcctaacggtattactctggatctgctgagcggcaggctttactgggtggatagtaagttgcactccatttcgtcaatcgacgtgaatgggggcaacaggaaaacaatcttggaagatgagaagcgactggcccaccccttcagcctcgccgtctttgaggataaggtcttctggacggacatcataaacgaagctatctttagtgccaataggctgacagggtcagatgtgaatttacttgcagagaatctgctgtcccctgaggatatggtgctgtttcataacctgacacagccgcgaggggtcaactggtgtgagagaaccactttgtccaatggcggctgccagtacctgtgcctgccagctcctcagattaatcctcactcacctaagttcacttgcgcctgccctgatggcatgttgttggccagggacatgcgctcctgcctgaccgaagccgaagctgcggtggctacccaggagacgtcaaccgtgcgtctgaaggtttcgtctaccgccgtgcgcacacaacatactacaacacgtcccgtccctgacacctcccggctccctggcgcaacccctggcctgacaacagttgaaatcgttaccatgagccaccaggctttgggcgacgtggctgggagaggaaatgagaagaaacccagttctgtgagggcgctcagcattgtgctacccatcgtattgcttgtgttcctttgcctgggagtgtttctcctctggaagaactggaggctgaaaaacatcaacagcattaattttgacaaccctgtctaccagaaaaccaccgaagacgaggtccacatttgtcataatcaagacggatacagctacccatctaggcaaatggtgagcctggaagacgacgtcgct

SEQ ID NO: 16373 - DNA, 2580 bp, synthetic construct
  misc_feature 1..2580: note = source = /note="Description of Artificial Sequence: Synthetic coding sequence"
  source 1..2580: mol_type = other DNA
atgggtccgtggggttggaaattacgttggacggtagcgctattactagcggcggcgggtacggcggttggtgatcgatgtgaacgtaatgaatttcaatgtcaagatggtaaatgtatatcgtataaatgggtatgtgatggttcggcggaatgtcaagatggttcggatgaatcgcaagaaacgtgtctatcggtaacgtgtaaatcgggtgatttttcgtgtggtggtcgagtaaatcgttgtataccgcaattttggcgatgtgatggtcaagtagattgtgataatggttcggatgaacaaggttgtccgccgaaaacgtgttcgcaagatgaatttcgttgtcatgatggtaaatgtatatcgcgtcaatttgtatgtgattcggatcgtgattgtctagatggttcggatgaagcgtcgtgtccggtattaacgtgtggtccggcgtcgtttcaatgtaattcgtcgacgtgtataccgcaattatgggcgtgtgataatgatccggattgtgaagatggttcggatgaatggccgcaacgatgtcgtggtttatatgtatttcaaggtgattcgtcgccgtgttcggcgtttgaatttcattgtctatcgggtgaatgtatacattcgtcgtggcgttgtgatggtggtccggattgtaaagataaatcggatgaagaaaattgtgcggtagcgacgtgtcgtccggatgaatttcaatgttcggatggtaattgtatacatggttcgcgtcaatgtgatcgagaatatgattgtaaagatatgtcggatgaagttggttgtgtaaatgtaacgttatgtgaaggtccgaataaatttaaatgtcattcgggtgaatgtataacgttagataaagtttgtaatatggcgcgagattgtcgtgattggtcggatgaaccgataaaagaatgtggtacgaatgaatgtttagataataatggtggttgttcgcatgtttgtaatgatctaaaaataggtgcggaatgtttatgtccggatggttttcaattagtagcgcaacgtcgttgtgaagatatagatgaatgtcaagatccggatacgtgttcgcaactatgtgtaaatctagaaggtggttataaatgtcaatgtgaagaaggttttcaattagatccgcatacgaaagcgtgtaaagcggtaggttcgatagcgtatctattttttacgaatcgtcatgaagtacgtaaaatgacgctagatcgttcggaatatacgtcgctaataccgaatttacgtaatgtagtagcgttagatacggaagttgcgtcgaatcgtatatattggtcggatttatcgcaacgtatgatatgttcgacgcaattagatcgtgcgcatggtgtatcgtcgtatgatacggtaatatcgcgtgatatacaagcgccggatggtttagcggtagattggatacattcgaatatatattggacggattcggttttaggtacggtatcggttgcggatacgaaaggtgttaaacgaaaaacgttatttcgtgaaaatggttcgaaaccgcgtgcgatagtagtagatccggtacatggttttatgtattggacggattggggtacgccggcgaaaataaaaaaaggtggtttaaatggtgttgatatatattcgttagtaacggaaaatatacaatggccgaatggtataacgctagatttactatcgggtcgactatattgggtagattcgaaattacattcgatatcgtcgatagatgtaaatggtggtaatcgtaaaacgatactagaagatgaaaaacgtctagcgcatccgttttcgttagcggtttttgaagataaagtattttggacggatataataaatgaagcgatattttcggcgaatcgattaacgggttcggatgtaaatttattagcggaaaatttattatcgccggaagatatggtattatttcataatctaacgcaaccgcgtggtgtaaattggtgtgaacgaacgacgttatcgaatggtggttgtcaatatttatgtttaccggcgccgcaaataaatccgcattcgccgaaatttacgtgtgcgtgtccggatggtatgctattagcgcgagatatgcgatcgtgtttaacggaagcggaagcggcggttgcgacgcaagaaacgtcgacggttcgtctaaaagtttcgtcgacggcggttcgtacgcaacatacgacgacgcgtccggttccggatacgtcgcgtttaccgggtgcgacgccgggtttaacgacggtagaaatagtaacgatgtcgcatcaagcgttaggtgatgttgcgggtcgtggtaatgaaaaaaaaccgtcgtcggttcgtgcgttatcgatagtattaccgatagttctattagtatttttatgtttaggtgtatttttattatggaaaaattggcgattaaaaaatataaattcgataaattttgataatccggtttatcaaaaaacgacggaagatgaagtacatatatgtcataatcaagatggttattcgtatccgtcgcgacaaatggtatcgttagaagatgatgtagcg

SEQ ID NO: 16374 - DNA, 2580 bp, synthetic construct
  misc_feature 1..2580: note = source = /note="Description of Artificial Sequence: Synthetic coding sequence"
  source 1..2580: mol_type = other DNA
atgggaccatggggatggaagttgcgctggaccgtggccttgctcctggcagccgccgggaccgcggtcggagatagatgcgaaagaaatgaatttcagtgtcaggacggaaagtgcatctcgtacaagtgggtgtgtgatggctcagccgagtgccaggatggatcggatgagtctcaagaaacctgtctgtcagtcacctgcaaatccggagacttctcgtgcggtggacgggtgaaccgctgcatcccccagttctggcgctgcgatggtcaggtggattgcgataacggtagcgatgagcaaggatgccctccgaaaacttgctcgcaagacgagttcaggtgccacgacggaaagtgtatatccagacagttcgtttgcgactcagaccgggactgcctggatggctcggacgaagctagctgcccagtcctgacctgcggcccagccagctttcaatgcaattcatccacttgcattccgcagctgtgggcctgcgacaatgacccggactgcgaagatggatcggacgaatggccgcaaagatgtcgcggactgtacgtgttccaaggagattcgtcgccgtgctcggcgttcgaattccattgcctgtcgggcgaatgcatccacagttcatggcggtgcgacggtggacctgactgcaaggataagtcagatgaagaaaactgcgcagtggctacctgcaggccggacgagttccagtgctcagacggaaactgtatccacgggtcaagacagtgcgatagggagtacgactgtaaggatatgagcgatgaggttggatgcgtgaacgtcaccctgtgcgaaggaccgaacaagtttaagtgccattccggagagtgtatcaccctcgataaagtgtgcaacatggcaagggattgccgcgactggtcagacgaaccaatcaaggagtgcggtacgaatgagtgccttgacaataacggcggatgctcccatgtgtgcaacgatctgaagataggagccgaatgcctgtgtccagatggtttccagctggtggcccaacgccgctgcgaggatatcgatgaatgccaagatccggatacttgctcgcagctctgcgtgaacctggaaggaggatacaagtgccagtgcgaggaaggatttcagctggacccacacactaaagcgtgcaaggctgtcggctccattgcttacctgttcttcactaatagacatgaggtgcgtaaaatgaccctcgaccggtcagaatacacttccctcatcccgaacttgcgcaacgtcgtggccctcgacactgaggtcgcatcgaatcgcatctattggtccgacctctctcagagaatgatctgctcgacccagctcgaccgcgcgcacggagtgagctcatacgacactgtgattagcagagacatccaggcacctgacggactcgccgtggattggatccacagcaacatttactggaccgatagcgtgctggggaccgtgagcgtggcagacaccaaaggggtcaaaagaaaaactctgtttcgagagaacggatcgaagccgcgggcgatcgtcgtggatcccgttcacgggtttatgtactggaccgactggggaaccccggcaaaaatcaaaaagggaggtcttaacggagtggacatttactcgctcgtcaccgaaaacattcaatggccgaacgggatcaccctggacctgttgtctggacggctgtactgggtggattcaaagctgcactccatctcctccatcgatgtcaatggaggaaatcgcaagaccatcctggaggacgagaagcggctggcccacccattttccctggctgtctttgaagataaggtgttctggaccgacatcataaacgaagcgatcttctcagccaaccggctgacgggctcagacgtgaacttgctggcagagaatttgctgtcgccggaggacatggtactcttccacaacctgactcagccgagaggagtgaactggtgcgaaaggactaccctgtccaacggcgggtgccagtacctgtgcttgccggcaccacaaatcaatccgcattcgccaaagttcacctgcgcctgcccagacggaatgctgctcgctagggatatgcgttcgtgcctcaccgaggccgaggccgcggtggcaactcaggagacgtcgaccgtgagactcaaggtgtcatcgaccgccgtgcgcacgcagcatacgactacccgccctgtgccagatacctcgaggcttccaggggccacgcctggccttacgactgtggaaattgtgaccatgagccaccaggctctgggagacgtcgcaggccgcgggaacgaaaagaaaccatccagcgtgcgcgccctcagcatcgtgcttcccatcgtgctgttggtgttcctctgccttggagttttcttgctgtggaagaactggcggctcaagaacatcaactccatcaacttcgataatccggtctaccaaaaaactaccgaagatgaagtgcacatctgtcataaccaggacggatactcatacccttcacgccagatggtgtctctggaagatgacgtggcg

SEQ ID NO: 16375 - DNA, 2580 bp, synthetic construct
  misc_feature 1..2580: note = source = /note="Description of Artificial Sequence: Synthetic coding sequence"
  source 1..2580: mol_type = other DNA
atgggtccttgggggtggaaactgcggtggacagtggccctgcttcttgctgccgcgggcacagcggtgggagataggtgtgaacgaaacgagttccagtgccaggacgggaaatgcatctcttataagtgggtatgcgacggcagtgctgaatgccaggacggctcagacgagtcccaagagacatgtttatccgtgacgtgtaagagcggcgacttttcatgtggaggaagagtgaatcgctgcatccctcagttttggcgctgtgacggccaggtggattgcgacaacgggtccgacgagcaaggctgtccaccgaaaacctgctcccaagacgagtttagatgccacgacggaaagtgcatctctaggcagtttgtatgcgattccgatagagattgcctcgacggttcggacgaagcttcctgccccgtgctgacctgcggaccagcctccttccagtgtaatagttcgacctgcatcccccagctgtgggcatgtgacaatgatccagattgtgaggacggttctgatgagtggccacagaggtgccggggcctctatgtttttcagggtgacagctctccatgtagcgcctttgagttccactgcctgagtggcgagtgcatccactcatcctggaggtgcgatgggggcccagactgtaaggacaagtccgacgaggaaaactgcgccgtggcaacatgtcggccagacgagtttcagtgctctgacggaaactgtatccatggatctcgccagtgtgatcgggagtatgattgtaaggacatgagtgatgaggtgggatgtgtgaacgtgactctttgcgaaggtcctaacaagttcaagtgccattcaggggagtgtattacgttagataaagtctgcaatatggctcgcgactgccgggattggtcagatgaacctatcaaagaatgtggcacaaacgaatgtcttgataacaatgggggttgttcacatgtgtgtaacgacctcaagatcggggccgagtgcctatgtccagacggctttcagctcgtcgcacagaggcgctgcgaagacattgatgaatgtcaggatcccgacacttgtagccagctctgtgttaaccttgagggtgggtacaaatgccaatgtgaggaagggtttcagttggacccccacaccaaggcgtgtaaagcggtgggttctatcgcttatctgtttttcactaatcggcacgaggttaggaagatgactctggacaggtcagaatacactagtctgattccaaacctgcgcaacgtagtggccctcgataccgaggtggcctcaaaccgtatctattggtccgacctgagccagcgtatgatctgttctacccagcttgaccgggcacacggcgtctcttcttatgataccgtcatctccagagacatccaggcgcctgatggactagcagtcgactggatccactccaacatatactggaccgacagcgtgctgggaactgtttccgtggctgataccaagggcgtgaagagaaaaactttattccgggagaacggctctaagccaagagcgatcgtcgtagatccagttcacggattcatgtattggacagattggggtaccccagcgaaaataaagaaaggtggattgaatggagtagatatctacagtttggtcaccgagaacatccagtggccgaacggtatcactcttgatctgttgagtggacgattatattgggtggactcgaagctgcacagcatctcatcgatcgatgtgaacggtggaaaccggaaaacgatacttgaggatgagaaacggttagcgcacccttttagtttggccgtgttcgaagacaaggtcttttggaccgacattatcaacgaggccatcttctctgccaaccggctaactggaagcgacgttaacctactggcggagaacctgttgtccccagaagacatggtcctgttccacaatttgacacagcctaggggggttaactggtgcgagcgaacaacgctgagcaacgggggatgtcagtatctctgcctgccggccccccaaattaatccccactccccgaagttcacgtgcgcttgccccgacggtatgctactcgctagagatatgcggtcatgtcttacagaagccgaggctgccgtggctacgcaggagacttcaactgtgcgactgaaggtgtccagtaccgccgttaggacccagcacactactacgagaccagtcccagatacttcacgcctgcccggggccacacctggcctgacaacagtcgagatagtgaccatgagccaccaggcgctgggagatgttgctggaaggggcaacgaaaagaagccgagttcagtgcgggccctatccattgttttgcccatcgtcctgctggtatttctctgtttgggggtttttctgctctggaaaaactggcggctcaagaacattaactccattaattttgacaacccggtctaccagaagacaactgaggacgaggttcacatctgtcacaaccaggacggctacagctacccatctcgtcagatggtgagcctggaagatgatgtcgcc

SEQ ID NO: 16376 - DNA, 2580 bp, synthetic construct
  misc_feature 1..2580: note = source = /note="Description of Artificial Sequence: Synthetic coding sequence"
  source 1..2580: mol_type = other DNA
atggggccgtggggttggaaactgaggtggaccgtggccctcctgctcgcagccgctgggaccgcggtgggagatcgttgcgagcggaacgagtttcagtgtcaggacgggaagtgcatctcttacaagtgggtgtgcgacggatccgcagaatgccaagacgggtccgatgaatcccaggaaacctgcctgtccgtgacgtgtaaatcaggggatttttcctgcggcggacgcgtgaaccgttgcatccctcaattttggaggtgtgacggacaggtcgactgcgataatggcagcgacgaacaaggctgccctccaaagacttgcagccaggatgagttccggtgtcacgacggcaagtgcatctcgaggcagttcgtctgcgactcggacagagactgcctggatggtagcgacgaggcctcctgtccggtgctgacttgcggcccggcctccttccagtgcaactcatccacttgcataccgcagctgtgggcgtgcgacaacgatccggactgcgaggacggttccgacgaatggccgcagcgctgtcgcggactctatgtctttcaaggagactcgagcccttgctcggcgttcgaattccactgcctgtccggagaatgcatccatagctcatggaggtgcgatggtggcccggattgcaaggacaaatctgacgaggaaaactgtgcagttgcgacttgcaggccagatgaattccagtgctccgacggaaactgtatccacggatctcggcagtgtgatcgcgagtacgactgcaaagacatgtcagatgaagtgggctgcgttaatgtgaccctctgcgaaggaccgaataagttcaagtgccactccggagagtgcatcactctggataaggtgtgcaacatggcccgggattgccgcgactggtcggacgaacctatcaaggagtgtggaactaacgaatgcctggataacaacgggggctgctctcacgtgtgcaacgatctcaaaatcggagccgaatgcttgtgccctgatggcttccagctcgtggcgcaaagacgctgcgaagatatcgatgaatgtcaagaccccgacacctgtagccagctctgtgtgaacctcgagggagggtataagtgccaatgcgaagaaggattccagcttgacccccacaccaaggcatgtaaagccgtgggctccattgcgtacctcttcttcaccaacagacatgaggtcagaaaaatgactctggatcgctcagaatacacttccctcatcccgaatctgagaaatgtcgtggcactggacactgaagtggcctcgaaccggatctactggagcgacctctcccagcgcatgatctgtagcacccaactggaccgcgcgcatggggtgtcaagctacgatactgtgatttcacgggatattcaagcgccggacggactggccgtagactggatccattcaaacatctactggaccgatagcgtgctgggcactgtgagcgtcgcagatactaagggagtcaagagaaagacgctcttccgggaaaacgggtcgaagccaagagcaatcgtggtcgaccctgtacacgggttcatgtactggacggactggggaaccccggccaaaatcaagaagggagggctcaatggggtcgacatttactccctggtgaccgagaatatccagtggcctaacgggatcaccctcgatctgctttcgggtcgcctgtactgggtggatagcaagctgcatagcatatcatcgatcgacgtgaacggagggaatcgaaagaccatcctggaggacgaaaagcgcctggcccacccgtttagcctggccgtgttcgaggacaaggttttctggaccgacatcatcaatgaggcgatcttttccgcgaatcggctgaccggctcagatgtgaacctgctcgcggaaaatctcctgtcgccggaggatatggtcctcttccataaccttacccaaccccgcggcgtgaattggtgtgagcggactaccctgagcaacggcggatgccagtacctctgcctgccagcaccacagattaatccgcacagccctaagtttacctgcgcttgccctgatggaatgttgctcgcacgggacatgcggagctgcctcaccgaggctgaggctgcggtcgctactcaagagacttcgaccgtccggctgaaggtgtcatctacggcagtgcgcacccaacatactactacccggccagttccagatactagccgcctgccaggtgcaactccaggtctgactactgtggaaatcgtgaccatgagccaccaggccctcggtgacgtcgccggacgcggcaatgaaaagaagccaagctccgtgcgggcactctcgatcgtcctccccatcgtgttgctggtgtttctgtgcctcggagttttcctgctgtggaagaattggcgcttgaaaaacataaactcgatcaacttcgacaatccagtgtaccagaaaacgaccgaggacgaggtgcacatctgccacaatcaagacggatacagctacccgagccgccaaatggtgagcctggaggatgatgtggct

SEQ ID NO: 16377 - DNA, 2580 bp, synthetic construct
  misc_feature 1..2580: note = source = /note="Description of Artificial Sequence: Synthetic coding sequence"
  source 1..2580: mol_type = other DNA
atgggaccttggggatggaaacttcgctggaccgtggcgctgctcctcgccgcggccggaaccgccgtcggcgatcggtgtgagcgcaacgaattccaatgccaagatggcaaatgtatctcatataagtgggtctgcgacggctccgctgaatgtcaggacggatctgatgagtcacaggaaacttgcctgtcagtcacttgtaagtcgggcgatttctcctgcggaggccgggtcaacaggtgcattccacaattctggcggtgcgacggtcaggtggattgcgacaatggatcagatgaacagggatgcccgcctaagacttgttcgcaggatgaattcagatgccacgacggaaagtgcatttcacgccagtttgtctgcgattctgaccgcgattgccttgacggctccgacgaggcgtcctgcccagtgctgacctgtgggcctgcgtcctttcaatgcaactcctcgacgtgtatcccgcagctgtgggcttgcgacaacgacccagattgcgaagatggctcagatgagtggccccaacgctgtaggggactgtacgtgtttcaaggagactcttcaccatgctcggcatttgaattccactgcttgagcggagaatgcatccacagctcgtggcgctgcgatggcgggccagactgcaaggacaagtccgatgaagaaaactgcgctgtggcgacctgcagaccagatgaatttcagtgctcggatggcaactgcatccatggctcacgccagtgtgaccgggagtacgactgcaaagatatgtcggacgaagtgggttgcgtcaacgtgactctgtgtgaaggaccaaacaagttcaagtgtcactcgggagaatgcattactctggacaaagtctgcaatatggctagagactgcagggattggtcggacgaaccaatcaaggaatgtggaaccaacgagtgcctggacaataacggaggatgctcccacgtctgcaatgatctgaagatcggggccgagtgcctctgccccgacggctttcagctggttgcgcagaggcgctgtgaagatatcgacgaatgccaagatccagacacctgctcgcagctgtgtgtgaatctcgagggcggatacaagtgtcaatgtgaggaggggttccagctggatccccacaccaaggcatgcaaggcagtcggctcgatcgcctacctgttcttcactaatcgccacgaggtgcggaagatgactctggaccggtcagagtatacgtcgctgatacccaatctccggaatgtggtggccctggacactgaagtggcttcgaacagaatctactggagcgatctctcgcagagaatgatctgtagcacccaactggaccgggcccatggagtgtcaagctacgacactgttatttcacgtgatattcaggcgccggacggtttggctgtggactggatccactccaatatctactggacggacagcgtcctgggcaccgttagcgtggcggatactaaaggcgtgaagaggaaaaccctctttagggaaaatggatccaaaccgcgagcaatcgtggtggatccggtccacggattcatgtattggaccgattggggaaccccggctaagattaagaaaggaggactcaacggagttgacatttactctctcgtgaccgagaacatccagtggccaaacggaatcactctggatctgctgtcaggcagactgtactgggtcgactcgaaactccactcaatctccagcatcgatgtgaacggcgggaatcgcaaaactatcctcgaagatgaaaagaggctggcacacccgttctccctggccgtgttcgaggacaaggtgttctggaccgacatcatcaacgaagccatcttctcagcgaatcggctgactgggagcgacgtgaacctgctcgccgaaaatctcctgtcaccggaggacatggtgttgttccataacttgactcagccaagaggcgtgaactggtgcgaaagaactaccctgtccaacggtggatgccagtacctgtgcctcccggctcctcagattaatcctcactcgccgaagttcacttgtgcgtgtccggatggtatgctgttggcccgtgatatgcgctcctgtctgactgaggcagaagcagcggtcgccactcaggaaacctccaccgtgcggctcaaggtgtccagcaccgcagtgcggactcaacatacgactactcggccagtgccagatacctcacggctgccgggggcgactccgggtctgaccaccgtggagatcgtcacgatgtcccaccaggcactgggagacgtggccggaagaggcaacgagaagaaaccctcatcggtgagagcactgtcaattgtgctgcccatcgtcctgctggtgtttctgtgcctgggcgtattcctcctgtggaaaaactggcgcctgaagaacatcaactcgattaacttcgacaatcccgtgtaccagaaaaccaccgaggacgaagtgcacatctgtcacaaccaagacggatacagctacccttcgagacagatggtgagcttggaagatgacgtggcg

SEQ ID NO: 16378 - DNA, 2580 bp, synthetic construct
  misc_feature 1..2580: note = source = /note="Description of Artificial Sequence: Synthetic coding sequence"
  source 1..2580: mol_type = other DNA
atgggcccgtggggatggaaacttcgatggactgtcgcactgctcttggccgccgccggtacagcagtcggcgatcggtgtgagaggaacgaattccagtgccaagacgggaaatgcatcagttacaaatgggtctgtgacggctccgccgaatgccaggatggtagcgacgaatctcaagagacttgcctcagcgtgacctgcaagagtggggatttcagctgcggcggtcgggtcaatagatgtattcctcagttctggcgatgtgacggtcaggtagattgcgacaatggctccgatgagcaagggtgccctcctaaaacatgttctcaggatgagtttcgatgtcacgacgggaaatgtatatctaggcaattcgtttgcgactctgatagggactgtttggacggatccgacgaagctagttgtcctgtgcttacttgtggacctgcgtcatttcagtgtaatagttcgacgtgcatacctcagctctgggcctgtgataatgaccctgattgcgaagatggatcagatgagtggccacagcgatgccgtggcctgtatgtctttcagggcgatagttctccctgcagcgccttcgaattccactgcctgtctggcgaatgtattcacagctcatggcgatgcgacggtggaccagattgtaaagacaagtcggatgaggagaactgtgcagtggcgacctgtaggcctgatgagttccaatgttcagatggcaactgtattcatggaagtcgacagtgcgatagggagtatgattgcaaagacatgtcagatgaagttggctgcgtaaacgtcactctgtgtgaggggcccaacaagttcaaatgccattccggtgaatgcatcacgctggataaagtgtgtaacatggctagggactgcagggattggtctgacgagccaatcaaggaatgcggaactaatgagtgcctagacaacaatggaggatgtagccacgtgtgcaatgatctgaaaattggtgcagagtgcctgtgccctgacgggtttcagctcgtagctcagcgaaggtgcgaggacattgatgaatgccaggatccagacacgtgttcacagctatgtgtcaacctggagggtggatataagtgccagtgcgaagaaggttttcagctcgacccccacacaaaggcttgtaaagccgtgggttccattgcttacctgttcttcaccaatcgacacgaagtgaggaagatgacccttgacagaagcgaatacacctcgttaatccctaatctccgaaacgttgtagctctggacaccgaggtggcctccaaccgaatctattggagtgacctcagccagcgaatgatctgttccacccagcttgacagggcgcatggtgtatcgtcttatgacaccgtgatctcacgagatatccaggcccctgacggactggccgtcgattggatccactccaatatttactggactgattctgttctggggactgtctccgtggccgatacaaaaggtgtgaaacgaaagaccctctttagagagaacgggagcaagccgagagctatcgtggtggaccctgtgcacgggtttatgtattggaccgattgggggacccccgccaagattaaaaagggcggcctgaacggagtagatatttacagccttgtgaccgaaaatattcagtggccaaatggcatcaccctggatcttctcagcggccgactgtattgggtagatagtaaactacacagcatatcaagtattgacgttaacggaggtaacaggaaaactatcctagaagacgaaaaacgcctggctcacccattctctctggccgtctttgaggacaaggtgttttggacggatattatcaacgaagcaatcttcagtgctaatcgattgacaggcagtgacgtgaacctgctggcagaaaatctcctgtcgcccgaagatatggttctgttccacaatttgactcagccgagaggagtaaactggtgtgagcgtacaacgttgtcgaatggggggtgtcagtatctgtgcttgcccgcaccccagattaatcctcactctcctaagttcacctgtgcatgcccggacggaatgttgttggccagagacatgcgaagctgcctaaccgaggcggaggccgcagtggcgacacaggaaacctcaaccgtcaggcttaaggtgagttccaccgcagttagaacacagcacacaaccactcgacctgtgcccgacacctcacgacttccaggggcaaccccaggactgacgacagtcgagatcgtgacgatgtcccatcaggccctcggagatgtggcaggccgaggtaacgagaaaaagccttcatcagttcgggcattgagcatagtcctgccaatcgtgctgctggtgttcctgtgtctgggtgtgtttctgctgtggaagaactggaggttaaagaacatcaactcaattaactttgacaatcccgtttatcagaaaaccacagaggatgaagtgcatatctgccacaatcaagacgggtatagctatccttctaggcagatggtgtcactggaggatgacgtcgct

SEQ ID NO: 16379 - DNA, 2580 bp, synthetic construct
  misc_feature 1..2580: note = source = /note="Description of Artificial Sequence: Synthetic coding sequence"
  source 1..2580: mol_type = other DNA
atggggccatggggatggaaattgcgatggacagtcgccttactgttagccgcagctgggacagcagtgggggatagatgtgaaagaaacgaattccagtgccaagatggaaaatgtatctcttataaatgggtctgcgatggaagtgcggaatgccaggatgggtcagacgaatcccaagaaacttgtctctcagtcacatgcaaaagtggggatttttcctgtgggggaagggtcaaccgatgcatcccccagttttggcgctgcgatgggcaggtagattgtgataacggatcagatgaacaggggtgccctcccaagacatgctcgcaggatgaatttaggtgccatgatgggaaatgtatctctagacagttcgtgtgtgattcagatcgagactgtctcgatggatccgatgaagcctcgtgtcccgtgcttacatgtgggccagcatcctttcagtgcaactccagtacttgtatcccacagctctgggcttgtgataacgatcctgactgcgaggacgggtccgatgaatggccgcagcgctgtagggggctttatgtctttcagggggattcctcgccttgctccgcttttgaatttcactgcctctcaggggagtgcatacattcatcttggcgatgtgatgggggacccgactgtaaagataagtctgatgaagaaaattgcgctgttgccacgtgccgtcccgatgaattccagtgttctgatggaaactgtattcacggatcccgacagtgcgacagagaatatgattgcaaagatatgtccgatgaggtggggtgtgttaacgtaacactctgtgaaggacccaacaaatttaaatgccactcaggggaatgtattactcttgataaggtgtgtaatatggcacgggattgccgggattggtccgatgaacccatcaaagaatgtgggacaaacgaatgcctggataataatggaggatgttctcatgtttgtaacgatttaaaaataggagccgaatgcctctgtcctgatggatttcagttggtcgcccagcggcgatgtgaagatatagacgaatgccaggatcccgatacttgctcacagctctgtgtcaacttggaagggggatataaatgtcagtgtgaagaaggatttcagttagatccacacactaaagcttgtaaagccgtgggatccatcgcctatctctttttcacaaaccggcacgaggtgagaaaaatgactctcgacaggtctgaatatactagtctgataccaaatctcaggaatgttgtggctctggatacagaagttgcttcaaatagaatctactggtcagatctctcacagcgcatgatttgttccacacagctcgatagggctcacggggtctcatcatatgatactgttatatctcgtgatatacaggctcccgatgggctcgccgtcgattggatccactctaatatatattggactgattccgtcctcggaacagtctccgtcgctgacacaaaaggggtgaaaaggaaaactctctttagagagaatggaagtaagccacgagccatagtggtggatcctgtacatgggtttatgtattggactgattggggaacacccgccaaaatcaaaaaagggggacttaatggggttgatatctattcattggtaacagaaaatatccagtggcccaacgggatcactttagatcttctatccggacggctgtactgggtcgactcaaaactccattcaatctcttccatagatgtgaacggagggaatcggaaaacaatcttagaggatgaaaaacgcttagcccaccccttctctctcgcagtatttgaagataaagtcttctggactgatatcatcaacgaagcaatattctcagctaaccgattaactggatcagatgtcaacctcctcgctgaaaatctgctgtcacctgaagatatggtcttattccacaaccttactcagcctcggggggtcaattggtgtgaaaggactacactctctaatggggggtgtcagtacttatgtttgcccgcacctcagatcaatccacactctccaaaattcacatgcgcttgtcctgatggaatgttgcttgcacgcgatatgaggtcgtgtctcacagaagctgaagcagctgtggcaactcaggaaacttctacagtgaggctcaaagtttcctctactgcagttcgcacacagcacacgacgacacgcccagtgcccgatacttccagactacctggagccactcctggattgactactgtggagatagtaactatgagtcatcaggcactaggggatgttgcggggagaggaaacgaaaaaaaaccatcctcagtacgggccctttctattgttctgcccattgttctcctggttttcctttgcctgggagtttttctcctctggaagaattggaggctcaaaaatattaattctatcaactttgacaacccagtctatcagaaaacaacagaagatgaggtgcatatatgtcacaaccaggatgggtattcatatccttcgaggcagatggtctctcttgaagatgacgtagct

SEQ ID NO: 16380 - DNA, 2580 bp, synthetic construct
  misc_feature 1..2580: note = source = /note="Description of Artificial Sequence: Synthetic coding sequence"
  source 1..2580: mol_type = other DNA
atgggaccttgggggtggaagctgcgttggacggtagctctcctgctagccgccgccggaactgccgtgggtgacagatgcgaacgtaacgagttccagtgccaggacggaaaatgcatctcttacaagtgggtctgcgatgggagtgccgagtgccaggatggctctgacgagagccaggaaacatgcctgtctgtgacatgcaaatcaggagatttctcctgcgggggccgcgtgaataggtgcatcccgcaattctggagatgcgatggccaagtggactgtgacaatggcagtgacgagcaagggtgccccccaaagacatgctcacaagacgagttccggtgccatgacggaaaatgcatctctagacaatttgtgtgcgattctgatcgcgattgccttgacgggagtgacgaagcctcatgtccagtcttgacttgtggaccagctagtttccagtgtaattcgtcgacttgcatcccccagctgtgggcctgtgacaatgacccagactgcgaggacggatcagacgagtggcctcagagatgcagggggctgtatgttttccagggggattcctccccttgttctgccttcgagtttcattgtctgtccggggagtgcattcattccagttggcgatgtgacggtgggcctgactgtaaggacaagtcggacgaggagaattgcgccgtagcaacctgccggccagacgagtttcaatgctctgatgggaactgcatccatgggagccggcagtgtgacagggagtacgattgcaaagacatgtccgatgaagtgggttgcgtgaacgtgaccctgtgtgaaggtcctaacaaattcaaatgtcatagcggagaatgcataaccttggataaggtatgcaacatggcccgggattgccgagactggtcagacgagccaattaaggaatgcgggaccaatgagtgcttggacaacaatggcggctgttctcacgtgtgcaacgacttaaaaataggagcagagtgcctttgccccgacggatttcaactggtagctcagcgccggtgcgaagacatagacgaatgccaggaccccgatacatgttcccagctgtgtgtgaacctagagggcggatacaagtgtcagtgtgaggagggctttcaactggatccccacaccaaggcctgtaaagctgtcggctctatcgcctacctgttcttcactaaccgccacgaggtaagaaagatgactctcgaccggagtgagtacacatccctgatcccaaaccttcgcaatgtcgtggctctggacacggaggtagcttcaaatagaatttactggtccgatttatctcagcggatgatttgctccacacagctggaccgggcccacggggtctcgtcatacgataccgtcatatctcgcgatattcaggcaccagatggattagcagtcgactggatccactccaatatttattggaccgatagcgtcctgggaacagtttccgtggcagataccaaaggcgtcaaacggaaaacattattcagggagaatggatcaaaacctcgagcgattgttgtcgacccagtgcatgggttcatgtattggacagattggggcaccccagcgaagatcaaaaagggggggctaaacggcgtggatatatacagcctcgtcacagagaatatccagtggcccaatgggattacactcgatttgctgagcgggcgcttgtattgggtggactcgaaactccattctatcagttctatcgatgtgaatggcggaaatcgtaagacgatccttgaggacgagaagaggctcgctcatccattctcactggccgtgtttgaagacaaggtgttctggactgacatcatcaatgaagccatattctccgcaaaccggctgactggcagcgacgtgaacctgctggctgaaaatctcctcagtccggaggatatggtcttgtttcataacttgacccaaccccgaggagtcaactggtgtgaaaggacaactctcagtaacggcgggtgccagtacctgtgcctgccagccccgcaaattaatccccacagccctaagtttacttgcgcttgcccagacgggatgctgttggcccgggatatgcgtagctgtcttactgaagctgaagcggccgtggcaacccaggagactagtacggttcgtcttaaagtgagcagcaccgccgtgagaacccagcataccactacacggcccgtgcctgacaccagtagactgcccggggcaacacccggccttaccacagtcgaaatagtcaccatgtcacatcaagctctcggcgacgttgcagggagaggcaatgagaaaaagccaagttccgtgcgggccctgtctatcgtacttcccatagtcctgttggtgttcctctgcctcggtgtctttctcctgtggaaaaactggcgcctgaaaaacatcaacagcataaattttgacaatccggtctaccaaaagaccaccgaggacgaagtgcatatctgccataatcaggatgggtactcttatccatccaggcagatggtgtcactggaagatgacgtggcc

SEQ ID NO: 16381 - DNA, 2580 bp, synthetic construct
  misc_feature 1..2580: note = source = /note="Description of Artificial Sequence: Synthetic coding sequence"
  source 1..2580: mol_type = other DNA
atgggaccctggggatggaagctgcggtggactgtggcgcttctcctagcagctgccggaactgccgtgggagatcgctgcgagcggaatgaattccagtgccaggatggaaaatgcatatcctacaaatgggtgtgcgatgggtccgctgaatgccaagacggatctgatgaaagtcaggaaacttgccttagtgtcacatgcaaatccggagatttttcttgcggggggcgggtaaatagatgcattccacagttctggaggtgtgatgggcaggttgattgcgataatggatccgacgaacaggggtgtcctcctaagacgtgctctcaggatgaattccggtgccacgacggaaaatgtattagtagacagttcgtttgtgacagtgatagggattgcctagatgggtctgacgaagcatcctgccccgtcctcacttgtggacccgcttccttccagtgcaattcctctacatgcatccctcagctgtgggcctgcgataacgatcccgattgtgaagacgggtccgatgaatggccccagaggtgtcgggggctctacgtgttccagggagattcttccccttgctccgcttttgaatttcattgtttatccggagaatgtatccattcctcatggcggtgcgatggagggcctgattgcaaagataaatctgatgaagaaaattgtgccgtagctacatgccggcctgatgaattccaatgttctgatggaaattgcatccatggaagtaggcagtgtgatcgcgaatatgattgtaaagatatgtccgatgaagtcgggtgtgttaatgtgacactgtgtgagggacctaacaaattcaagtgccactctggagagtgtattactctcgataaagtctgtaacatggcacgtgactgcagggattggtccgatgaacccatcaaagaatgtggaacaaatgaatgtcttgataacaatggaggatgcagtcatgtgtgcaatgacctgaaaatcggagctgaatgcctctgtccagatggattccagctggtggcacagcgccggtgcgaagatattgatgaatgtcaggatccagatacttgctcccagttatgcgtgaacctggaggggggatataaatgccagtgcgaagaaggattccagctcgatccacacacaaaagcctgtaaagctgtggggagtatcgcctatctctttttcacaaacaggcatgaagtacgcaaaatgactttagatcggtcagaatatactagtttaataccaaatcttaggaacgtggtagctctcgacacagaagtagcgtctaaccggatctattggtcagatctaagtcagcgcatgatctgtagtactcaactcgatcgggcacatggagtatcctcttatgatacagttatatcacgcgatattcaggcacctgatggactcgcggtggattggattcacagtaatatctactggactgattcagtcctgggaactgtcagtgtagcagatactaaaggggtgaaacgaaaaactctttttcgggaaaatgggtccaaaccacgcgccatcgtggtggatcccgttcatggatttatgtactggactgattgggggactcccgccaaaatcaaaaaaggagggcttaacggagtggacatatattcccttgtgacagaaaatatacagtggcccaatgggataacactcgacctgctgtccggaaggctatactgggtagattccaagctgcactcgatatcttccatcgatgtcaacggaggaaaccggaagactatccttgaagatgaaaaaaggctggcccaccccttctctctcgccgtgttcgaagacaaggtcttttggactgatatcataaatgaagctattttttccgctaaccgactaactgggagtgatgtgaatctcctagctgaaaacctcctttcacctgaagacatggtgctctttcataatttaacacagccaaggggagtaaattggtgtgaacggacaactctatcaaatggagggtgccagtacctttgcctccccgcccctcaaatcaatccacatagtcccaaatttacatgtgcctgtcccgatgggatgctactggctcgggatatgcgatcttgtctcacagaagccgaggcagccgtggccacacaggagacttctacagtccggctaaaagtgtcgagtacagctgttaggacacagcatactacaactcgccccgtacccgatacaagtcggctcccaggggccacacctggattaacaacagtggaaatcgtaacaatgtctcaccaggccttgggggatgtcgcggggcgcgggaacgaaaaaaaaccctcctctgtgagggcattaagtattgttctgcctatcgtcctccttgtcttcctatgcctcggagtattcctgctttggaaaaactggcgactgaaaaatatcaatagtatcaatttcgataatcccgtttaccaaaaaacaactgaagatgaagtgcatatatgccataaccaggatgggtactcttatccaagtcggcagatggtgtctctggaagatgatgtggct

SEQ ID NO: 16382 - DNA, 2580 bp, synthetic construct
  misc_feature 1..2580: note = source = /note="Description of Artificial Sequence: Synthetic coding sequence"
  source 1..2580: mol_type = other DNA
atgggtccttggggatggaaacttcggtggactgtcgcgctgctgttggctgccgcgggcacggcggtaggtgatcgctgcgaacgaaacgagttccaatgccaagacggcaagtgtattagctacaaatgggtctgtgacggctctgcggaatgccaagatggctctgatgagagccaggaaacgtgtctgagcgttacttgtaagagtggggacttcagctgcggtggacgagttaaccgctgcatacctcagttttggcgatgcgatggccaggttgattgtgataacggttcagatgaacaaggttgtcctccgaaaacctgcagccaagatgaattcaggtgccacgatgggaagtgtatctcccgccagttcgtttgtgattctgaccgggactgcttggacggatctgacgaagccagctgcccggtcctgacttgtggccctgcctcgtttcagtgcaactctagcacttgcattccacagctgtgggcgtgcgataacgaccctgactgcgaggacggcagcgatgagtggccccagcgttgtcgaggtctgtacgtgttccaaggcgacagctccccttgttctgcctttgagtttcattgcttgagcggcgaatgcatacactcttcttggcgctgtgatgggggcccggattgtaaggacaagagtgacgaagaaaattgcgccgtggcgacctgccgtcctgatgagtttcagtgctctgatggtaactgtattcacggcagccgccaatgtgatcgcgaatacgactgtaaagatatgagcgatgaggtgggctgtgttaacgtcaccctgtgtgagggtcctaataagttcaagtgtcatagcggagaatgtattactttggacaaagtttgtaacatggcacgcgattgccgcgactggagtgatgagccgattaaggagtgcggcactaacgagtgcctggacaataacggtgggtgctctcacgtttgcaatgacctgaaaatcggggccgagtgcctctgtccagacggctttcaactggttgcacagcgacgttgtgaagacatcgacgagtgtcaggacccggatacctgtagccaactttgtgtgaatttggagggtgggtacaaatgtcagtgtgaagaagggttccagctggatccacacacgaaagcctgtaaagctgttggttcgatcgcatatctgttctttacgaaccgtcacgaggtccgtaagatgactctggaccgatccgagtatacctcgctgatcccgaacctgaggaatgttgtcgccttggatactgaagtggcaagcaatcggatttattggtccgatctgagccaaaggatgatctgttccacccaactggaccgggctcatggtgttagcagctatgacacggtaataagccgggacattcaagcaccagacggcctcgccgtggattggattcatagcaatatttactggaccgatagcgtgctcggcaccgtgtccgttgcggacaccaaaggtgtcaaaaggaaaacgctcttccgcgagaatggaagtaaaccacgcgctatcgttgtagacccggtccacggttttatgtactggactgactggggtacgccagccaaaatcaagaagggcggattgaacggggtagacatctacagcttggtgaccgagaatattcaatggccgaacggtattaccctggacctcctgagcggacggttgtactgggtggattctaagctgcattccatttccagcatcgatgttaacggtggtaacaggaagaccatcctcgaagatgaaaagcgtctggcccacccatttagcctggccgtattcgaggataaggtgttttggaccgacattataaatgaggcgattttctctgcaaatcgcctgacgggtagcgacgttaacctgctggcggagaatctactctcccctgaagacatggtcctgttccacaatctgactcaaccacgaggagtcaactggtgtgaacggaccaccctgtctaacggcggctgccaatatctgtgcttgccagccccgcagattaatcctcattctccgaagttcacctgtgcctgtccagatgggatgctgctggcgcgggacatgcgcagctgtctgacggaagcagaagcggcagtagcaacccaggagaccagcaccgttagactgaaagtaagcagtacggcagtccgtactcaacacaccacgacgcgcccggtccctgatacctcccgcctgccgggtgccacccccggcctgacgaccgtggaaatcgtcaccatgagccaccaggccctgggtgacgtggcgggtcggggtaatgagaagaaaccgagcagcgtgcgcgctctgagcatcgttctgccaatcgttttgctggtttttctgtgtcttggtgtctttttgctgtggaagaactggagactcaaaaatattaatagcattaacttcgataacccagtgtatcaaaagaccacggaggacgaagtgcacatttgccacaaccaggatggctattcttatccttcacgccagatggtgtctctggaggacgacgttgcg

SEQ ID NO: 16383 - DNA, 2580 bp, synthetic construct
  misc_feature 1..2580: note = source = /note="Description of Artificial Sequence: Synthetic coding sequence"
  source 1..2580: mol_type = other DNA
atgggcccatggggctggaagctccggtggacagtggctctgttgcttgccgctgcggggacggctgttggggatcgatgtgagcgcaatgagttccagtgccaggacgggaagtgtatatcatataaatgggtctgtgatgggtccgcagaatgtcaggacggctccgacgagtctcaggaaacctgcctttccgtaacgtgtaagtcaggcgacttttcctgcggtggtagggtgaatagatgtattccccagttttggaggtgcgatggccaggtggactgcgataatggaagtgacgaacagggttgtcccccgaagacatgctcccaagacgagtttcggtgccacgacggcaagtgtattagcaggcagtttgtgtgtgactccgacagggattgtcttgatggttctgacgaggctagctgccctgtcctcacatgtggcccggcctcattccagtgcaactccagtacctgcatccctcaactgtgggcgtgtgataatgaccctgattgcgaagatggaagtgacgagtggcctcagagatgtcgagggctgtacgtgttccagggcgattcctccccgtgttctgctttcgagtttcactgtctttcaggggaatgcattcattcaagctggcgatgcgatggaggaccagattgcaaggacaagtctgatgaagaaaattgtgcagtcgctacatgtcggcccgacgagtttcagtgctccgatgggaattgtattcacggctccagacaatgcgatcgggaatatgactgtaaagacatgtctgatgaggtaggatgcgttaacgtgaccctgtgcgaggggcctaacaagtttaaatgtcactccggtgagtgtatcacactggacaaggtgtgtaacatggcccgggactgccgggactggtctgacgagccgattaaagagtgtgggactaatgagtgcctggacaacaatggaggctgctctcatgtttgtaacgatctgaaaattggtgcagagtgtctgtgtcctgatgggtttcaactggttgctcagcgccgctgcgaggacatcgatgaatgtcaggaccctgacacttgctcccagctttgtgttaacctggagggcggctataagtgtcagtgtgaagagggcttccagttggacccgcatacaaaggcctgcaaggctgtaggctccattgcctacctcttcttcacaaatcgacatgaagtgcgcaagatgacattggacagatcagagtacacctctttgatccctaatttgcggaatgtggtcgccctcgataccgaggtggcgtcaaacaggatctattggtctgatctgtctcagcggatgatttgttctactcagctcgaccgggctcacggggtctcctcatatgataccgtgatctcaagggacattcaggcccctgacggccttgccgttgattggatacattccaatatatattggaccgatagcgtgctcggtaccgtcagtgtggccgacacgaagggagtgaagcgcaaaactctcttcagggaaaacgggagtaagccaagggctatcgtggtcgatcccgtgcacgggttcatgtactggacagactgggggacaccagccaagataaaaaaaggaggcctgaatggcgtggatatttatagcttggtgaccgagaacatacagtggcccaatggtattactctcgatctgctgtcaggtaggctgtactgggtggactctaaattgcatagcatatctagcatcgacgtgaacggcggtaatcggaagacaatcctggaggacgagaagcggcttgcccaccctttttctctggccgtttttgaggacaaagtattttggacggatatcattaacgaagctatcttcagcgctaacagactgaccggctcagacgtgaatctcctcgctgagaatctgctctccccagaggacatggtgcttttccataacctgacccagcccaggggggtgaattggtgtgagaggacgactctttccaatggaggttgccagtacctgtgtctgcccgcgccgcagattaatcctcactctcccaagttcacatgtgcgtgtccggatggtatgctgctggcccgggatatgagatcctgtctcacagaagctgaggctgcagttgctactcaggagactagcacagtaaggctgaaggtgagttcaactgcagtgcgaactcagcacacaactacaaggccagttcctgacacttccaggctgcccggcgcaaccccgggtctcaccacagtcgaaatcgttacaatgtcccaccaagcccttggggatgtggccgggcgcgggaatgagaagaagccttcatcagtgcgggccctgtccattgttttgcccatcgtcctgctcgtgtttctctgcctgggcgtcttcctcctctggaagaactggaggctgaaaaacatcaactctatcaactttgacaatcctgtgtaccagaagactaccgaggacgaggtccacatatgtcataatcaggatggatactcctacccctcccgccaaatggtgagtctggaggacgacgtggcc

SEQ ID NO: 16384 - DNA, 2580 bp, synthetic construct
  misc_feature 1..2580: note = source = /note="Description of Artificial Sequence: Synthetic coding sequence"
  source 1..2580: mol_type = other DNA
atgggtccttggggttggaagctgagatggactgtcgcacttctgctcgctgcagcaggtaccgcagtcggagatcggtgtgaacgaaacgaatttcagtgccaagatgggaagtgtatctcgtacaagtgggtttgcgacggttcagcagaatgccaagatggttccgatgaaagccaagagacttgtctctcggtcacctgcaagagcggtgatttttcctgtggtggccgcgtcaatcggtgtattcctcaattttggagatgtgacggacaggtggattgcgataatggatcagatgaacaaggctgcccaccaaaaacttgttcccaagacgagtttcgttgtcatgatggcaagtgtatctcccgtcaattcgtgtgtgattcagatcgcgattgccttgatgggtcagatgaagcatcttgccccgtgctcacttgcggaccagcgagcttccaatgtaactcgagcacctgtataccacaactgtgggcgtgcgataacgacccggactgtgaagatggaagcgatgaatggcctcagcgatgcaggggcctttacgtgttccaaggtgactcctcgccgtgctcagcgttcgaatttcattgtctttccggagaatgcattcattccagctggcggtgtgatgggggtcctgactgtaaagacaaatcggatgaggagaattgtgcagtcgctacctgtagacctgatgaatttcaatgttcagacggaaactgcatccatgggtcgcggcaatgtgaccgcgaatacgattgtaaggacatgtcagacgaagtgggatgcgtgaatgtcactttgtgcgaaggacctaataagttcaagtgtcacagcggagaatgtatcacccttgacaaagtgtgtaatatggcccgcgattgcagagattggtcagatgagccgattaaggaatgtggcaccaacgaatgccttgataacaacgggggatgttcccacgtgtgcaatgacctcaaaatcggagccgagtgtctgtgcccagacggttttcagctcgtcgcgcaacgtagatgtgaggacattgatgagtgccaagacccagatacgtgttcacaactgtgtgtcaacctggagggagggtacaagtgtcagtgtgaggagggcttccaactggatcctcataccaaggcatgtaaggcagtcggaagtatagcatacctcttcttcactaacaggcatgaggtgcgcaagatgaccctcgatcggtcggagtacacctctcttattcctaaccttcgtaatgtggtcgcgcttgataccgaagtcgcttcaaaccgtatttactggtcagacctttcgcaaagaatgatatgtagcacccagctggatagagcgcacggtgtgtcctcttacgacactgtgatttcccgagatattcaagcaccggatggacttgcagtcgactggattcactcaaacatctattggaccgactcggtccttggtactgtgtccgtggcggatacgaaaggagtgaaacggaaaactctgtttcgcgaaaacggttcaaagccaagagcgattgtggtggaccctgtgcatggattcatgtattggacggattggggtacccctgcaaagatcaagaaaggggggctgaacggcgtcgatatctactcgctggtcaccgagaatattcagtggccaaacggaattactcttgatttgctctcgggtagactgtactgggtggattcgaagctccattcgatttcgtcaatcgatgtcaacggtggcaaccgaaagacgatcctcgaagatgagaaaagactcgcacatccgttttccctcgcagtgtttgaagataaggtgttttggaccgatatcataaacgaagccattttctccgcaaaccggctgactggttccgatgttaaccttttggccgaaaatctgctctcgccagaggatatggttcttttccataacctgactcaaccgcgtggagtgaattggtgcgaacgaaccactcttagcaatgggggttgccagtacctctgtctcccagctccacagataaaccctcactcacctaagttcacttgtgcgtgccccgacggaatgctgctggctcgtgacatgcggagctgtttgactgaagcagaagcagctgtggcgactcaagaaacctcaaccgtaagactcaaggtgagctcgactgcggtgaggactcagcacacgaccaccaggccagtgcctgatacgtcccgcctgcctggagcaactcccggtttgaccaccgtcgagattgtgactatgagccatcaggcattgggtgatgtggcagggcggggtaatgagaagaaaccctcgtctgtgagggcactgtcgattgtgttgcctattgtactgcttgtgtttctctgccttggagttttcctgctttggaagaattggcgtctgaagaatatcaactcgatcaacttcgataacccggtctaccagaaaaccactgaggatgaagtgcacatctgccataaccaagacggttactcatacccttcccgccagatggtatctcttgaagatgatgtcgca

SEQ ID NO: 16385 - DNA, 2580 bp, synthetic construct
  misc_feature 1..2580: note = source = /note="Description of Artificial Sequence: Synthetic coding sequence"
  source 1..2580: mol_type = other DNA
atgggcccctggggttggaagctgcggtggaccgtggccctcttgctggctgcagccggaactgccgtcggcgaccgatgtgagcgtaacgagtttcaatgccaggatgggaagtgtatcagctacaagtgggtgtgcgatggaagcgccgagtgtcaggatggcagtgacgaatcccaggagacgtgtttaagcgtgacatgtaaatctggtgacttcagctgcggaggtcgagtcaaccggtgtattccgcaattttggaggtgcgacggtcaggtcgactgtgataacggatccgatgaacagggctgtccccccaaaacgtgctcacaggatgaatttaggtgccatgatggtaagtgcataagcaggcagtttgtgtgtgacagtgatagggattgcctggatggatcagacgaggcatcctgcccagtgctgacgtgtgggcctgcgtcctttcagtgtaactcctcaacctgtataccacaattgtgggcctgtgacaacgaccctgattgcgaggatggcagcgacgaatggccccagcgctgccgaggactttatgtgttccagggcgactccagcccctgtagtgctttcgagttccactgcttgtccggtgagtgtattcatagctcctggcgatgcgacgggggccccgattgtaaagataagagcgacgaagaaaactgtgctgtggctacctgccgtccagacgaatttcaatgttccgacggcaattgtatacacgggtcacgacagtgcgaccgtgaatacgactgtaaggacatgtcagatgaggtgggatgcgtgaacgtgacgctctgcgagggacctaacaaattcaagtgtcacagtggcgagtgtatcacactagacaaagtttgtaacatggctagagactgcagggactggagcgatgagcccattaaagaatgtggtactaacgagtgcctggataacaacggcggctgcagtcacgtgtgcaatgacttgaaaatcggcgcagaatgcttgtgtccagacggcttccaactagtcgcccagaggcgatgcgaagatatcgacgaatgccaagaccccgacacctgctcccaactttgcgtcaacctcgagggcggatacaagtgtcagtgtgaagagggctttcagctggacccccatacaaaagcttgtaaagcagtgggcagcatcgcttacctcttttttacaaacaggcatgaggtccgaaaaatgaccctggacagaagtgaatataccagcctgatacccaacctgcgaaatgtggtcgctcttgacactgaggtggctagtaaccgaatttactggtctgatctctcacagaggatgatatgcagtacacagttagatagagcacacggcgtctcttcgtacgatactgtaatcagccgggatatccaggcaccagacgggctcgcagtggactggatacactccaacatatattggaccgactcagttctcgggacagtaagcgtcgcggacaccaagggcgtaaagcgtaaaacattgtttagggaaaacggctctaaacccagggcaatcgtggttgatccagtccacggcttcatgtattggacagattggggcacaccggccaagatcaagaaggggggtctgaacggagtggatatctacagcctggtcaccgaaaacattcagtggccaaacggaattacattggatctcctctcaggtagactctactgggtcgattccaaacttcatagtatcagcagcatcgacgtcaacggtggtaaccgcaaaacgatactcgaggatgaaaagagattggcacatcctttttccctggccgtgttcgaggacaaggtgttctggaccgacatcataaacgaagccattttcagcgctaatagattgacgggttctgatgttaatctccttgcggagaatctcctgtccccagaggacatggtgctgtttcataaccttacacagccacgaggcgtcaactggtgcgaacgcaccaccctctctaacggcgggtgccagtacctgtgcctcccggcgccccagattaacccccattcaccaaagttcacatgtgcatgccccgacgggatgctgctggcccgagatatgaggtcctgtctcacagaagctgaggcagccgtcgctacacaagaaaccagcacggtaaggctcaaagtttccagcaccgccgttcgtacccagcatacaaccactcgcccggtgcccgatacaagcagactgccgggcgccactcccggcctgaccactgtcgaaatcgtgacaatgtctcatcaggccttgggtgacgtggctggccggggcaacgagaagaaaccatctagcgttcgagcactctccatcgtactaccaatagtgctgctcgtcttcctgtgcctgggagtttttctgctctggaaaaactggaggttaaagaacataaacagtattaattttgacaaccctgtctatcaaaaaacgacagaagacgaggtgcacatatgtcacaaccaggacggctattcttaccctagccgacagatggtctcccttgaagatgatgtggcg

SEQ ID NO: 16386 - DNA, 2580 bp, synthetic construct
  misc_feature 1..2580: note = source = /note="Description of Artificial Sequence: Synthetic coding sequence"
  source 1..2580: mol_type = other DNA
atgggtccttggggatggaagctgagatggactgtggctctgcttctcgctgctgcgggaacagctgtaggggaccggtgtgagaggaacgagttccagtgtcaggacggcaaatgtatctcttacaaatgggtttgcgatggctccgcagaatgccaggatggtagcgacgaaagtcaggagacctgtctgtctgttacctgtaagtccggcgacttcagctgtggcggtagagtcaaccgctgcatccctcagttctggcggtgcgatggtcaggttgactgcgacaacgggtctgacgagcaggggtgtcctcccaagacatgttctcaagacgagtttcgatgtcacgatgggaaatgtatttccagacagttcgtgtgtgactcagatcgtgattgtttggatggttccgacgaagcctcttgtcctgtgctcacttgtgggccggcctccttccagtgcaattcatctacttgcatcccacagctatgggcctgtgataatgacccagactgcgaagacggatctgatgaatggccccaaaggtgtagaggcctgtacgtatttcagggagatagctcaccctgtagtgccttcgagtttcactgcctctcaggcgaatgcatacattcctcgtggcgctgcgacgggggccccgattgtaaagataagtccgatgaggaaaattgtgcagtggcaacctgtcgaccagacgagtttcagtgctctgacgggaattgtattcacgggtcccggcaatgcgaccgggagtatgattgtaaggacatgagcgacgaagtgggttgcgtaaacgttacattgtgcgaaggtcctaacaaattcaagtgccatagtggcgaatgtatcaccctcgataaagtttgtaacatggctcgcgactgtcgagattggtctgacgaaccaataaaagagtgcggaaccaacgagtgtctggacaacaacggaggatgtagccacgtttgtaacgatcttaagataggggccgaatgcctgtgcccagacggctttcagcttgtggcacagcgccgctgcgaggatattgacgaatgccaggaccctgacacatgcagccagttgtgcgtgaacttggagggtggctacaagtgtcaatgtgaggaggggtttcaactcgaccctcacacgaaggcatgcaaagcggttggttccatcgcttacctcttcttcactaaccggcacgaagtccgtaaaatgactctagatcggagcgagtacacttccctgattcctaatttgcggaacgttgtggctttagataccgaagtagcctccaacaggatctattggagtgacctgagccagcgcatgatctgctccacccagctggacagagctcacggggtgtcttcatatgataccgtgataagtagagatatccaggcacctgatgggttggcagttgattggatccacagtaacatctattggacagacagcgttctggggaccgtaagtgtggccgataccaagggcgtgaagcgcaaaactttgtttcgggagaacggatcaaagccacgagcgattgtagtggacccagtacacgggtttatgtactggaccgattggggcacacctgctaaaatcaagaaaggtggcctgaatggcgtggacatttactctctggtgactgaaaatatccagtggcccaatgggatcacactggacctactatccggacgcctgtattgggtggactcgaagctgcatagcataagcagtatcgacgtgaacggcgggaacagaaaaacaatcttggaggatgaaaaacggctggcacaccctttttctttggcagtcttcgaggataaggtgttctggaccgacatcattaacgaggcaatcttttccgccaatcgcctgaccggctctgatgttaacctgctagcagagaatctcctgagtcctgaggacatggtactgttccataacctgactcaaccccgcggcgtgaattggtgtgagcgcactaccctttctaatggcggatgccagtatctgtgcctgcccgcgccacagatcaacccccacagcccaaaatttacgtgcgcttgccccgacggaatgctcctggctcgcgatatgcgcagctgtctgactgaggcagaagccgctgtggcaacacaagaaaccagtacggtcagactgaaagtttcttcgacagctgtccggactcagcatacaaccaccaggcccgtacccgacacctcacgtctccccggcgcaacacccggactgacaaccgtcgagattgtcactatgtcccaccaagcgctgggcgacgtcgcaggacggggcaacgaaaagaagccaagttcggtaagggccctgagtatagtcctacccatcgtgttattggtgttcctgtgtcttggtgtgttcctgctgtggaagaactggagactgaagaacattaacagcataaactttgataatccagtgtaccagaaaactactgaggacgaggtccatatctgccacaatcaggatggatacagctatccttctaggcagatggtttccctggaggatgatgtcgct

SEQ ID NO: 16387 - DNA, 2580 bp, synthetic construct
  misc_feature 1..2580: note = source = /note="Description of Artificial Sequence: Synthetic coding sequence"
  source 1..2580: mol_type = other DNA
atgggaccctggggatggaaactgcgctggaccgtggcactgctgctcgcagcagccggaacggcagtgggagataggtgtgagagaaacgagttccaatgtcaagacggtaaatgtatttcgtacaaatgggtgtgtgatggctccgccgagtgccaagatggatccgatgagtcgcaggagacttgtctctccgttacttgtaagtccggggatttcagctgtggcgggcgggtgaacaggtgtattccacaattttggagatgtgatgggcaagtggattgtgacaacgggtcggatgaacaggggtgtccaccaaaaacttgctcgcaagatgaatttcggtgccacgacggcaagtgtatcagccgccaatttgtgtgtgattcggatcgcgactgtctggacggatcggatgaagcatcctgtccagtgcttacctgtggccccgcctccttccagtgtaattcgtcgacctgtataccccaattgtgggcatgtgataacgacccagattgcgaagatggcagcgatgagtggcctcagcgctgtagggggctttacgtgtttcagggtgactcctcgccctgttccgcatttgagtttcattgtctctcgggagaatgtattcattcgtcgtggcgatgcgatggaggaccagactgcaaagacaaatcagatgaggagaattgtgcagtggcaacctgtagaccggatgagtttcaatgcagtgatggtaactgcattcatggatcccggcaatgcgatagagagtacgattgtaaggatatgagcgacgaggtgggatgcgttaacgtgaccctgtgtgaaggacccaataagtttaagtgccattccggcgaatgtataacccttgataaggtgtgtaacatggctcgtgattgccgggattggtcggacgaacctataaaggaatgcggcaccaacgaatgtctcgataacaacggaggttgttcgcatgtgtgcaacgatcttaagataggcgcagagtgtctttgtcctgatggttttcagcttgtggctcaaagaaggtgtgaagatatagatgaatgtcaagaccctgacacctgctctcaactgtgcgtgaatctggaaggtggatacaagtgtcagtgtgaagaaggattccagcttgaccctcatactaaggcctgtaaggcagtcggttctatcgcgtacctgtttttcacgaaccggcacgaagtgcggaagatgactcttgatcgtagcgagtacacctcccttattccaaatctgcgcaatgtggtcgcactggatactgaagtcgccagcaacagaatctactggtcggatctgtcccaacggatgatctgctcgacccaactggatcgtgcccatggagtcagctcctacgacaccgtgatctctcgcgacatccaggcaccagatggtctggcagtcgactggatacattccaacatttactggacggattcagtgctcggtactgtgtccgtggcggacaccaagggagtgaagagaaagactttgtttcgggagaatgggtctaagccaagagcaattgtggtggaccccgtgcatggtttcatgtactggactgattggggaactccagctaagatcaaaaagggaggtctgaacggagtggatatctacagccttgtgactgaaaacattcagtggcccaacggaattaccctggacctcctgtcgggacggctgtattgggtggattcaaagctgcacagcatttcaagcattgatgtgaacggaggaaatcggaaaaccattcttgaggacgaaaagcggctggcacatccttttagcctcgcagtgtttgaagataaggtcttttggaccgacatcattaacgaggcgattttctcagcaaataggctgactggaagcgatgttaacctgcttgcagaaaatctgcttagccccgaggacatggtgctctttcataaccttacccaaccaagaggagtgaattggtgcgagagaaccaccttgtcaaatggcggttgtcagtacttgtgcctcccggccccacagatcaacccccactcccctaagttcacgtgcgcgtgccccgatggcatgctcctcgcacgggacatgaggtcgtgtctcactgaagcagaagctgcagtagcgacccaagagactagcactgtcagacttaaagtgtcctcgaccgcagtgagaacccaacatactaccacccgtccagtccccgatacgagcagactccctggtgcaactcctggcctcactactgtcgaaatcgtgactatgtcgcatcaagcactcggtgacgtggccggacggggaaacgagaaaaagccaagctcagtgcgtgcgctttcaatcgtccttcctatcgtgctgcttgtgttcctttgcctcggagtgtttttgctgtggaaaaactggagacttaagaatatcaattccatcaactttgataaccctgtgtaccaaaagaccaccgaagatgaggtgcacatctgtcataaccaagacggctacagctacccctcgcgccaaatggtgtcattggaagatgatgtcgcc

SEQ ID NO: 16388 - DNA, 2580 bp, synthetic construct
  misc_feature 1..2580: note = source = /note="Description of Artificial Sequence: Synthetic coding sequence"
  source 1..2580: mol_type = other DNA
atggggccctggggatggaagctgcggtggaccgtggctcttctgctggcggccgcgggtactgctgtgggggaccggtgcgaacggaacgaattccagtgccaggacggtaaatgcatctcatacaagtgggtctgtgacggatctgcggagtgccaggatgggtcggacgaaagccaagagacttgcttgtcagtgacttgcaagagcggcgatttcagctgcggaggccgcgtcaacagatgtattccgcaattctggagatgcgatggacaggtggattgcgataacggttcggacgaacagggatgtccgcctaagacttgctcccaagacgaatttagatgtcatgatggaaagtgtatcagccgacagttcgtgtgtgattcggaccgtgactgcctcgacggaagcgacgaggcttcctgcccggtgctcacctgcggtccggcctccttccagtgcaattcctccacctgcatcccccagctgtgggcttgtgacaacgaccctgactgcgaagatggatcagacgaatggccgcagcggtgcagaggtctgtacgtctttcaaggcgactcgtccccttgctccgcattcgaattccactgcctgtcgggagagtgtatccactcctcgtggcggtgcgatggcggacccgattgtaaggacaagtctgacgaggagaactgcgccgtggcaacttgtcgcccagacgagttccagtgctccgacggaaactgcatccatggcagccggcaatgcgacagagaatacgattgcaaggacatgtccgacgaggtgggatgcgtgaatgtcaccctgtgtgagggacctaacaagtttaagtgccactcaggagaatgcatcactctggataaggtgtgcaatatggccagggactgccgggactggtccgacgaacctatcaaggagtgcgggaccaacgaatgcctggacaataacggtggatgctcccacgtgtgcaacgacttgaagatcggagctgaatgcctctgcccggatgggttccaacttgtggctcagcgccgatgcgaagatatcgacgaatgtcaggacccagacacctgctcccagctctgtgtgaacctcgagggtggatacaagtgccagtgcgaggagggcttccagctcgaccctcacaccaaggcctgcaaggcagtgggctcaatcgcatacctcttctttactaaccgccatgaagtcagaaaaatgactctcgatcgctcagaatacaccagcttgatcccgaacctgcgcaacgtggtggctctcgacacggaagtggccagcaaccggatttactggtcagacctgtcgcagcgcatgatctgctcgacccagctcgaccgggcgcatggagtgtcgtcatatgacaccgtcatctcgcgcgatattcaagcaccggacgggctcgcggtggattggatccattccaatatctactggactgacagcgtcctgggcaccgtgtccgtggccgacacgaaaggagtgaaacgcaagacgctctttagagaaaacgggtcaaagccacgggctatcgtggtggacccagtgcacggctttatgtattggaccgactggggaacgcccgcaaaaatcaagaagggtggactcaatggagtggacatctacagtcttgtgactgagaacatccagtggccgaacggcatcaccttggatcttctgtcagggcgcctctactgggtggactctaaacttcatagcatctcaagcatcgacgttaatggaggaaacagaaagactatcctggaggacgaaaagcggctggcacacccgttctccctcgcggtgttcgaagataaagtgttctggactgacatcattaatgaggctatcttttccgcgaatcgcttgactggatcagatgtgaacctccttgccgaaaacttgctgagcccggaggacatggtgctgttccacaacctcacccaaccgcggggagtgaattggtgcgagagaaccaccctgtcaaatggcggatgtcagtacctgtgtctgccagcgccgcagatcaatccgcattcgcccaagtttacctgtgcatgcccggacggaatgcttctcgcacgggatatgcggtcctgcctcactgaagcggaggccgccgtggccacccaagagacgtcaaccgtcagacttaaagtgtcatcaactgcagtccggacccagcataccacgaccagaccagtcccagatacctcgcgcctcccgggcgcaactccaggactgaccaccgttgagatcgtcactatgtcacaccaggccctgggagatgtggctggccgcggaaacgaaaagaagccatcgtcggtgcgagcactctccatcgttctgccgatcgtgctccttgttttcttgtgcctgggcgtctttctgctgtggaaaaactggcgccttaagaacatcaactcaattaacttcgacaatccagtgtaccagaaaactacggaagatgaagtccatatctgccataaccaggatggatactcgtacccatcccggcagatggtatcgctcgaggatgacgtggcc

SEQ ID NO: 16389 - DNA, 2580 bp, synthetic construct
  misc_feature 1..2580: note = source = /note="Description of Artificial Sequence: Synthetic coding sequence"
  source 1..2580: mol_type = other DNA
atgggcccttggggctggaaactgagatggaccgtggcactcctgctggcagcagccggaaccgccgtaggagatcggtgcgaaagaaatgaattccaatgtcaagacggtaagtgtatatcatacaagtgggtgtgtgatggctccgcagagtgtcaggatggatcggatgaatcacaggaaacctgtctgtccgtgacttgtaagtccggggacttttcgtgtgggggacgtgtgaacaggtgtattcctcagttctggcgctgcgacggtcaagtggactgtgataacggcagcgatgagcaaggatgtccccctaaaacgtgctctcaagatgaattcagatgccatgacggaaagtgtatctccagacagtttgtgtgtgacagcgaccgggattgtctggatggttcggatgaggcatcatgccctgtcctcacctgtggccctgctagtttccaatgtaattcgtcaacctgcatcccgcaactgtgggcatgtgataatgaccctgactgcgaagatggatcagatgaatggccccaaagatgtagaggactgtacgtgtttcagggagattcgtcgccgtgcagcgccttcgagttccattgtctgtctggtgaatgtattcattcctcgtggcgatgtgatgggggtccagattgtaaagacaagtcagatgaggagaattgcgcggtggccacttgtcggccagatgaatttcagtgttccgatggcaactgtattcatggatccagacaatgtgatagggaatacgattgtaaggatatgtctgacgaagtgggttgtgtgaacgttaccctgtgtgagggtcccaacaaattcaagtgccatagtggtgagtgcatcacccttgataaagtgtgtaacatggcaagagattgccgtgattggtcggacgaaccaatcaaggaatgtggtactaacgagtgtctcgataacaatgggggctgttcccatgtgtgcaatgacttgaaaatcggagcggaatgtctgtgccccgatggcttccagctcgtggctcagagacggtgtgaagatatagacgaatgccaagaccctgatacttgcagccagctgtgcgtgaaccttgagggtgggtacaagtgtcagtgtgaagaaggcttccaacttgatcctcacactaaggcgtgtaaggcagtgggatcgatcgcctacctgttctttacgaacagacacgaagtcagaaaaatgaccctggatagaagcgaatacacttccctcattcccaatctgcgcaacgtcgtcgcactcgacaccgaagtggcttcgaatcgcatttactggagcgacctgtcccaaagaatgatttgttcaacccaactggacagagcgcatggagtgagcagctatgataccgtgatctctagggatattcaagcacctgatggactggcagtggactggatacacagtaacatttactggactgactcggtgctgggcaccgtcagcgtggctgatactaaaggtgtgaagagaaagactctgtttcgagagaacggctcgaaaccacgagcaattgtcgtcgatccggtgcacggatttatgtactggaccgactgggggactccagcaaagatcaaaaagggtggtctgaatggtgtggacatctattctttggtgactgagaatatacagtggcctaacgggattaccctggatttgctctctggaaggctttactgggtggactctaagttgcactcgatttcgagcattgatgtcaacggcgggaaccgtaagacgattcttgaggacgaaaagcgccttgcacatccatttagccttgccgtctttgaagataaggtattctggactgacataatcaacgaggcaattttctccgcaaaccgcttgacgggatcagacgttaatctgcttgcagagaacctgctttcgcccgaggacatggtgctttttcataacttgactcagcctagaggagtgaactggtgtgaacgcaccacgctttctaatggagggtgtcagtacttgtgcctgcctgcacctcagatcaatccacactcacctaagtttacgtgtgcgtgtccagatggaatgcttctggctcgggacatgagatcgtgtctcaccgaggccgaagcagccgttgcaactcaggaaacctcaactgtgcggcttaaagtctccagcaccgctgtgcggactcagcacacgaccaccagaccagtgccagatacctccagactgcccggagctactcccgggctgactaccgtggagattgtgaccatgtcacatcaagcacttggcgacgtggcaggacgagggaatgaaaagaaaccgtcctcagtccgcgcacttagcatcgtgctcccaattgtgcttctggtctttctgtgtctcggtgtgtttctcctttggaaaaactggcgcctcaagaacataaactcgattaacttcgacaaccctgtgtaccaaaagaccacggaagatgaggtccatatttgccataatcaagatggctactcgtacccatcgagacaaatggtgtccttggaagatgacgtcgca

SEQ ID NO: 16390 - DNA, 2580 bp, synthetic construct
  misc_feature 1..2580: note = source = /note="Description of Artificial Sequence: Synthetic coding sequence"
  source 1..2580: mol_type = other DNA
atgggcccttgggggtggaaattgagatggacggtggctctattattagccgcagctgggaccgcagtgggtgatagatgcgagcggaatgaattccaatgtcaagatggaaaatgtatttcgtataaatgggtctgcgacggatctgcggaatgtcaggatgggtccgatgaatcgcaagaaacttgccttagtgtcacctgtaaaagtggtgacttttcctgtggcggccgggttaatcgctgcatcccgcagttttggcgatgtgatggacaagttgattgtgacaatggtagtgatgaacagggctgccctccgaaaacctgtagtcaggacgagtttagatgtcatgacggaaagtgcatttcgcggcagtttgtttgcgatagcgatcgggattgtcttgatggctcagatgaggcttcttgccctgtcttgacatgtgggccggcctcttttcaatgtaatagctctacgtgtattccgcagctctgggcctgtgataatgaccctgattgcgaagacggctctgatgagtggccacagagatgtagaggtctatatgtatttcaaggtgattcatctccatgcagtgcctttgagtttcactgtctcagcggagaatgtattcacagcagctggcgatgcgatgggggcccggactgtaaagataaatcagacgaagagaactgcgctgtcgctacatgtcgtccggatgaatttcaatgcagcgatggtaactgcattcatggttctagacaatgtgacagggaatatgattgcaaggatatgtccgacgaagtcggatgcgtaaatgtgacgctttgcgaaggccctaacaaatttaaatgtcactcaggcgaatgcatcacacttgacaaggtttgcaatatggcacgtgactgtcgtgactggtctgacgaaccaatcaaagaatgtggtacaaatgagtgtttggacaacaatggcggatgctctcatgtatgtaacgatcttaaaattggggccgaatgtctttgtccggacggatttcagcttgttgcacaaaggcgctgcgaggatattgatgaatgtcaggacccggatacttgcagccagttatgtgtcaatctagaaggcggatataaatgtcagtgcgaagaggggtttcaattagatccgcacacgaaggcttgcaaagcggtgggttcaattgcctatctgttcttcacgaataggcatgaagtgcggaaaatgacattagatagatcagaatatacaagtttgatcccgaatttgagaaacgtggtagctttagatactgaagtcgcatccaatcgtatttactggagcgacttgagccaaagaatgatctgtagtacgcaactagatcgtgcccatggagtgagcagctacgatacagtgattagcagggatattcaagcgccggacgggttagcggttgattggatccattctaacatttattggaccgatagtgtccttggaacagttagcgtggcggacaccaaaggggtcaaacggaaaacactgtttagagagaatggatcaaagcctagggcgatcgttgtggatccagtacacggttttatgtactggacggattggggaacgcccgcgaaaatcaagaaaggaggccttaatggagtcgatatctactctctcgtgacagagaatattcaatggccgaatggtatcacccttgaccttttgtccggaagactgtattgggtcgacagtaagctgcactcaatttcgagcattgatgtcaatggaggaaacagaaagacgatacttgaggacgaaaagcggttagctcatccttttagcctcgccgtgtttgaggacaaagtattctggacagatatcattaacgaagccattttcagcgcgaatcggctcactggctcggacgtaaacctgttagctgagaatttactgagtcctgaagatatggtcttgtttcacaacttaacgcagccgcgcggtgtcaactggtgtgagcgcacaacacttagtaacggaggatgccaatatctgtgtcttccagctccacagattaaccctcattctccaaaatttacgtgtgcttgtccggatggaatgttgctggcaagagatatgcgcagctgcttgactgaggctgaagcagccgttgcaacccaggaaactagtactgtgagacttaaagtatcttccacagccgtccggacacaacatacaacaactcgaccggtgccggatacaagcagactgccaggcgcaactccaggcttaacgacagttgaaattgtaacgatgtcacatcaggcgttgggggatgtggcgggacgtggcaatgagaaaaaaccaagctccgtacgcgcgcttagcattgtactcccaattgtccttttggtctttctgtgcctgggcgtgttcttactgtggaaaaactggcgcctgaagaacataaactcaattaattttgacaacccggtatatcagaaaacgacggaggacgaagtacatatttgccataatcaggatggttacagttatcccagcagacaaatggtaagtcttgaggacgatgtcgct

SEQ ID NO: 16391 - DNA, 2580 bp, synthetic construct
  misc_feature 1..2580: note = source = /note="Description of Artificial Sequence: Synthetic coding sequence"
  source 1..2580: mol_type = other DNA
atgggcccgtgggggtggaagctcagatggaccgttgcccttttgctggctgctgctggcacagctgtgggagacagatgtgagagaaacgaattccagtgtcaggacgggaaatgcatttcttataagtgggtgtgtgatgggtccgccgagtgccaggacggatcagatgagtcccaggaaacctgtctatctgtcacttgcaagagcggcgatttttcgtgtggcggaagggttaacagatgtatcccacagttttggagatgcgacgggcaggtcgactgcgacaatgggtcggacgagcagggctgtcctccgaagacttgttctcaggatgagtttaggtgccatgacggtaaatgcatttcccgccagttcgtgtgcgattcagatcgtgattgcctcgatggctcagacgaagccagctgccccgttctgacctgcggtccagcttccttccagtgcaattcatccacctgtatcccccagttgtgggcttgtgacaatgatcccgattgcgaggacggaagcgacgagtggccccagcgatgccgtggcctatatgtgtttcagggcgactcctctccctgtagtgcttttgagttccattgtctgtcaggggaatgtatccactcaagctggaggtgcgatggcggacctgattgcaaggacaagtctgacgaagaaaattgtgcggtagctacctgcaggcccgacgagtttcagtgctcagatgggaactgtatccatggatcccggcaatgcgatagggagtacgactgcaaggatatgagcgatgaggtgggctgcgtaaacgtgacattgtgcgaagggcccaataagtttaagtgccacagtggggagtgcatcacgcttgacaaagtgtgtaacatggcacgcgactgtcgcgactggagcgatgagcctataaaagaatgcggtacaaacgagtgcctggacaacaatggaggctgctcccatgtgtgtaacgatctgaaaatcggagcagagtgcctgtgccccgacgggtttcagctggtggcacagcgtcggtgtgaggacatagatgagtgccaggaccccgatacctgtagtcaactgtgtgtgaatctggaaggcggctacaagtgtcaatgcgaagaaggatttcagttggatccccacaccaaagcgtgtaaagcagttggctcaattgcctacctgttcttcacaaatcggcacgaggtccgtaagatgacactggatagatctgaatacacatctctgatccctaatctcagaaacgtggtggccctcgacaccgaggttgcaagcaaccgaatttattggagcgacctgtctcagcggatgatttgctcaacacagttggatcgcgctcatggcgtgtccagctacgacaccgtgatttcccgagacatccaggcccccgatggccttgccgtcgattggatccacagtaacatctactggaccgacagtgtgctgggcactgtgtccgtagctgacacaaaaggagtgaaacgcaagactctttttagagagaatgggtcgaagccgagagcaatcgtggttgaccctgtacacgggtttatgtattggactgactggggaacaccggctaagatcaaaaaggggggtttaaatggtgtcgacatatatagcctcgtcactgaaaatatccagtggcccaacgggattacacttgatctgttgagcggaagactctactgggtcgacagtaagctccactccattagttctatcgatgtaaacgggggcaatcggaaaacaatcctggaagacgaaaaacgtcttgcccatcctttctcattggctgtatttgaggacaaggtgttctggaccgatataatcaacgaggcgatcttcagcgcaaacaggctcaccggaagtgacgtgaacctcttagcagagaatctgttaagtcctgaggacatggtgctattccataatctaacacaaccccgcggtgtcaactggtgtgagcggaccacactgagtaacggcggctgccaatatctgtgcctgcccgcaccccagatcaatcctcattctcctaaattcacatgcgcttgtcctgacgggatgttgctcgcgagggacatgagatcgtgcttaacagaggcagaggccgccgtggctacccaggagaccagtactgtaagactgaaagtgtcttcgacggcggtgcgtacccaacataccacgacacggcctgtgccggatacaagcagacttcctggggcgacgccgggattaaccaccgtggaaatcgtgaccatgtcccaccaagcactaggtgacgtggctggcagaggaaatgagaagaagccatccagcgtacgggcgctaagtatcgtcctgcccatcgtgctcctagtattcctttgtctgggtgttttcttgctttggaaaaactggaggctcaagaacataaattctattaattttgacaatccagtatatcagaagaccaccgaggacgaggtgcacatctgccacaatcaagacggctactcctacccaagccgccagatggtgtcactcgaagatgacgtggct

SEQ ID NO: 16392 - DNA, 2580 bp, synthetic construct
  misc_feature 1..2580: note = source = /note="Description of Artificial Sequence: Synthetic coding sequence"
  source 1..2580: mol_type = other DNA
atgggcccctgggggtggaagctccggtggacagtcgctctccttctcgcggcagccggaacggcggttggagatcgatgtgagagaaatgaattccaatgccaggacggcaagtgtatttcgtacaaatgggtgtgtgatggctctgccgaatgccaagatggctctgacgagtcacaagagacctgtctctccgtcacatgcaagagcggcgacttctcctgcgggggaagagttaataggtgtatcccacaattctggcggtgcgacggccaggtcgattgcgataacgggtccgacgagcagggctgcccccccaaaacgtgcagccaggatgaattccggtgccacgatggcaagtgtatctctcgccagttcgtgtgtgatagtgatagggattgcctggacggctctgatgaagcatcctgtcctgttctgacatgcgggcctgcctcatttcagtgtaacagttcgacatgtataccccagctctgggcgtgcgataatgaccctgactgcgaggatggaagcgacgaatggccccagagatgtagaggactgtatgtcttccagggagactctagtccctgttctgcctttgaattccactgcctgtctggtgagtgtatccattcttcttggaggtgtgatggcggccccgactgcaaggataaatccgacgaagagaactgtgcggttgcgacgtgcagaccagacgagttccagtgcagcgacggaaactgcatccacggttcacggcaatgcgacagggagtacgattgtaaggatatgagcgacgaggttgggtgtgtgaatgtgactctgtgtgagggacccaataagtttaagtgccattccggagagtgtatcactcttgataaggtgtgtaacatggcccgcgattgcagagattggagcgatgagccaataaaggagtgtggtactgcagcatgtctggataataatggaggttgcagtcacgtgtgtaacgcattgaaaatcggcgcagaatgtctctgtcctgatggatttcaactggtcgcccagcggcggtgcgaggacatagacgagtgtcaagacccagacacatgctctcagctttgtgtgaatttggagggtgggtacaagtgccagtgcgaagaaggttttcagctggatccccacactaaagcctgcaaagctgtcggctccattgcctacctgtttttcactaaccggcacgaggtccggaagatgacgttggacagaagcgaatacaccagtttaatcccaaacttgcgtaatgtagttgcacttgacacagaggtcgcttccaaccggatatattggtcagacctgagtcagagaatgatctgttcaactcagttggaccgagcacatggtgtcagctcttacgacacagtcatctccagggacattcaggccccggatggcctagccgtggactggatccatagcaatatttattggacggactccgtcctggggaccgtgagtgtcgccgacaccaagggggttaagcggaaaacactgttccgcgagaacggctcaaaaccccgcgcaattgtcgtagaccctgtgcacggcttcatgtattggacagactggggcactccagctaaaattaagaagggaggcctgaacggagtggatatctactcgctcgtgaccgagaacatccagtggccgaatggcatcaccctggatttgttgtcaggccgcctctattgggttgatagcaaactgcatagtataagttccatagacgtgaatggcggaaataggaaaactatcctcgaagatgagaagaggcttgcccacccatttagtttggctgtgttcgaagacaaggtgttttggacggatataatcaacgaggcaatctttagcgccaaccggttgacaggttcagacgttaacttgttggccgaaaacctacttagtcccgaggacatggtactgtttcacaatctaactcagccacggggggttaactggtgcgagcgaacgaccttatcaaacggtggctgccagtatttgtgtctgcctgccccacagataaacccacactcaccaaaatttacctgtgcgtgtccagacggaatgcttctggctcgagatatgaggagttgtctcactgaagccgaagccgctgttgccacgcaggagacctcaactgtccggctcaaagtctcatcaacagcggtgcgcacacagcatacaacaacccggcctgtgcctgacaccagcagactccccggggcgacaccagggctcaccaccgttgagatagtgacaatgagtcatcaggctctgggcgacgtggcgggaagaggcaatgagaaaaagcctagctctgtgagagctctctctattgtcctgccgattgtgctactggtctttctctgtttgggtgtcttcctgttgtggaaaaactggcggctcaaaaatattaactctattaactttgacaacccagtctatcaaaagacaactgaggacgaggtgcacatctgtcacaaccaggacgggtactcctacccctctaggcaaatggtgtctttagaagatgacgtggct

SEQ ID NO: 16393 - DNA, 2580 bp, synthetic construct
  misc_feature 1..2580: note = source = /note="Description of Artificial Sequence: Synthetic coding sequence"
  source 1..2580: mol_type = other DNA
atggggccatggggctggaaacttcggtggaccgtggcactgctgcttgcagcagcaggaactgcagtgggcgatcgctgcgagcggaatgagtttcagtgccaggatggcaagtgcatttcatacaagtgggtctgtgacggctctgccgaatgccaggacggatccgatgagtcccaggaaacgtgccttagcgttacctgtaagagtggggatttctcctgcggagggcgcgtcaaccgatgcataccccaattctggaggtgtgatggtcaggttgattgtgataacggatcagacgagcagggctgtcccccaaagacttgttctcaagatgaattccgctgtcacgacggcaaatgtattagccgacagtttgtgtgcgacagcgaccgggattgcctcgatggaagtgatgaagcttcatgccccgtacttacctgcgggccagcctccttccaatgtaactctagcacttgcatcccacaactgtgggcctgcgacaacgatccagattgtgaggatggaagtgatgagtggccacagaggtgccgcggcctctatgtctttcagggggacagctctccctgctcagcgtttgagtttcactgtctgtctggtgagtgtattcattcctcctggaggtgcgatggcggccccgactgcaaagacaaaagcgatgaagaaaattgcgcagtcgccacttgccggcctgacgaattccaatgtagtgacggtaactgcatccacgggagccggcaatgtgatcgcgagtacgattgtaaggacatgtcagatgaggtgggatgcgttaatgtcacactgtgtgaaggcccaaacaagttcaaatgccattcaggtgagtgcattacgctggataaggtgtgcaacatggcccgcgactgtagagactggtcagacgaacccatcaaggaatgtggaacagccgcctgccttgataataatggaggatgctctcatgtgtgtaatgctctgaaaatcggagcagagtgtttgtgtcctgatggatttcagctggtggcccagagacggtgcgaggatatcgatgagtgtcaggatccggacacttgctcccagctctgcgtgaacttggagggcggctacaaatgccagtgcgaggaggggtttcagctggatcctcatactaaggcctgtaaggccgtggggtccattgcctacctgttcttcacaaatcggcacgaagtgcggaagatgacactggatcgctccgagtacacctcccttattccaaacctgaggaacgtggtggctctggatactgaggttgccagtaacagaatctactggagtgacctcagtcagaggatgatctgtagcactcaactcgatcgggcccatggcgtgtcatcatacgatactgtgatctctcgagatattcaggctcctgatggattggcggtggactggattcattctaacatttattggaccgattccgtactcggcactgtctccgtcgcagatacaaagggggtaaaacggaagacactgttccgcgaaaacggttccaagccccgagcaatcgtagtcgatcctgtacatgggttcatgtactggaccgactggggcactcccgcaaaaattaaaaaaggcggcctgaatggcgtggacatatacagcctggtcacagagaatattcagtggcccaacggcatcacactggatctgctgtctggccgactctactgggtcgacagtaagttgcactccatcagcagcatcgacgtgaacggtgggaatagaaagactatcctggaggacgaaaagagactggcccacccattcagtctggctgtcttcgaggacaaggtgttctggactgacatcatcaacgaagctattttcagcgctaacagattgactggatcagacgtaaatctgttggctgaaaatttgctctcacctgaggatatggtgctttttcacaacttgactcagccacgaggagttaactggtgcgagcgcactactctgagtaatgggggctgccagtacctttgtctccccgcacctcagattaacccccattcccccaaattcacatgtgcctgccccgacggcatgcttctggccagggatatgaggagctgtcttaccgaggcagaagccgcggtagccacccaggaaacctctacagtacgcctcaaggtctcatctaccgccgtgcggacccagcatacaacaaccaggcccgttcccgacaccagcaggctgccaggcgctacaccaggccttacaaccgtggagatagtcacaatgtctcatcaggccctgggggatgtggccggcaggggcaacgagaaaaagcccagcagcgttagggccttgtccattgtgctgcctattgtcctgctggtgttcctttgcctgggcgtatttttgctgtggaaaaattggcgactgaaaaacatcaactcaatcaatttcgataatcccgtgtaccagaaaacgaccgaagacgaggtgcacatttgccacaaccaagacggctatagctaccccagtagacagatggttagtcttgaagacgacgtagct

SEQ ID NO: 16394 - DNA, 2580 bp, synthetic construct
  misc_feature 1..2580: note = source = /note="Description of Artificial Sequence: Synthetic coding sequence"
  source 1..2580: mol_type = other DNA
atggggccatgggggtggaagctcaggtggactgtggccctcctgctagccgcggccggaacggccgttggagataggtgcgagcggaatgagtttcagtgccaggatggcaaatgcatctcctacaaatgggtctgcgatggctccgcggagtgtcaggatggctccgacgaatctcaagagacttgcctaagcgttacgtgtaagtctggagacttttcctgcggtggtcgcgtcaatcggtgtataccccagttctggcggtgcgacggtcaggttgattgcgataatggatccgacgagcaggggtgtccacctaaaacctgcagccaggacgaatttcgttgtcatgacggtaaatgtatctcccgacagttcgtgtgcgattcagatcgggattgccttgatggcagcgacgaagcttcctgcccagtcctgacctgtggaccggccagcttccagtgcaactctagtacttgcatccctcagctctgggcgtgcgataacgatcctgattgcgaggatggttcagatgaatggcctcaaaggtgtcgaggcctctatgtattccaaggtgacagttccccctgcagcgcctttgagtttcattgcctttctggagaatgtattcactcaagttggaggtgcgatgggggcccagactgtaaagacaaatccgacgaagagaattgcgcggtcgccacgtgtcgccctgacgagtttcagtgctctgatggcaactgcatccatggttcccggcagtgcgatcgcgagtatgactgcaaagatatgtccgacgaggtaggctgcgttaatgttactctatgtgaaggtcccaacaagtttaaatgtcattcgggtgaatgtatcactctggacaaggtttgtaatatggctagggactgcagagactggtctgacgagccaatcaaagaatgtggcacagcggcctgcctcgacaataatggtggctgtagccatgtctgcaacgctcttaaaattggcgctgagtgcctttgccccgatggctttcaactcgtggcacaaagacgctgcgaggatattgacgagtgccaggatcccgatacctgcagtcagctctgtgtgaatctggagggcggctacaagtgccagtgcgaggaggggtttcagctggatccacacacaaaagcctgcaaggcggtgggaagcattgcttatttgtttttcaccaacagacacgaagtcaggaagatgaccctggatcggagcgagtatacgtctctgatcccgaacctgaggaacgtggtcgcactggacaccgaggtggcttcaaaccggatttactggagcgatctgagccaacgcatgatatgctcgacccagcttgatagggcacacggagtctctagttacgatacggtcatcagtcgagacattcaggcccctgacggtctggccgttgattggatacattccaacatttactggactgacagcgtcctcgggactgtttcagttgctgatacaaaaggcgtgaagcgtaaaaccctttttcgcgagaacggatcaaagccccgcgccattgtggtagatcctgtgcacggattcatgtactggacagattggggtacccctgcaaagatcaaaaagggagggcttaacggagtcgatatctacagccttgtcacggaaaatattcagtggccaaatgggattaccctagacctgttgagtgggcgcctgtattgggtcgactctaaactccacagcatctcgtccatcgacgtcaatggcggaaatagaaagacaatactagaggatgaaaaacgactggcccatcccttttcgttagccgttttcgaggataaggtgttctggaccgacattatcaatgaggccatctttagcgccaatcggctcaccgggagcgatgttaatttactcgccgagaacctgctgtcacctgaggacatggttctcttccacaaccttacacagccccgcggggttaactggtgcgagcgaacaacactgtccaatggagggtgccaatacctttgtcttccagctccacagatcaatccacattctcctaaatttacatgtgcatgcccggatggcatgcttttggctcgcgacatgcgaagctgcctgacagaggcagaagccgccgtggccacacaagaaacctccaccgtgcgcctaaaggttagttccacagctgtacgcacacagcatacaacgactcgccccgtgccggatacatcccgcctgcctggcgctacacccggattgaccacagtcgaaatcgtcacaatgtctcaccaggcccttggagacgtagcgggccgcggcaacgaaaagaaaccgtcctcagtgcgagccctgtcaattgtgctgcccattgtactgcttgtcttcctgtgcctcggtgttttcttgctgtggaaaaactggcggttgaagaacattaattcaattaattttgacaatccagtttaccagaaaaccaccgaggacgaggtgcacatttgccataaccaggacggctactcctatccatctcgacagatggtcagcctggaagacgacgttgca

SEQ ID NO: 16395 - DNA, 2580 bp, synthetic construct
  misc_feature 1..2580: note = source = /note="Description of Artificial Sequence: Synthetic coding sequence"
  source 1..2580: mol_type = other DNA
atggggccgtggggatggaagctccggtggaccgtggccctgctgcttgccgctgcaggtacagccgtgggggaccgctgcgagagaaatgagttccagtgtcaggacggcaagtgcatttcttacaaatgggtgtgcgacggatcagccgagtgccaggacggctcagatgagtcccaggagacttgtctgtctgtaacttgtaagagtggcgactttagttgtggagggcgggtgaatcggtgcatcccgcaattctggagatgtgatggccaggtagattgcgataacggatcagacgagcaagggtgccctcccaagacttgctctcaggacgagtttcggtgtcatgacgggaagtgcatttcccgccagttcgtttgtgactctgatagggattgccttgacgggtcagacgaggctagctgtcccgtgctgacatgcgggcccgcttccttccagtgcaattcttcaacctgcattccccagttgtgggcctgcgacaatgatccagactgcgaagatgggtctgacgagtggccgcagagatgccgcggactctatgtatttcagggtgactcaagcccctgcagcgccttcgaattccactgcctgtctggagaatgtattcacagttcctggaggtgcgacgggggcccagactgtaaggataagagcgatgaggagaattgtgcagtcgcaacctgcaggcccgatgaattccagtgcagtgacgggaattgtattcatgggtccaggcagtgtgatcgggagtacgactgtaaagacatgtctgacgaagtcgggtgcgtgaacgtaaccttatgtgagggccccaataagttcaaatgccatagcggggagtgtatcaccctggataaggtgtgtaatatggcccgggattgtcgagattggtccgacgagcctattaaggagtgcgggaccgcagcttgtttagacaacaatgggggatgtagtcatgtgtgcaacgccctgaagatcggggcagagtgcttatgtcctgatggatttcagttggtggcacagaggcgttgtgaggatattgatgagtgccaggatcctgacacctgttcgcaactgtgtgtgaacctggaagggggctacaagtgccagtgtgaagagggctttcagctcgacccacacacaaaggcctgtaaggctgtcggctctattgcctacctgttcttcactaaccgccatgaagtgaggaagatgacccttgacaggtccgaatatacatcacttattccaaaccttcgaaatgtcgtggcccttgacaccgaagttgcatcaaatagaatttattggtccgacctcagtcaacgaatgatatgtagtacacaacttgatcgggcacacggcgtctcttcttacgatactgtgatttccagggatatccaagcacctgacggactagctgtggactggattcattccaatatatactggactgactcggtccttgggaccgtctccgtggccgacaccaaaggtgtcaagaggaaaacacttttcagagagaacggatccaagcctagagccattgtggtagaccccgtgcatggcttcatgtattggacagactggggtactcccgcaaaaatcaagaagggtggcttgaacggcgtggacatctacagcctcgtcacggaaaatatccagtggcctaacggcattactctcgacttgcttagtgggcgcctgtactgggtcgactccaaactccatagcatctctagcatagatgtgaacggcgggaatagaaaaactattctcgaggacgaaaaaaggctggctcatcctttcagtttggcggtgttcgaagacaaggtgttctggacagatattatcaacgaggctattttttccgccaaccgactcacaggttctgacgtcaatcttctggctgaaaatttgctatctccagaggacatggtactttttcacaatctgactcagcctagaggcgtgaattggtgcgagaggactaccctatcaaatggcggctgtcagtatttatgtctccccgcccctcagatcaatccccacagccccaagttcacctgcgcatgtcccgacgggatgctgctggcacgggacatgcgcagttgcctgaccgaggctgaggctgctgtagccacccaagagactagcacagtgcggctaaaagtgtcctcgaccgctgtgcggacgcagcacaccacaacgcgccccgtacctgacactagtagattgccaggagccaccccaggcctgacaaccgtcgagatcgttacaatgtcacatcaggccttgggagatgtcgcaggaaggggcaacgaaaaaaagccctcaagcgtgcgcgcgctctcaatcgtccttccaatcgtgctgctggtcttcctgtgcctaggcgtgttcttgctgtggaaaaattggcggctgaaaaacatcaattctatcaacttcgacaaccccgtataccagaagaccactgaagatgaagtgcatatatgccacaaccaggacggctattcatatccctcaaggcagatggtcagtctggaggacgatgttgcc

SEQ ID NO: 16396 - DNA, 2580 bp, synthetic construct
  misc_feature 1..2580: note = source = /note="Description of Artificial Sequence: Synthetic coding sequence"
  source 1..2580: mol_type = other DNA
atgggcccctggggatggaagctgcggtggaccgtcgcactgctactagccgccgctggaaccgccgtgggagacaggtgtgagagaaatgaattccagtgtcaggacggcaaatgcatcagttataagtgggtgtgcgatggctccgccgagtgccaggacggctcagacgagtctcaggaaacatgcttgtcggttacttgcaagtccggcgatttctcgtgtggaggccgagtgaacaggtgcataccccagttctggaggtgtgacggacaggtcgactgcgacaatggcagcgacgaacaggggtgcccaccaaagacttgctctcaggatgagttccggtgtcacgacggcaagtgcatttcccggcaattcgtgtgcgatagcgaccgggactgtttagacggctccgacgaggcttcctgtccagttcttacatgcgggccagccagctttcagtgcaatagctcaacctgtattccccaactgtgggcatgtgataacgatccggattgtgaagacggcagcgatgagtggccccaaaggtgtcggggcctttatgttttccagggggacagttcaccttgcagcgcgtttgagttccactgcttgtcaggagaatgtattcacagcagctggcgctgcgatggaggccctgattgcaaagataaatcggacgaagaaaattgtgcagttgctacgtgtagaccggacgaattccaatgctccgacgggaattgcattcatggcagtagacagtgtgatagggagtacgactgcaaggacatgtccgatgaggttggctgcgttaatgttacactgtgcgaaggtccaaataaattcaagtgtcactcgggggaatgcatcaccttggacaaggtgtgtaacatggccagggactgtcgggactggagtgacgagccgattaaggagtgcgggacagctgcgtgcttggataataatgggggatgctcccatgtctgcaacgctctaaagatcggcgctgagtgcctatgccctgacgggtttcagctagttgcacaaaggcggtgtgaggacatcgatgagtgccaagatcccgatacatgctcccaattatgcgtgaacctggagggaggatacaagtgtcaatgtgaggaaggatttcagctcgacccccatacaaaggcctgtaaggccgtcggcagtatcgcatatttattttttacaaacagacacgaagtgagaaagatgaccttggatagatctgagtacaccagcctgattcctaacctgaggaatgttgtcgcccttgacaccgaagtggcctccaaccgaatctactggagcgacttgagtcagcgtatgatttgtagcacacagctggaccgggcacatggcgtgtcgtcatatgacaccgttatttcacgtgacatccaggcacccgacggcctcgctgtggactggatccactctaacatttactggacggatagcgttcttggtacggtgagcgtagccgacaccaagggcgtgaagcggaaaacattgtttagggagaatggcagtaaaccaagggctattgtggtggacccagtccacggtttcatgtactggaccgattgggggactcctgccaagatcaaaaagggcgggctcaacggcgtggacatctactctttagtgactgaaaacatccagtggccgaatgggatcacactggacctcctctcagggcgcctgtactgggttgatagcaagctgcactctatcagttccatcgatgtaaacggcggtaataggaaaaccatccttgaagatgagaagcgcctggcacatcccttttctctggccgtgtttgaagataaggtattctggacagacatcatcaacgaagccattttttcagctaaccgattgactggaagcgacgtcaatcttttggccgagaatcttctgagccctgaggacatggtgctgtttcacaacctgactcagccccgcggagttaattggtgcgagagaacaacactgagtaacgggggttgtcagtatctctgtctgcccgccccacagataaatccgcactcacccaaatttacctgtgcctgccccgatggcatgttactggctagggacatgagatcttgtctgaccgaggctgaagctgccgtggctacacaagaaacgtcgacggtacgcctgaaggtgagttcaactgccgtccgcacccagcacacgacaacgcggcctgtccccgacacctcccgcctccctggagcaacccccggattgactacggtagaaattgtgaccatgtctcaccaggcactaggagacgtggccggaaggggaaacgaaaagaagccgtcttccgtgcgcgcgctatctatcgtcctgccaatcgtcttgctagtatttttgtgccttggagtattcttactctggaagaattggagactcaaaaacatcaactccataaactttgataatcccgtgtatcaaaaaaccactgaggatgaagtgcacatttgccataatcaggatggatactcctatccctcgcgccagatggtcagcctggaggacgatgtggct

SEQ ID NO: 16397 - DNA, 2580 bp, synthetic construct
  misc_feature 1..2580: note = source = /note="Description of Artificial Sequence: Synthetic coding sequence"
  source 1..2580: mol_type = other DNA
atgggtccctggggatggaaactgcgctggaccgtcgccctcctcctggccgctgctggcactgccgtcggggatcgctgcgaacggaacgagttccaatgccaagacggtaagtgtataagctataaatgggtgtgcgatggttccgcagaatgccaagacggatctgacgagtcgcaagaaacttgtttgtccgtgacatgtaagtcaggagattttagttgtggtgggagagtgaaccgatgtataccacaattctggaggtgcgatggccaggtcgattgcgataacggatcggatgagcaaggttgccctcccaaaacttgcagccaggacgagtttcggtgtcatgatgggaagtgcattagccgtcagtttgtgtgtgactccgaccgtgattgtctggatgggagcgacgaagcttcctgccctgtgttgacttgtggaccagcaagttttcagtgtaacagctccacctgcattccacagctgtgggcctgcgataatgatcctgattgtgaagacgggtctgatgagtggccacagagatgccgggggctctacgtatttcagggcgattccagcccgtgctcagcatttgagttccactgcttgagtggcgagtgtatccactcatcctggaggtgcgacggtggccccgactgcaaggacaaatcagacgaagagaactgcgcagtagccacgtgtcggcctgatgaattccagtgtagcgatggaaattgcattcacggtagtagacaatgcgatcgtgagtacgactgtaaggatatgtctgacgaggtgggatgtgtcaatgtgaccctgtgcgagggcccgaataagtttaaatgtcactccggcgaatgcatcactctcgacaaggtgtgtaacatggcccgcgattgccgagattggtccgacgaaccaatcaaagagtgtgggacagccgcctgtctcgacaataacggtggctgtagccacgtgtgcaatgccctgaaaataggcgccgagtgtctttgccctgacgggttccagctggtagcacagcgaaggtgcgaggatatcgatgagtgccaggatcccgatacctgtagccagctctgtgtcaatttggaaggcggatataaatgccaatgcgaagagggttttcagctggatccgcatacgaaggcgtgtaaggcggttggatccattgcctaccttttctttaccaatcgtcatgaggtgcgcaaaatgacacttgatagatcggagtacacatcattaattcccaaccttcgaaatgttgtggcacttgacactgaggtggcttcgaaccgcatttactggtccgatctgtctcagcggatgatttgttcaactcagcttgatagagctcacggggtttcatcttacgacactgtgatttcaagagatatccaggcccccgacggcctggccgtggattggatacacagcaatatctactggaccgactccgtccttggaaccgtctcagtcgccgacaccaagggtgtgaaacggaaaaccctgttcagggagaatggcagtaagcctcgggccatcgtagttgatccagtacatggctttatgtattggaccgactggggcacacctgcaaagattaagaaaggcgggctgaacggggtcgacatctattcgctggtgacagagaatatccagtggcccaatggcattactttggacttgttgagcgggcggctgtactgggtggacagcaagctgcatagcataagtagcattgatgtgaatggggggaaccgcaaaacaatcctcgaagatgaaaaacgtctagcacaccccttcagtttggcagtattcgaggacaaagtgttttggacggatattatcaacgaggccatcttttccgcgaatcggctgaccggcagtgacgtgaatttgctagccgagaacctgctgagtcctgaggacatggttttgttccataacttaacccagccaagaggcgtcaattggtgcgagagaacaactttatcgaacggaggatgccaatacctgtgcttacccgcaccccagattaacccccattccccgaaatttacctgcgcctgtcctgatggcatgctactcgctcgagacatgaggtcttgtcttactgaggctgaggccgccgtcgccactcaggaaacctcaacagtgaggctcaaagttagcagtaccgcagtaaggacacagcacaccacgactcgcccagtgccagacacttcacgtctgccaggcgccaccccggggctgaccaccgttgagattgtgactatgtctcaccaagcattaggtgacgtcgccggaagagggaacgaaaagaagccatccagtgttagggcacttagcattgtcttaccgatagtgctgttagtgttcctttgccttggggtcttcttactgtggaagaactggagactgaagaacatcaatagcatcaactttgacaacccagtgtatcagaagactactgaagatgaagtccacatctgtcacaaccaggatggttactcatacccctctcgacaaatggtgtcactggaagatgacgtcgca

SEQ ID NO: 16398 - DNA, 2580 bp, synthetic construct
  misc_feature 1..2580: note = source = /note="Description of Artificial Sequence: Synthetic coding sequence"
  source 1..2580: mol_type = other DNA
atgggaccgtggggatggaaactgaggtggactgtggccctcctcctggcggcagctggcacggccgtgggcgatagatgtgagcggaatgagttccaatgtcaggacggtaagtgcatctcctacaagtgggtctgtgacggatcggcagaatgccaagacggatcagatgagagccaagagacttgcctgagcgtgacttgcaaatcgggagatttctcctgtggaggacgcgtgaaccggtgcatccctcagttctggcgctgcgacggccaggtggattgtgacaatggatcggacgagcagggctgcccgccaaagacctgctctcaggatgaatttaggtgccacgacggaaagtgtatctcgcgccagttcgtgtgcgacagcgacagagactgcttggatggctccgatgaggcgtcgtgcccagtgctgacttgcggaccggcatcattccaatgcaatagctcgacttgcatcccacaactctgggcgtgcgacaacgatcccgactgtgaagatggatctgatgaatggcctcagaggtgccgcggactctatgtctttcagggcgactcgtccccatgctcagccttcgaattccactgcctcagcggagaatgtattcattccagctggcgttgcgacggaggcccggattgcaaggacaagtcggacgaggaaaactgcgccgtggccacttgccggcctgacgagttccagtgcagcgacggaaactgtatccacggcagcaggcagtgcgaccgggagtacgattgcaaagacatgtccgatgaagtgggttgtgtgaacgtcaccctctgtgaaggaccgaacaagttcaagtgccactcaggagaatgcattactctcgataaggtgtgcaatatggcccgagactgccgcgattggtcggatgaacccatcaaagaatgtggaactgccgcctgcctggacaacaatggagggtgctcgcacgtctgcaacgccctgaaaattggagctgagtgcctgtgcccggacgggttccagcttgttgcccagagacgttgcgaggacattgatgagtgtcaggaccccgatacttgcagccagctctgcgtcaatttggagggaggctacaagtgtcaatgcgaggagggattccagctggacccacataccaaggcctgcaaggctgtgggatccatcgcgtatttgtttttcacgaatcgccacgaggtgcgcaaaatgacgcttgatcggtcggagtacacttctctgatacctaatcttagaaatgtggtggccctcgacacggaagtggctagcaaccggatctattggtccgacctcagccagaggatgatctgttcgacccagttggaccgggcccacggcgtgagcagctatgataccgtgatctccagagatatccaggccccagacggactcgcggtggactggatccattccaacatctactggaccgattccgtgcttggtaccgtctcggtcgcagatactaagggagtgaagaggaaaaccctgttccgcgaaaatggatccaaaccgcgggctatcgtggtggaccccgtccatggattcatgtactggaccgactggggaaccccggcaaagatcaagaagggaggacttaacggcgtcgacatctactcactcgtgaccgagaacatccagtggcctaacggaatcaccctggatctgctcagcggtcggctgtactgggtggatagcaaattgcattcgatctcctcaatcgacgtcaacggcgggaaccgcaaaaccatcctggaggacgaaaagcgccttgcccacccgttttcacttgccgtgtttgaagataaggtgttctggaccgatatcattaacgaagccatcttctcagctaatcggttgactggatcggacgtgaacctgctggccgaaaatctcctgagcccggaggatatggtgctgttccacaacctgacccaaccgcggggagtgaattggtgcgagcgcaccacgctctcgaatggaggctgtcagtacctgtgcttgcctgctcctcagatcaatccgcactcgccaaagttcacgtgtgcctgcccggacggaatgctgctcgccagagacatgcgctcctgcctgaccgaggccgaagcggcggtggcaacccaggagacgtctaccgtgcgcctgaaagtctcgtcaaccgcagtccggactcagcataccaccaccagaccggtgccggatacttcacgcctgccgggagccaccccgggactcactactgtggagatcgtgactatgagccaccaagctctgggagacgtcgctggacggggtaacgaaaagaagccgtcatcagtgcgcgcgctgagcatcgtgctgccgatcgtgctcctggtctttctgtgcctgggagtgttcctgctctggaaaaactggaggcttaagaacatcaactcgatcaatttcgacaacccggtctaccaaaagactaccgaggatgaggtccacatctgccataatcaagacggttacagctacccctcacggcagatggtgagcctggaagatgatgtggca

SEQ ID NO: 16399 - DNA, 2580 bp, synthetic construct
  misc_feature 1..2580: note = source = /note="Description of Artificial Sequence: Synthetic coding sequence"
  source 1..2580: mol_type = other DNA
atggggccatgggggtggaagttgcggtggactgtggctctgctgctggcggcggcgggcactgcagtcggagacagatgcgaacggaacgaattccagtgccaagacgggaaatgcatcagctacaagtgggtgtgcgatggaagcgcggagtgccaggatggaagcgacgaatcccaagagacttgcctctcagtgacctgtaagtctggtgactttagctgtggcggtagggtcaacagatgcattccacaattctggaggtgcgatggtcaagtcgattgcgacaacgggtcagacgaacaggggtgtccgccaaagacttgctctcaggatgagtttagatgccacgacggcaagtgcatttcaagacaattcgtgtgtgactccgaccgcgactgcctggacggctccgatgaggcttcgtgcccggtgctgacctgcggccccgcgtcgtttcaatgcaacagttcgacctgtattccccagctctgggcatgcgataacgacccggactgcgaagatggtagcgacgaatggccccagcggtgccgcggcctctacgttttccaaggagattcctccccttgctcggcctttgagttccattgcctctcgggggaatgcatacatagctcgtggcgctgcgatggaggacctgactgcaaggataaatcagatgaggagaactgcgccgtggctacctgccgaccagacgagttccagtgctccgacggaaactgtatccacggcagccgccagtgcgatcgcgaatacgattgcaaggacatgtcagatgaagtggggtgcgtgaacgtcactctgtgcgagggacccaataagttcaaatgccattcgggcgagtgtatcacccttgataaggtgtgcaacatggcacgggactgccgcgactggtcagacgagcctatcaaagagtgcggcaccgcagcctgcctggacaacaatggaggttgctcccatgtttgcaatgctctcaaaatcggcgccgaatgtctgtgcccggacggatttcagctggtggcccagagacgctgcgaagatatcgacgaatgccaggatcctgacacctgcagccagctgtgtgttaatctcgagggaggatacaagtgccagtgcgaggagggatttcagctcgacccacacaccaaggcctgtaaggcagtgggaagcatcgcttacttgttcttcactaaccggcatgaagtgaggaagatgaccttggaccgcagcgaatatacttccctgattccaaacttgcggaacgtggtcgcgctggacaccgaagtcgcttccaaccgcatctactggtcagacctgagccaacgcatgatctgctccacccagctggaccgcgcccacggggtgtccagctacgatactgtcatctcccgggatattcaggcaccggacgggctcgcggtggattggattcattccaacatctattggacggacagcgtcctcggcaccgtgtcagtggccgacaccaagggagtgaagagaaaaaccttgtttagagaaaacggttcgaagccgcgggcgatcgtcgtggaccccgtgcatggattcatgtactggaccgactggggcaccccggccaaaatcaaaaaaggcggcctgaatggagtggatatctactcactggtcaccgagaatatccagtggccaaacggaatcactctggaccttttgtcagggaggctctactgggtggattccaagctccactcgatttcctcgatcgacgtaaacggaggaaaccgaaaaactatcctggaagatgagaagcgcctcgcgcacccgttctcgctggccgtctttgaggataaagtgttctggacggacatcatcaacgaagcgatcttcagcgcgaatcgcctgactggttcagacgtcaacctcctggccgagaatctcttgtcgccagaggacatggtgttgttccacaatttgactcagccgcgaggagtgaattggtgcgagcgtaccaccctctcgaatggaggatgccaatacctgtgcctgccagctccacaaatcaacccgcactccccgaaattcacttgcgcctgccctgatggtatgctgttggcccgcgacatgagatcgtgccttaccgaagccgaggcggcagtggcgacccaggagacttccacggtcagactgaaggtgtcctcgactgccgttaggactcaacataccactactcggccagtgccggacaccagccgtctccccggagcgaccccgggcctcacgactgtcgagatcgtgactatgtcgcaccaggcgctcggcgacgtggcgggacggggaaacgagaagaaaccaagctccgtgcgagcgcttagcattgtcctgccgatcgtccttctcgtgttcctctgcctcggagtgtttctcttgtggaagaattggcggcttaagaacattaactctatcaacttcgacaatccagtgtatcaaaagaccactgaggatgaggtccacatctgtcacaatcaggatggatacagctacccgagccgccagatggtgtcgttggaggatgacgtagcg

SEQ ID NO: 16400 - DNA, 2580 bp, synthetic construct
  misc_feature 1..2580: note = source = /note="Description of Artificial Sequence: Synthetic coding sequence"
  source 1..2580: mol_type = other DNA
atgggcccctgggggtggaaacttcgctggacggtggcactgctccttgcggccgcggggaccgcagtgggcgatagatgcgaacgtaatgagtttcaatgtcaagacggaaaatgtatatcgtacaagtgggtgtgtgatgggtcagcggagtgccaagacggatcagatgaatcgcaagaaacctgtctgtcggtgacctgcaaatccggagacttctcctgtggtggtcgcgtgaatcggtgtattccacagttctggcgttgtgatggccaagtcgattgtgacaacggctccgacgagcaagggtgtcctcctaagacttgttcgcaagacgaattccggtgtcacgatggaaagtgcatctcacgacagtttgtctgtgattccgaccgcgattgtcttgacggttcggacgaagcctcgtgtcctgtgcttacgtgtgggccagccagcttccaatgtaattcctcgacgtgtatacctcaactttgggcgtgtgataatgatcctgattgtgaagatgggtcggacgagtggccccaaagatgccgtggtctgtacgtgtttcaaggcgattcatcaccatgttcagccttcgagtttcattgtctgtctggcgaatgtattcattcgtcctggagatgtgatggcggacctgattgcaaggataagtccgatgaggagaattgcgctgtggcaacttgcaggcctgatgagttccaatgttcggatggaaactgtatccatggaagcagacagtgtgatcgggaatacgactgtaaggatatgtcggatgaggtcggctgtgtgaacgtgaccttgtgtgagggtccgaacaagtttaagtgtcacagcggtgagtgtattaccctggataaagtctgtaacatggcccgtgattgccgagactggtccgatgaaccgattaaggagtgtgggactgcagcgtgcctggacaataacgggggatgtagccacgtctgcaacgcgctgaagatcggcgcggaatgtctctgtcccgacggttttcaacttgtggcacaaagacggtgtgaagatattgatgaatgccaggatcctgatacctgttcccaactgtgcgtgaacttggaaggtggttacaagtgtcaatgcgaagaaggcttccaactggacccgcataccaaggcatgtaaggcggtgggttcaatcgcatatctcttctttaccaatagacacgaggtccgcaagatgactctcgatcgctcagaatacacctcgctgatacctaatctgcgcaacgtggtggcactggataccgaagtggcaagcaatcgaatttactggagcgacttgagccagcgaatgatatgctcaacccagctggaccgggctcatggggtcagctcgtacgataccgtgatttccagggatattcaagcacctgacggtctggcagtggattggatccatagcaacatatactggactgacagcgttctcgggaccgtgtcagtggcggatactaagggtgtgaaacgaaagactctgtttagagaaaacggatcgaagccaagagccattgtcgtggatccagtgcatggatttatgtactggacggattggggcaccccggcaaaaatcaagaaggggggacttaatggggtggatatctactcgcttgtcactgagaatatccaatggcctaacggaataactctcgatcttctgagcggtcggctctactgggtcgactcgaaacttcattcaatttcatcgattgatgtgaatgggggaaaccgaaaaactattttggaagatgaaaagaggctggcacatcctttttcgctcgctgtgttcgaagataaagtgttttggactgacattatcaatgaagcgattttctctgcaaatcgacttaccggttcggatgtgaatcttcttgccgaaaacctgctttccccagaagatatggtgctctttcataaccttactcaacctaggggcgtcaattggtgcgaaagaaccacccttagcaacggtggatgtcaatacctctgccttccagctcctcagattaacccacactcacccaagtttacttgtgcctgtcccgatggaatgctccttgcccgcgacatgagatcctgcctgaccgaagcggaagccgcagtggctacccaagaaacttcaaccgtccgactgaaagtctcctctaccgcagtccgcacgcaacatactaccaccagaccagttccagataccagccgtctgccgggagcaacccctggtctgaccactgtcgaaattgtgaccatgagccatcaagctcttggtgacgtcgcaggaagaggtaacgagaagaaaccgtcctcagtgcgggcgctgtcaattgtgctgccaatagtgctcctcgtgtttctgtgtctgggagtctttctgctttggaaaaactggcggcttaagaacattaactcaattaactttgataacccagtctaccaaaagaccactgaagatgaagtccacatctgtcataaccaagacggctactcctatccctcgcgacagatggtgagcctggaggatgacgtggct

SEQ ID NO: 16401 - DNA, 2580 bp, synthetic construct
  misc_feature 1..2580: note = source = /note="Description of Artificial Sequence: Synthetic coding sequence"
  source 1..2580: mol_type = other DNA
atgggcccatggggatggaaactcaggtggacagtcgccttgctgctggctgccgctggtactgctgtgggcgaccgttgtgagaggaatgagttccaatgccaggatggcaaatgcatctcttataaatgggtatgtgacggctcagcagaatgtcaggacggctcggacgaaagtcaggagacttgtctttcagtcacgtgtaaaagtggtgatttctcatgtggaggtcgcgtgaatcggtgcatcccccagttttggcgctgtgatggccaggttgattgcgacaacggatctgatgaacagggttgtcctccgaagacatgcagtcaggacgagtttcgctgccacgatggcaaatgcatttccagacagttcgtttgcgactcagatcgagattgtttagacgggagtgatgaggcctcatgcccggtgctcacttgcgggccagcaagctttcagtgtaactcctccacctgcatccctcagttgtgggcctgcgacaatgacccagactgcgaggatgggtctgatgagtggccccagagatgccgggggctgtacgtgttccaaggagattctagtccgtgttcagcatttgagtttcattgtctctccggcgagtgcatccattcttcctggcgctgtgatggaggcccagattgcaaggacaagtctgatgaggagaattgcgcagtcgccacctgcaggcctgacgagttccagtgcagtgacggaaattgtatccacggctctaggcagtgtgatcgcgagtacgactgcaaagacatgagtgatgaagtaggctgcgtgaacgtgaccttgtgcgaagggcccaacaagtttaagtgtcattcgggggagtgcattactttagataaggtgtgcaatatggctcgggactgccgcgattggagcgatgaacccatcaaagaatgtggcacagcagcctgtctagacaataacggaggatgttcccacgtctgtaacgcactcaagattggggctgagtgtctgtgccccgacggattccaattggttgctcaacggcggtgcgaggatattgacgagtgccaggatccagacacgtgttcgcagttgtgtgttaatcttgaaggaggttataagtgccagtgtgaggagggcttccagctcgacccccacaccaaggcgtgcaaggccgttgggtctattgcatacttgttttttactaatcggcatgaagtgaggaagatgactctggatcggagcgagtacacatctctaatacccaacctgcggaacgtggtggccctcgataccgaagtagcatccaatagaatatactggagtgatttaagccagcgcatgatctgctccactcaacttgatagggctcatggggtctcgtcctatgacactgtgatcagtagggatatccaagcccccgacgggcttgccgtggactggattcattcaaacatttattggaccgactcggtgctggggactgttagcgtggcagacaccaagggcgtaaaacgcaaaacactgtttagagaaaacggtagtaaacctagggccatcgtagtcgatccagtgcacggcttcatgtattggaccgactggggcacccccgctaaaattaagaaaggggggttgaatggcgtggacatctattcgctggtgactgaaaacatacagtggcctaatggaattactctggatctgctcagcggaaggctgtattgggtggatagtaagctgcattctatttcgagcattgacgtaaacgggggaaatagaaagacaattctagaggatgagaagagactggcccatccattttctttagccgtttttgaagacaaagtgttttggacagatattatcaacgaggccatttttagcgcgaaccgactcaccggaagtgacgtgaacctgcttgctgagaacttgttaagtccagaggatatggtgctgttccataacttgacacagccacggggtgtcaattggtgcgagcgaaccacattgagtaacggagggtgccagtatttgtgtctccccgctccccagataaacccccattcaccaaagttcacatgtgcctgcccagacggaatgctactggcacgggacatgcgttcatgcctgactgaggctgaggccgcggtggccacccaggagacatccaccgttcgcttaaaagtgagttctactgcagtgcggactcaacatacaacgactcgacccgtgcctgacacttcccgtcttcctggggctacaccaggactcaccactgttgaaatcgtaacaatgagtcatcaggccctgggggatgtggctggccgggggaacgaaaaaaaaccttccagcgtgcgcgccttatctatcgtgctccctatcgtgttgctggtgtttttgtgcctgggtgtgttccttctctggaaaaattggcgcctgaagaacattaactctatcaattttgataaccctgtctatcagaaaactacagaagatgaagtgcacatctgtcacaatcaggatggctatagttatcctagccgccagatggtgtccctggaagatgacgtagcc

SEQ ID NO: 16402 - DNA, 2580 bp, synthetic construct
  misc_feature 1..2580: note = source = /note="Description of Artificial Sequence: Synthetic coding sequence"
  source 1..2580: mol_type = other DNA
atggggccatgggggtggaagctccgctggaccgtcgcattgctgctggccgccgccggtaccgccgtgggagatcgctgcgaaagaaacgaatttcaatgtcaagacggaaaatgcatatcctacaaatgggtgtgtgacggatcggctgaatgtcaggatggatcggacgagtcgcaagaaacctgtctgagcgtcacctgtaagtcgggagatttcagctgcggaggaagagtgaaccgctgcattccgcaattttggcgctgtgacgggcaagtggactgcgacaacggttccgacgaacagggatgcccaccaaagacttgttcacaagatgaattcaggtgtcatgacggaaagtgcatttctcgccagttcgtctgcgattcggaccgcgattgcctcgatggatctgacgaggcctcctgcccagtgctgacctgcggccctgctagcttccaatgcaactcctcgacttgcatcccgcagctgtgggcttgcgataatgatcctgactgcgaggacgggtcagatgagtggccgcaaaggtgtcggggactctacgtgtttcagggagattcttcgccgtgctcagcgttcgaattccactgcctgtcgggggaatgcatccacagctcttggagatgcgacggggggcctgattgcaaagacaaatctgatgaggagaactgcgcagtggcaacttgccgccctgacgagttccaatgttcggatggaaactgcatccacggcagccggcagtgtgacagagaatacgactgcaaagacatgtccgatgaggtgggatgtgtgaatgtgaccctgtgcgaggggccgaacaagttcaaatgtcacagcggcgaatgcatcaccctggacaaggtctgtaatatggccagagattgccgcgattggtcggacgaacctatcaaggagtgcggcaccgcggcctgccttgataacaatggaggctgttcgcacgtgtgcaacgcactgaaaatcggagctgaatgcctctgcccggacggattccagctcgtggcgcagagacgctgcgaagatatcgacgagtgtcaagacccagatacttgctcccagctctgcgtgaacctggaggggggatacaagtgtcagtgcgaagaaggtttccaacttgacccccataccaaggcgtgtaaggcggtgggttcgattgcatacctgtttttcactaatagacacgaagtgaggaagatgaccctggatcgcagcgaatacacctcgctgatccccaatctccgaaacgtcgtcgcccttgataccgaggtcgcatcgaaccggatctactggtcggacctgagccagagaatgatatgctcgacccagcttgaccgcgctcatggggtgtcgtcctacgataccgtcatctcacgtgatatccaggcaccggacggactggcagtcgactggatccattcgaacatctactggactgattcagtgctcggaactgtttcagtggctgacactaaaggagtcaagcggaaaactctgttccgcgaaaacggatcgaaaccgcgggcgatcgtggtggacccggtccatggtttcatgtactggaccgactggggcactccagcgaagattaagaaaggtggattgaacggagtggatatctactccttggtgacggagaatatccagtggccgaatggaatcactcttgatctgctgtcaggacggctctactgggtcgattcgaagttgcacagcatctcatccatcgacgtgaatggaggaaaccgcaagactatcctcgaagatgaaaagagattggcccacccgttcagcctggccgtgttcgaggacaaggtgttctggaccgatatcatcaacgaagctatcttctccgctaaccgtctgactggctccgacgtgaacctgctggcggagaacctgctgtcgccagaggatatggtcctcttccacaacctgacccagcctcggggcgtgaactggtgcgagagaaccactctttccaatggtgggtgtcaatacctgtgccttcctgccccgcagatcaatccccattcgcctaagttcacctgcgcctgtccggatggaatgctgttggcgcgggatatgcggtcgtgcctgaccgaagccgaggcggcagtcgccactcaagaaacgtccaccgtgagactgaaagtgtcctcgactgctgtgaggacccagcacaccactaccaggccggtcccagatacttcccggcttccgggagctactccgggactgactaccgtcgagatcgtgaccatgtcgcaccaggcactgggagacgtggcgggacggggcaacgagaagaaaccttcatcagtccgcgcactgtcgatcgtgctgccgattgtgctgctggtctttctttgcctgggagtctttctgctgtggaagaactggcggctcaaaaacatcaactccatcaattttgacaatccggtgtaccaaaagaccaccgaggacgaggttcacatctgccataaccaggacggatactcctatccgtcacggcaaatggtgtcattggaggacgacgtggcc

SEQ ID NO: 16403 - DNA, 2580 bp, synthetic construct
  misc_feature 1..2580: note = source = /note="Description of Artificial Sequence: Synthetic coding sequence"
  source 1..2580: mol_type = other DNA
atgggtccgtggggttggaaactacgttggacggttgcgttattattagcggcggcgggtacggcggtaggtgatcgatgtgaacgtaatgaatttcaatgtcaagatggtaaatgtatatcgtataaatgggtttgtgatggttcggcggaatgtcaagatggttcggatgaatcgcaagaaacgtgtttatcggtaacgtgtaaatcgggtgatttttcgtgtggtggtcgtgtaaatcgatgtataccgcaattttggcgatgtgatggtcaagtagattgtgataatggttcggatgaacaaggttgtccgccgaaaacgtgttcgcaagatgaatttcgatgtcatgatggtaaatgtatatcgcgtcaatttgtttgtgattcggatcgagattgtttagatggttcggatgaagcgtcgtgtccggtattaacgtgtggtccggcgtcgtttcaatgtaattcgtcgacgtgtataccgcaactatgggcgtgtgataatgatccggattgtgaagatggttcggatgaatggccgcaacgttgtcgtggtctatatgtatttcaaggtgattcgtcgccgtgttcggcgtttgaatttcattgtctatcgggtgaatgtatacattcgtcgtggcgatgtgatggtggtccggattgtaaagataaatcggatgaagaaaattgtgcggttgcgacgtgtcgaccggatgaatttcaatgttcggatggtaattgtatacatggttcgcgtcaatgtgatcgtgaatatgattgtaaagatatgtcggatgaagttggttgtgtaaatgtaacgttatgtgaaggtccgaataaatttaaatgtcattcgggtgaatgtataacgttagataaagtatgtaatatggcgcgagattgtcgagattggtcggatgaaccgataaaagaatgtggtacggcggcgtgtttagataataatggtggttgttcgcatgtttgtaatgcgctaaaaataggtgcggaatgtttatgtccggatggttttcaattagttgcgcaacgacgttgtgaagatatagatgaatgtcaagatccggatacgtgttcgcaactatgtgttaatctagaaggtggttataaatgtcaatgtgaagaaggttttcaactagatccgcatacgaaagcgtgtaaagcggtaggttcgatagcgtatttattttttacgaatcgacatgaagttcgtaaaatgacgttagatcgatcggaatatacgtcgttaataccgaatctacgaaatgttgttgcgctagatacggaagttgcgtcgaatcgtatatattggtcggatctatcgcaacgaatgatatgttcgacgcaattagatcgagcgcatggtgtttcgtcgtatgatacggtaatatcgcgagatatacaagcgccggatggtctagcggttgattggatacattcgaatatatattggacggattcggttctaggtacggtttcggtagcggatacgaaaggtgtaaaacgtaaaacgttatttcgagaaaatggttcgaaaccgcgagcgatagtagtagatccggtacatggttttatgtattggacggattggggtacgccggcgaaaataaaaaaaggtggtttaaatggtgtagatatatattcgttagtaacggaaaatatacaatggccgaatggtataacgctagatttattatcgggtcgtctatattgggttgattcgaaactacattcgatatcgtcgatagatgttaatggtggtaatcgaaaaacgatactagaagatgaaaaacgtctagcgcatccgttttcgttagcggtatttgaagataaagtattttggacggatataataaatgaagcgatattttcggcgaatcgattaacgggttcggatgtaaatttattagcggaaaatctactatcgccggaagatatggtactatttcataatttaacgcaaccgcgtggtgtaaattggtgtgaacgtacgacgttatcgaatggtggttgtcaatatttatgtctaccggcgccgcaaataaatccgcattcgccgaaatttacgtgtgcgtgtccggatggtatgttactagcgcgagatatgcgatcgtgtctaacggaagcggaagcggcggtagcgacgcaagaaacgtcgacggtacgtttaaaagtttcgtcgacggcggttcgtacgcaacatacgacgacgcgaccggtaccggatacgtcgcgactaccgggtgcgacgccgggtctaacgacggtagaaatagtaacgatgtcgcatcaagcgttaggtgatgtagcgggtcgtggtaatgaaaaaaaaccgtcgtcggtacgagcgctatcgatagtactaccgatagttttattagtttttttatgtctaggtgtttttctattatggaaaaattggcgattaaaaaatataaattcgataaattttgataatccggtatatcaaaaaacgacggaagatgaagtacatatatgtcataatcaagatggttattcgtatccgtcgcgtcaaatggtatcgctagaagatgatgttgcg

SEQ ID NO: 16404 - DNA, 2580 bp, synthetic construct
  misc_feature 1..2580: note = source = /note="Description of Artificial Sequence: Synthetic coding sequence"
  source 1..2580: mol_type = other DNA
atgggaccctggggatggaagctcagatggactgtcgccctgctcctggccgcagccggcaccgctgtcggtgatcggtgcgaacggaacgaattccaatgtcaagacggaaagtgtataagctacaaatgggtctgcgatggttcagccgaatgtcaagatgggtcggacgaatcacaggagacgtgtttgtcagtgacctgtaagagcggagattttagctgtggcgggcgagtgaaccgctgtatcccacaattttggaggtgtgatgggcaagtggattgtgacaacggttccgatgaacaaggttgccccccaaaaacctgctctcaagatgagttcaggtgtcatgatggcaagtgtattagcagacaatttgtctgtgattcagacagggattgcctcgacggtagtgacgaagcatcgtgccctgtgcttacgtgtggtcccgcatcatttcaatgcaactcttctacttgtatccctcaactgtgggcgtgcgacaacgatccagattgtgaggacgggtcggacgagtggccacaaaggtgtcgtgggctttacgtttttcagggggactctagcccctgctcggccttcgaattccactgtctgtcgggcgagtgcatacattcctcctggcggtgtgatggtggacctgactgtaaggataagtccgatgaggaaaattgtgccgtcgcgacttgtaggcctgatgagtttcaatgctcagacggaaactgcattcacgggagcagacagtgtgaccgggaatacgattgcaaggacatgagcgatgaagtgggatgtgtcaacgtgaccctttgcgaaggaccgaacaagtttaagtgtcattcaggagaatgcattacccttgacaaggtgtgtaacatggcgcgggactgcagagactggtccgacgaacctatcaaggagtgtggaacggcggcctgtttggataacaacggaggctgctcacatgtgtgcaacgcattgaaaataggggcagaatgtctgtgtcccgatggtttccaacttgtggcacaaagacgctgtgaagatattgatgaatgtcaggatccagacacctgttcgcaactgtgtgtcaaccttgaggggggttacaaatgtcaatgtgaagaaggatttcagctggatccgcatacgaaggcgtgtaaggcagtcggttcgatagcatacctgttctttactaaccgccacgaagtgcgaaaaatgactctggaccgttcggaatacacttcccttattcccaatcttcggaatgtggtcgcgctggatactgaggtggcatcaaaccgcatttactggtcggatctctcccaaagaatgatttgttccacccagctggaccgggcacatggcgtgtcaagctatgatactgtcatttcaagagacatacaagccccagatggacttgctgtggactggatccattcaaacatttactggactgatagcgtgctcggtaccgtgtccgtggcagacactaagggagtcaagaggaaaaccctctttagggagaacggatccaaaccccgcgctatcgtggttgatccagtccatgggttcatgtactggactgactggggcactcctgcaaagattaagaaaggtggtcttaatggggtggacatttactcgctggtcaccgaaaacatccaatggcctaatggaattaccctcgatttgctttcggggcggctgtactgggtcgattccaaacttcattccattagttctatcgatgttaacggaggcaatcgcaaaactatactggaggacgagaagcgactcgcccatccgtttagcctggcagtctttgaggacaaggttttttggaccgacattatcaacgaagcaatcttctcagcaaatcggcttaccggatccgatgtgaatctcctggcagagaacctgctgtcacctgaagatatggtgttgttccataacctcactcaacctaggggtgtcaattggtgtgaacgcactacgctgtcaaacgggggctgtcaatacctttgcctgcctgcaccacaaatcaatcctcactccccaaagttcacctgcgcctgtcctgacgggatgctcctggcgcgcgatatgaggagctgcctgactgaagcagaagctgcagtggcaactcaggaaaccagcactgtccgtctgaaggtcagctcaaccgctgttcgtacccaacacaccaccactcgaccagttccggacacctcgcgcctccccggagccacccccggcctcaccaccgtggaaattgtgaccatgagccatcaggcattgggagatgtcgcaggaaggggaaatgagaagaagccttccagcgtgagggcgctctcaattgttcttccaatcgtcctgcttgtgtttctgtgtctgggtgtgtttctgctgtggaagaattggcggcttaagaacattaactcaatcaattttgataatccagtgtaccaaaagactactgaagatgaagtgcatatctgccataatcaagatgggtactcctacccttcaagacaaatggtgtcacttgaagatgatgtggcg

SEQ ID NO: 16405 - DNA, 2580 bp, synthetic construct
  misc_feature 1..2580: note = source = /note="Description of Artificial Sequence: Synthetic coding sequence"
  source 1..2580: mol_type = other DNA
atggggccgtgggggtggaaacttcggtggaccgttgctttattgctggccgctgcaggtaccgccgttggcgaccgctgcgagagaaatgagttccaatgtcaggatgggaaatgtatctcatacaagtgggtctgtgatggaagtgccgaatgtcaggacggttccgacgagagtcaggaaacctgtctgagtgttacttgtaaatccggggatttcagctgtgggggaagggttaacaggtgcattccacagttttggcggtgtgatgggcaagtggactgtgacaatgggagtgatgagcagggctgccccccgaagacctgtagtcaggacgagttccgctgccacgacggtaaatgcatttcaagacaatttgtctgtgattctgaccgcgactgcctggacggatcagacgaggcttcttgtcctgtcttgacgtgtggaccagccagtttccagtgcaatagtagcacttgcatcccacagctttgggcttgtgataacgaccccgactgtgaagacggatctgacgagtggccccagcgctgtaggggactgtacgtgtttcagggcgactcttctccttgctctgccttcgaattccactgtttaagtggagagtgtatccacagctcgtggcgctgcgacggaggcccagattgtaaggacaagtctgacgaagagaactgtgcagttgctacctgtcggcctgacgagtttcaatgctccgacggaaattgtatccatggtagcagacagtgtgatagagagtatgactgcaaggacatgtccgacgaagtgggctgtgtcaacgtgactctgtgcgagggtcctaacaaatttaaatgccatagtggtgagtgcatcactctcgataaggtgtgcaacatggcccgggattgtagagattggtctgatgagcctatcaaggagtgtggcacagccgcatgtctggataataatggaggttgctcccatgtctgtaatgcgttgaagataggagcggagtgcctctgccccgacgggttccagttggtagcccagcgacgctgtgaggacatagatgaatgccaggatccggacacatgcagtcagctttgtgtgaacctcgagggaggatacaagtgccagtgcgaggagggctttcagctggatccacacacgaaagcatgcaaggcggtaggctctattgcctatttattctttacgaaccggcatgaagtgagaaagatgaccctagatcgcagcgagtacacttccctgatccccaacctgcggaacgtggtggctctcgataccgaggtggcgagtaataggatttactggagcgacttgtcccaacggatgatatgcagcactcagctcgacagggcacacggcgtgtcatcctatgacactgtgataagccgggacatacaggcaccagacgggctcgccgtcgactggatccactcaaacatctactggacagactccgtcctggggaccgtttccgtcgcggacactaagggggttaaacgcaagacactgtttagagagaacggctcgaagccaagagcaattgtggtggaccccgtgcatggatttatgtactggactgattggggaacccctgcgaagatcaagaaaggcggtttgaacggggtggacatttacagcttggtgaccgagaatatccagtggccaaacggaataactttggatctcctttcaggaaggctctactgggtggattcaaagcttcactccatcagctctatcgacgtcaatggcgggaaccgtaaaaccatcctcgaggacgaaaaacgactggcccacccattcagccttgccgtgttcgaggataaggtgttctggacagatatcataaatgaagcaatttttagcgctaacagactaactggctcggatgttaacctcctggcggagaatctgttgtctccagaggacatggtgttgttccacaacttgacccagccgagaggggtgaattggtgcgaaagaactaccttgtctaatggagggtgccaatatctgtgcttgccggcacctcagataaatccgcattccccaaagtttacctgcgcctgtcctgatggtatgctcttggcgagggacatgaggtcttgtctgaccgaggccgaggcggcggtagctacacaggaaacctccactgtgaggctaaaggtctcttcaacagccgtcaggacacagcacaccacaacaagacccgtgcccgatacctcgcgtcttcccggagccacgcccggcttgaccacagtggagatagtcactatgagtcatcaggcactcggtgacgtggctggcaggggtaacgaaaagaagcccagctccgtacgcgcactttcaatcgtcctgcctatcgttctcctggtgttcctatgcttgggcgtgttccttctgtggaagaactggcgactgaagaacattaactccattaacttcgacaaccctgtgtatcaaaaaactaccgaggatgaagttcatatctgtcataatcaggatggatattcataccccagcagacaaatggtgtctctggaagatgatgtggcc

SEQ ID NO: 16406 - DNA, 2580 bp, synthetic construct
  misc_feature 1..2580: note = source = /note="Description of Artificial Sequence: Synthetic coding sequence"
  source 1..2580: mol_type = other DNA
atgggtccctgggggtggaagctgcgatggacggtcgctttgctattggcggccgcgggtacagcagtgggtgataggtgcgagcgcaatgagttccaatgccaggacggcaaatgtatatcatataagtgggtgtgcgatggttcggcggagtgtcaggacggaagcgacgagagtcaggagacgtgcctgtccgtgacctgcaaatccggggacttctcgtgtggtggccgcgtgaataggtgtattccacaattctggcggtgcgacggccaggttgactgtgacaatggaagcgacgagcagggctgtccgccaaagacgtgcagccaggacgagtttaggtgccacgatggaaagtgtatcagtcgtcagtttgtctgtgatagcgaccgggattgcctagacggatcagatgaggcaagttgtccagtgctgacttgcggccccgccagttttcagtgcaattcttcgacttgtatcccacagctttgggcttgcgacaatgatcccgattgcgaggatggatccgatgagtggccgcaacgctgccgaggtctatacgtgtttcagggtgacagttcgccttgtagcgccttcgaatttcattgcctgagcggcgaatgcatccacagtagctggcgctgtgacggtggaccagattgcaaagataagagcgatgaggaaaactgcgctgtggcaacttgtagacccgacgagtttcagtgcagcgatggaaattgcattcacggctcccgccagtgcgatcgtgaatacgactgcaaggatatgagtgatgaagtcggctgtgtgaatgttacgttatgtgaaggtccgaacaagttcaagtgccattcgggagaatgtataaccctggataaggtgtgcaacatggctcgggactgccgcgactggagcgatgaacccattaaggagtgcggaacagcggcttgtctagacaataatggtggttgcagccacgtttgtaacgcgctgaagatcggcgcagagtgtttatgcccagatggattccagctggtggcacagcgcagatgtgaggacatagacgaatgccaggaccccgatacatgctcccaactctgcgtgaacctggagggcggctacaaatgtcagtgcgaagaggggtttcaattggatcctcacacaaaagcttgcaaagccgtgggttcgatcgcctatctcttctttaccaatcgtcacgaggtgagaaagatgaccttggatcgttccgaatatacgagcctgattcccaacctgcgaaatgtggtggccctggatacagaggtggcctcgaaccgcatttactggagtgacttgagtcaacggatgatttgcagcacccagctggaccgcgctcacggcgtgtcgagctacgatactgtcatctcgcgggatatacaggcccccgatggtctagccgtcgattggattcattcgaacatatattggaccgattcagtgctgggaacggtgtcggtcgctgacactaaaggcgtgaagcgcaagacactcttccgggaaaatggcagcaagccccgcgctatcgtggtggatcccgtgcacggctttatgtactggactgattggggcactccagccaagatcaagaagggtggactgaatggtgtggacatctattccctggtgactgaaaatatacagtggccaaacgggataactctggacctgctgtcaggccgactttactgggtggacagtaagttgcactcgatctcatccattgatgtcaacggtggcaaccgcaagactatcctggaggatgaaaaacgtttggcccaccccttttcgctggcagtcttcgaggataaggtgttctggacagatattatcaacgaagccatattctccgccaatcggctaaccggtagcgacgtgaatctgttagccgagaacctgctgtcgccagaggatatggtattatttcacaatctgactcagccccgaggagttaactggtgcgagcgtacgaccttgtccaacgggggctgccagtacctgtgccttccagccccccagataaatccgcattcgcctaaattcacctgcgcttgccccgacggcatgctcctggcacgcgatatgcgctcgtgtctgactgaggcagaagctgcggtagcaacccaggagacaagcactgtgcgcctgaaagtgtctagcaccgcagttcgtacccagcatacaaccacccgtccagtacccgatacgagtcggctgcccggtgcgacccccggattgaccaccgtagaaatcgtgaccatgagccatcaagctctcggagacgtggcggggagaggtaacgagaagaagccatcgagtgtgcgggctctttcaatcgtactgccaatagtgctcctggtgtttctatgtctgggtgtcttcctgctgtggaagaattggcgtctgaaaaatatcaattccatcaattttgacaatcccgtgtatcagaaaacgacggaggacgaggtgcacatctgtcataatcaggacggttactcatatccgtctagacagatggtctctctggaggatgacgtcgcg

SEQ ID NO: 16407 - DNA, 2580 bp, synthetic construct
  misc_feature 1..2580: note = source = /note="Description of Artificial Sequence: Synthetic coding sequence"
  source 1..2580: mol_type = other DNA
atgggcccctggggctggaaactccgatggaccgtggcccttttgcttgccgctgctgggaccgcagtgggcgataggtgtgaacgcaacgagtttcaatgtcaagacggaaaatgtatcagttataagtgggtctgtgatggcagcgccgagtgtcaggatggaagtgatgaaagccaagagacttgcctgtctgtcacatgcaagtccggcgacttcagttgcggcggacgggttaacaggtgcataccgcagttctggaggtgtgatggacaggttgattgcgacaatggctcagacgagcagggatgccctccaaagacttgttcccaggacgaattcagatgtcacgacggtaaatgtatttcacgccagtttgtatgtgactctgacagggattgcctggacgggtctgacgaggcaagttgcccagtcctcacctgtggcccagcctcgtttcagtgtaactcatcaacttgtatcccacagttgtgggcctgtgacaatgatcccgactgcgaagacggctctgacgagtggccccaacggtgccggggcttatacgtgtttcagggcgatagctctccctgctcagcctttgagtttcactgccttagcggtgaatgtatccacagttcttggcgatgtgatgggggaccagactgtaaagacaaatctgacgaggagaactgcgcggtggcaacatgtcggcccgacgagtttcagtgctccgatggaaactgcattcatgggagccggcagtgcgaccgggagtacgattgcaaagacatgagtgacgaggtggggtgcgtcaacgtgaccctgtgtgaaggaccgaataagtttaagtgtcactccggagagtgtatcacactggataaggtctgtaatatggcaagggactgtagggactggagcgacgagccaatcaaagagtgcgggacagctgcttgtctggataataatggggggtgtagccacgtgtgtaatgctttgaaaatcggagccgagtgcctgtgcccggacggcttccagctcgtagctcagcggagatgcgaggatatcgatgaatgtcaagatcccgatacatgcagtcaactgtgtgtaaatcttgaaggcggctacaaatgccaatgtgaggaagggtttcagctcgacccccacacgaaggcatgtaaggctgttggaagtattgcttatctttttttcaccaacaggcatgaggtgaggaaaatgactcttgaccgaagtgagtacacctcactcatccccaacctgcgaaacgttgttgccctggacactgaagttgcttcgaatcgaatctactggtccgacctcagccagagaatgatatgctcgactcagctggacagggcccatggagtgagtagctacgatacagtaatctccagggacattcaagcccctgacggcctcgccgtcgactggattcatagtaacatctactggactgattctgtgctcggtacagtgtctgtggccgatactaaaggggtcaaacgaaagacactcttccgcgagaacggttccaaacctagggctatagttgtagatccggtgcacggattcatgtattggaccgactgggggacacctgcgaagatcaagaagggagggctgaacggagtggacatctactccctagtcaccgagaacatacagtggcctaatggaatcacgctggatctgttgtccggccggctctactgggtggactccaagctgcactccatatcttccatcgatgtcaatggtggcaacaggaagaccatcctggaagatgagaagcgcctcgcccacccattcagcttggccgtgttcgaggacaaggtgttttggactgacattataaacgaagccatcttctctgctaaccggcttacggggagcgacgtcaatctgctcgcagagaatctgctttcccctgaggacatggtactctttcacaacttaacacaacctcgcggcgtcaactggtgcgagcgaacaactctgagcaacggaggctgccagtatctatgcctgccagccccacagataaacccgcattcccccaagtttacctgcgcttgcccagacgggatgcttctggcaagagatatgagaagttgcctgacagaagcggaggctgccgttgctacccaggagacctccaccgtgcgattgaaggtttcatccacagccgtgaggacgcagcacacaactacacgtcctgtccccgatacaagcaggctccccggcgcaacaccggggttgacaaccgtggaaatcgtgaccatgagccaccaggcactgggggatgttgcaggtagaggaaacgagaagaagccttctagcgttcgtgcgttgtcaattgtgcttccaatagtgctgttggtctttctgtgcctcggggttttcctgctctggaagaattggagattgaagaacattaactctataaatttcgataatcctgtgtatcagaaaacaacagaggacgaggtgcacatttgtcataatcaagacggttattcctatccaagtaggcagatggtaagcctggaggatgatgtggcc

SEQ ID NO: 16408 - DNA, 2580 bp, synthetic construct
  misc_feature 1..2580: note = source = /note="Description of Artificial Sequence: Synthetic coding sequence"
  source 1..2580: mol_type = other DNA
atgggaccttggggctggaagctcagatggactgtggccctcctgctggctgccgcgggtaccgccgtgggtgatcgctgtgagagaaacgaattccaatgtcaggatgggaaatgtatttcgtacaagtgggtgtgtgacgggagcgcggaatgccaagacggttcagatgagtcccaagaaacttgtctgtccgtgacctgtaagtctggagatttctcctgtggtggtagggtgaaccggtgtattccgcaattctggaggtgtgatggtcaagttgattgtgacaacggatcggacgagcagggatgtccacctaaaacgtgctcccaggatgaattccgctgtcacgatggtaagtgcatttcacggcagtttgtctgtgattcggacagagactgtctggatgggtcagatgaggctagctgcccagtgctcacctgcggtcctgcatcatttcaatgtaattcctccacctgcatcccacaactgtgggcgtgtgataacgatccggactgcgaagatggcagcgatgagtggccgcagagatgtcgtggcctttacgtgtttcaaggtgattcctcgccctgttcggcattcgagtttcactgcctgagcggcgaatgtattcactcatcctggcggtgcgatggaggacctgactgcaaagacaaatcagatgaggaaaattgtgcagtagcgacctgtaggcccgatgagtttcagtgctcggacggtaactgtattcatggttccagacaatgcgatagggaatacgactgcaaagatatgtcagatgaagtgggctgtgttaacgtcactctttgtgaaggaccaaacaagttcaagtgtcattcgggtgagtgtataacccttgataaggtttgtaatatggcccgggattgtcgtgattggtcggatgagcctatcaaagaatgtggcaccgcggcatgtctggataacaacggaggctgcagccatgtgtgtaatgcacttaagattggggcagaatgtttgtgcccagatggtttccagctcgtggcacaacggagatgcgaagatatagacgaatgtcaagatccagatacttgctcgcaactttgtgtcaacctggaaggaggatacaagtgtcagtgtgaggaagggtttcagcttgacccccatactaaggcctgtaaggcagtggggtcgatagcatacctcttctttaccaacaggcacgaggtcaggaagatgacccttgatcgatccgaatacaccagcctgatccctaatctgcggaatgtggtcgcacttgacaccgaagtggcatcgaatagaatttactggtcggaccttagccaacggatgatttgttccacccaactcgaccgggcacacggggtgtcctcgtacgacactgtgatctccagagacatccaagccccagatggactcgcagtggattggattcattctaacatttactggactgattcggtgctgggaactgtgtcggtcgctgataccaagggagtgaagcggaaaactctgtttcgtgaaaacggttccaagccacgagcaattgtggtcgatcccgtgcacggtttcatgtactggaccgattggggaactccggcaaagattaagaaagggggtcttaacggtgtggacatttactctctggtgaccgagaacattcagtggcccaacggtataactctggatctcctgtccggcagactctactgggtggattcgaagctccattcgatttcatccatcgacgtgaacggagggaatagaaagactatactggaagatgaaaagagacttgcacacccatttagccttgcagtgttcgaggacaaggtgttttggactgacataatcaacgaagctatattctcggccaaccgtctgaccggaagcgatgtcaaccttctggccgaaaatcttttgagccctgaggacatggtgctgtttcataacctgacccagcctcgcggagtgaactggtgtgaacgcactactctttccaatggtggttgccagtacctttgcctgcctgctcctcagattaacccccattccccaaagttcacttgtgcatgtcctgacggaatgttgctggcccgtgatatgcgttcatgcctcactgaggcagaggccgcggtggcgactcaggaaacttcgaccgtgcggctgaaggtcagctccaccgcggtcagaactcagcatacgacgactagaccagtgcccgatacctcgcgacttccaggtgcaacccccggtctgaccactgtggaaattgtgactatgtctcatcaagctctgggggacgtggcaggtagaggcaacgaaaagaagccatcgagcgtcagagcactgtcgatagtcttgcctatagtgctccttgtgttcctgtgtcttggcgtgttcctgctgtggaagaactggaggctcaaaaacataaactccatcaattttgacaaccctgtttaccaaaagaccactgaggatgaagtgcacatttgtcacaaccaagatggttactcgtacccttcccggcagatggtgagcctggaagatgacgtggca

SEQ ID NO: 16409 - DNA, 2580 bp, synthetic construct
  misc_feature 1..2580: note = source = /note="Description of Artificial Sequence: Synthetic coding sequence"
  source 1..2580: mol_type = other DNA
atgggcccttgggggtggaagctgcggtggactgtcgccctgctgctggctgctgccggcactgcggtaggcgaccgttgtgagcgtaacgaatttcagtgtcaggacggcaagtgtattagttataaatgggtctgtgatgggtccgctgaatgccaagatggatcggatgagagccaggagacatgtctgagcgtgacctgtaagtcaggggacttcagctgcggcggccgggtgaaccgttgcataccccagttctggcgctgtgatggccaggtggattgtgataatgggagcgatgaacagggatgtccaccaaaaacgtgctctcaggacgagtttaggtgtcacgacggaaaatgtatctccaggcagttcgtgtgtgattccgatcgtgactgcctggatggttctgacgaggccagctgccctgtgcttacttgtggacccgcctcttttcaatgcaacagttctacttgtattcctcagctgtgggcttgcgacaacgaccccgactgtgaggacggtagtgacgagtggccccagcgctgcaggggtctttatgtttttcagggagacagctccccttgctctgccttcgaatttcactgtctcagtggcgagtgcattcactccagttggcgctgtgacggaggcccggactgtaaagacaaaagtgatgaagagaactgcgccgtggcaacatgccgcccagatgaatttcagtgcagtgatggcaactgtatccatggctctcgccagtgcgacagagagtacgattgtaaggatatgtccgacgaggtcggttgtgtcaacgtgactctatgcgaggggcctaacaaatttaagtgccactctggtgagtgcatcactctagataaagtatgcaacatggcaagagattgccgcgactggagcgatgaacccatcaaggagtgcggcacggccgcttgtctggacaataatgggggatgctcacatgtttgtaacgctttgaagattggggcagaatgtctgtgtcccgatggctttcagctcgtggcccagaggcgctgcgaagatattgacgaatgtcaggacccagacacctgttcacaactgtgcgtcaacctagagggcggatacaaatgccagtgtgaagagggtttccagttggatccccacaccaaggcgtgtaaagcagttgggagcatcgcatacctcttcttcacaaatcggcacgaagtcagaaagatgacgctggaccggagtgaatacacctctctgattccgaaccttaggaatgtcgtggctcttgatacagaggtcgctagcaacaggatttactggtcagatctgtcccaacggatgatttgctccacgcaactcgatcgggcccatggggtgtcctcctatgacactgtgatctccagggacatccaagccccagatggcctcgcagtagactggattcactcgaacatttactggacggattctgtcctgggaaccgtgtcagtagccgatactaagggagtaaaaagaaagactttgttcagagagaacggaagcaagccgcgcgcaattgtggtggacccagtgcacggattcatgtactggactgactgggggacacccgctaagatcaaaaaggggggactcaacggggtagatatttatagccttgtgactgaaaacattcagtggcccaacggaatcacccttgatttgctttcaggcaggctgtactgggtggacagcaaactccacagcatctcctccatcgacgtgaacgggggaaatagaaaaactattttggaggacgagaaacgtctggcccatcctttttctctggccgtgtttgaggataaggtgttctggactgacataataaacgaagctatcttttccgcgaatcggctcaccggatcagatgtgaacctattggccgagaacctcctgtcccctgaggacatggtcctattccataaccttacacagcctaggggagttaactggtgtgagcggacgactctctccaatgggggttgtcagtacctgtgtctgcctgctccccagatcaatccccactctcctaagtttacctgtgcgtgtccagatggcatgctgttggcgagggacatgcggtcatgtctcacggaggctgaggctgccgtggcaactcaggaaactagcacggtccgcctaaaggtgtcctctactgcagtgagaacacaacacactactactcgccctgtgcccgacacttctagacttccaggtgctacccctggacttacaacggtggagatcgtgaccatgtcccatcaggctctaggggacgtggcaggcagggggaacgaaaaaaagcctagttctgtccgcgcattgtccatagtgctgccaattgttctcctggtgtttctgtgcctcggggttttcctcctatggaagaactggagattaaagaatattaacagtatcaactttgataatccagtgtaccagaagactacagaagatgaggttcacatctgccataaccaagacggctacagctatccctcccgccagatggtcagcctggaagacgatgttgca

SEQ ID NO: 16410 - DNA, 2580 bp, synthetic construct
  misc_feature 1..2580: note = source = /note="Description of Artificial Sequence: Synthetic coding sequence"
  source 1..2580: mol_type = other DNA
atgggaccatgggggtggaagctccgctggaccgtggcgttgctccttgcagccgccgggactgctgtgggagatcggtgcgaaaggaacgagttccagtgccaggacggcaaatgcatcagttacaagtgggtctgtgatggatcggcagagtgtcaagacggaagcgatgaatcgcaagaaacctgtctgtcggtgacctgtaagtctggggatttctcgtgcgggggcagagtgaaccgctgcattccacagttttggagatgcgatggacaggtcgattgtgacaatgggtctgatgaacaaggatgtcctcctaagacgtgcagccaagatgaattccgctgccatgacggtaaatgtataagccgacaatttgtgtgtgactcggatcgggattgcctggatggaagcgacgaagcgtcatgccccgtgctcacgtgcggtccagcatcgtttcagtgcaactcgtccacctgtatcccccagttgtgggcgtgtgataatgatccagactgtgaggacggatcagatgaatggcctcagaggtgccgaggactctacgttttccaaggggattcatcgccatgttccgcatttgaattccactgtcttagcggagaatgtattcactcaagctggcgttgcgatggtggccctgattgtaaggataagagcgatgaagaaaactgtgccgtggcaacttgtagacccgatgaatttcagtgctcggatggcaactgtattcatgggtcaaggcagtgtgacagagaatacgattgtaaggacatgtccgacgaggtcggatgtgtgaatgtgaccctgtgtgagggacccaataagttcaagtgtcattccggagagtgtattactcttgataaggtttgtaatatggctagagattgtagagattggagcgacgaaccaattaaggaatgtggtactgcggcatgtctggacaacaacggcggctgctcacatgtgtgtaatgctctcaagatcggcgcagaatgtttgtgtcctgatggatttcaactcgtcgcacaacggagatgcgaggatatcgatgaatgccaagatcccgatacttgtagccaactttgtgtgaacctggaaggtggatacaagtgtcagtgtgaagagggattccaactggatcctcacaccaaagcctgcaaggcggtgggatccatcgcctacttgttctttaccaacagacacgaagtgcgaaagatgacccttgacagatcggagtacacgtcgcttatacctaatctgcgaaacgtggtggcgctggataccgaggtggcgtccaaccgaatctactggagcgatctttcgcaacgcatgatatgctcgacgcaattggaccgagcacatggtgtgtcgtcctacgacactgtgatctcgcgggatattcaagctccggatggcctggcagtggattggattcactcgaacatttactggactgactcagtgcttggcaccgtgtcagtggcagatactaaaggggtgaagagaaagactctctttcgagaaaatggcagcaagccgcgagcaattgtcgtggatccagtccacggctttatgtactggactgattggggaactccagccaagatcaagaaaggcggacttaacggcgtggatatctactcccttgtcacggagaacattcagtggcctaatggaattaccctggatctcctgtccggtagactgtactgggtcgactcaaagctccattcaatatccagcattgatgtcaacggaggaaaccgtaagactatacttgaggacgaaaaaaggcttgctcaccctttttcccttgcggtgtttgaagataaggtgttttggaccgacattatcaacgaggcaattttctctgcaaataggttgaccggctcagacgtcaaccttctcgccgaaaatcttctttctcctgaagatatggtcctgttccacaaccttactcagcccagaggcgtgaactggtgcgagcggactactctgagtaatggaggttgtcagtacctgtgccttcctgcaccacaaatcaatccacattctcccaaattcacgtgtgcctgccccgatggtatgcttctcgcacgagacatgcggagctgcctcactgaagccgaggctgcagtggccacccaggaaacctcgaccgtccgtctgaaagtcagctcgaccgccgtccgcacccaacataccaccacgcgacctgtgcccgatacctccagactgccgggagcaactcctgggcttaccaccgtcgaaatagttaccatgtcacaccaggcgcttggagacgtcgccggcagagggaatgagaagaagccatcctcagtgcgagcgctcagcatcgtgttgccaatcgtgcttctcgttttcctctgccttggcgtgtttctgctgtggaaaaactggcgtctcaagaacatcaactccatcaacttcgataaccctgtgtaccaaaaaaccactgaggacgaagtccatatttgccacaatcaggatgggtactcctacccatcgcgccaaatggttagcttggaggacgatgtggca

SEQ ID NO: 16411 - DNA, 2580 bp, synthetic construct
  misc_feature 1..2580: note = source = /note="Description of Artificial Sequence: Synthetic coding sequence"
  source 1..2580: mol_type = other DNA
atgggaccatggggatggaagttgaggtggaccgtggcactcttgcttgcggctgccggcactgccgtcggcgataggtgtgaaaggaacgaattccagtgccaagacggaaagtgcatctcctacaagtgggtttgtgatgggtcagcggagtgtcaggatggcagtgacgagtcacaggaaacctgtctgtctgtgacctgtaagagtggggactttagctgtggcggcagagtaaacaggtgtatcccccagttttggcgctgcgacggacaggtggactgtgacaacggctcagacgagcaggggtgcccgcctaagacatgttcacaagatgaattcagatgtcatgacggaaagtgcattagtagacaattcgtgtgtgatagtgatcgcgattgccttgatggcagcgatgaagctagctgtccagtgctaacctgcggtcctgctagttttcagtgcaactcctccacatgcatacctcagctttgggcgtgtgataacgaccctgactgtgaagatggatctgatgagtggcctcagagatgcagggggctgtatgtgttccaaggagacagttctccctgctctgcatttgagttccattgtctatctggggaatgcatccactcgtcttggcgctgtgatggaggtccagattgtaaggacaagtccgacgaggagaattgcgcggtggcgacttgcaggccggacgagtttcaatgttccgacggaaactgtattcatggctcacgacagtgcgatagagaatatgattgcaaagacatgagtgacgaagtgggctgcgtgaatgtgaccttgtgtgagggtcccaataagttcaagtgccactcaggagagtgcatcaccttagataaggtctgtaacatggcccgagactgtcgagactggtctgatgaacccatcaaagagtgcggcaccgctgcctgcctagacaacaatggcggctgcagccatgtctgcaatgctttgaaaatcggggccgaatgcttatgtcctgatgggtttcagctggtcgcccagagaaggtgtgaagacatcgatgagtgccaggatcctgatacctgttcccagctgtgtgtcaacctggagggaggatataaatgccagtgcgaggagggattccagctcgaccctcataccaaagcctgcaaggcagtgggctctatcgcctacttgtttttcaccaatagacacgaagtgcgcaagatgacgctggacagatcggagtatacatcccttatccccaatttaagaaatgtggtggccctcgacactgaagtggcaagtaaccgaatttactggtcagatctgagtcagaggatgatctgtagtacccaattggatagggcacatggcgtgagctcttatgatacagttatcagcagagatatccaggcaccagacggattggccgtagactggattcactccaatatctattggacagacagtgtactcgggacagtgtctgtagcagacaccaagggtgttaagaggaagacgctcttcagagaaaacggatctaagcctagggcaatagtagttgaccctgtgcacggcttcatgtattggacggactggggaaccccggccaagatcaagaagggcggattaaatggagtggatatctactccttagtgactgaaaatatccaatggccgaatgggataacgctggatctcctgtctggaagactgtattgggtggatagcaagttgcactctattagcagcattgatgttaacggcggaaatcgaaagactattttagaggatgaaaagagactggctcaccctttttccctcgctgtgtttgaggataaggtgttttggaccgacattataaacgaggcaatcttttccgctaatagactgacgggcagtgacgtcaacctgcttgccgagaacctcctgtcgccggaggacatggttctcttccacaacctgacccaaccaagaggagtaaattggtgtgagaggactacactcagcaatggggggtgtcagtacctctgcctgccagcacctcagataaatcctcattccccaaaatttacatgtgcatgtccagatgggatgcttctggcaagagatatgaggagctgtctgaccgaggctgaggctgccgtggctacccaagagacaagcactgtgcgactcaaggttagcagtaccgcagtgcgaacccagcatactacaactcggcccgtgcctgacaccagtagattgccgggggcgactccaggcctgaccaccgtggaaattgtgacaatgtctcaccaggccttgggtgacgttgcggggcggggtaatgagaagaaaccttccagcgtgagagccttgagcatcgttttaccaatcgtgctgctggtctttctctgtctgggcgtattccttctgtggaaaaattggaggttgaagaatatcaactcaataaattttgataaccctgtgtatcaaaagaccaccgaggacgaggtccacatatgtcacaaccaggacggttactcgtatccaagcagacagatggtgtccctcgaggacgacgtcgcc

SEQ ID NO: 16412 - DNA, 2580 bp, synthetic construct
  misc_feature 1..2580: note = source = /note="Description of Artificial Sequence: Synthetic coding sequence"
  source 1..2580: mol_type = other DNA
atgggtccgtggggttggaaacttcgctggactgtggcgcttttattagctgcggccggcaccgcggtcggggacagatgcgaaaggaatgaatttcagtgtcaagatggcaagtgtatttcatacaaatgggtgtgtgatggctcagcagagtgtcaagacggctcggatgaatctcaagagacttgcctgtcagttacctgcaaaagcggtgacttttcttgcggcggcagagtcaaccggtgtatcccgcaattttggcgttgcgatgggcaagtcgattgcgacaatggaagtgatgaacaggggtgtccgcctaaaacttgttcacaagatgagttcagatgtcatgatggaaaatgcatttctaggcaatttgtgtgcgactcagatagagattgcctagacggatctgatgaggcgtcctgtccggtgttgacatgcggtccggccagctttcaatgcaactcaagcacgtgtataccgcagctttgggcctgcgataatgaccctgattgtgaagacgggtcagatgagtggccgcagagatgtcggggcctttatgtgtttcaaggcgactcatccccttgttcagcttttgaattccactgtctcagcggggaatgtatacattctagctggagatgcgacggcgggccggattgcaaagataaatccgacgaagaaaattgtgcagtagcgacatgtcgtccggacgaatttcagtgctccgacggaaactgcattcatggatcacgtcaatgtgatagagaatacgattgcaaagatatgagtgatgaagtcggctgtgttaatgtgacgttgtgcgaaggacctaataaatttaaatgccatagcggagagtgcatcacattggataaggtatgcaacatggcgagagattgccgcgactggtcagatgaaccaatcaaggaatgcggcactgcggcgtgcttagataataacggggggtgttctcacgtgtgtaacgctttaaaaatcggggctgaatgtttatgccccgatggctttcaactggttgctcaaagaagatgtgaagacattgatgaatgtcaggacccggatacctgttcgcaactttgtgtgaatcttgagggaggatataagtgccaatgtgaagaagggtttcagctggatccgcatacaaaagcgtgtaaagcagtgggcagcattgcttatttattcttcacaaacagacatgaggtcagaaaaatgacactggaccgttctgaatacacaagccttatcccgaatcttcgcaatgtggtggcgcttgacactgaggttgcatcaaaccgcatttattggtcagatttatctcagcgtatgatttgttccacacagcttgatcgagcacatggagtgtccagctatgatactgttatcagtcgagatattcaggcgccggacggtttagccgttgattggatccatagcaacatctattggacagattcagtattgggcacggtgtcagttgctgatacaaagggggtgaagcgtaagacattattccgggaaaacggctcaaagccaagggctatcgttgttgatccggttcatgggtttatgtactggacggattgggggacgcccgcaaaaataaaaaagggagggttaaacggtgtcgatatttattcattagtgacagagaacattcaatggcctaacggaatcacgctcgatttacttagtggcagattgtactgggttgatagcaaacttcactcaattagcagtattgacgtcaacgggggtaacaggaaaacaatactggaagacgagaagcgcttagcccatccattcagtttagctgtctttgaagacaaagtgttctggactgatattattaacgaagccattttctcagcgaatcgccttacgggatcagatgttaatctgctggcagaaaatcttctcagtccggaagatatggttctgtttcataacctgacacaacctcgcggcgtcaattggtgcgaacgaactacactgtcaaacggaggatgtcagtatctttgtcttcctgcgccgcaaatcaaccctcattctcctaaatttacatgtgcgtgcccagatggaatgcttcttgcgcgtgatatgagaagctgtttaactgaggcggaagcggctgtcgctacgcaggaaacaagtacggtaaggttgaaggtttcatccactgctgttagaacgcagcatactaccacaagacctgtaccggatacctcccgcctgcccggagctacgccaggtttaactactgtggaaattgtcaccatgtcccatcaggctttaggagacgtcgccggacgcggcaatgaaaaaaaaccgtcttctgtcagggccttgtcaattgttctgcctatcgtgttgttagtttttctttgtctcggagtctttctgctgtggaaaaattggcgccttaaaaacattaattctataaattttgataatccggtgtatcaaaaaacgacggaagatgaagtccatatttgccacaatcaggacggatactcttatccgtctagacaaatggtgtccctggaagacgatgtagct

SEQ ID NO: 16413 - DNA, 2580 bp, synthetic construct
  misc_feature 1..2580: note = source = /note="Description of Artificial Sequence: Synthetic coding sequence"
  source 1..2580: mol_type = other DNA
atgggaccatggggttggaagctgcggtggactgtcgcccttctcttggcagctgctggtactgcagtgggggatagatgtgagagaaacgaatttcagtgccaagacggcaaatgtatatcctacaaatgggtgtgcgacggctctgcggaatgccaggatggttcggatgaatcgcaagaaacttgtctctcggtgacgtgtaaaagcggggacttttcctgtggcggacgggtgaatagatgcataccccaattctggcgctgcgatggtcaggtcgactgcgataacggatcagacgaacaggggtgtcctcctaagacttgctcccaagacgaattccgctgtcacgatggaaaatgcatttcgaggcagtttgtgtgcgactccgaccgggactgcctcgacggctccgatgaggcatcctgtcctgtccttacctgcggacctgcatcgtttcaatgcaactcgtccacctgtatcccgcaactgtgggcatgtgacaacgatcccgattgtgaagatggatccgatgaatggcctcagagatgtcggggtctttacgtgtttcagggagacagttcgccatgctccgcattcgaatttcactgtctctccggagaatgtatacactcttcctggcgatgcgatggtggtccagattgcaaggacaagtcagatgaagagaactgtgcagtggccacttgtcgacctgacgagtttcagtgttcggatggtaactgcattcacggcagccgacaatgcgatcgtgaatacgactgtaaagacatgtctgacgaagtgggttgtgtgaatgttacgctgtgtgaaggcccgaataagtttaagtgtcattcaggagaatgtatcacgcttgataaggtgtgtaatatggctcgggactgccgagattggtcggatgaacccattaaggagtgtggtactgcggcatgtctcgacaataacggaggatgttcacatgtctgtaacgcgctcaaaattggagcagaatgtttgtgtcccgatggatttcagctggtggcccaacgccggtgcgaagatatcgacgagtgtcaggatccggacacctgttcacaactgtgtgtcaaccttgaaggaggctacaagtgccaatgtgaggaaggattccaacttgacccgcacacgaaggcatgtaaggcagtgggctcgatagcatacctgttctttactaatagacacgaagtgagaaagatgactctggatcgttcagaatacacctcgcttattcccaatctgaggaacgtcgtggctttggataccgaagtggccagcaatcgaatttactggagcgatctttcgcaaaggatgatttgttccacgcagcttgacagggcacatggtgtgtcatcgtacgataccgtaatctcccgcgatattcaagcacctgatggactcgccgtcgattggatccatagtaacatttactggacggacagcgtgcttggtacggtgtcagtggccgataccaaaggggtgaagagaaagaccctttttagagagaacggatccaagccccgggccatagtcgtggatcccgtgcatggttttatgtactggaccgattggggtactcccgccaagattaagaaggggggcctgaacggtgtggacatttactcccttgtcaccgagaacattcaatggccaaacggcatcactctcgacttgctgtcaggaaggctttactgggttgactcgaaacttcattccattagctcaatcgatgtgaacgggggaaataggaaaaccatcttggaagatgaaaagcgtctggcgcatcctttttcgcttgcagtgtttgaggataaggtgttttggacggatatcattaatgaagccatcttttcagcaaacagactcactggttccgatgtcaatcttctggcagaaaacttgctttcgcctgaagatatggtgctcttccacaacctgactcaaccacggggcgtgaactggtgtgaaagaactactctcagcaacggaggttgtcagtatctgtgtctgccagcaccccaaatcaacccccactcgcctaaattcacttgtgcctgtccggatgggatgctgctggcccgagatatgagatcatgcctgactgaggcagaagccgcggtggcgactcaagagacttccactgtcagacttaaggtcagctccactgctgtcagaacccagcataccactactagaccggtcccggacacctccagacttcccggagcaacccctggtcttactactgtcgagatcgtcactatgtcccatcaggcacttggcgacgtggcaggtcgagggaacgaaaagaagccgtccagcgtgcgagcactctctattgtgctgcctattgtgcttctcgtgtttctgtgtctgggagtgtttcttctttggaagaactggagattgaagaacatcaattcgatcaattttgacaaccctgtgtaccagaaaaccaccgaggatgaagtacatatctgccataaccaagacggctactcgtatccttcgcgacaaatggtgtcgctggaagatgatgtggct

SEQ ID NO: 16414 - DNA, 2580 bp, synthetic construct
  misc_feature 1..2580: note = source = /note="Description of Artificial Sequence: Synthetic coding sequence"
  source 1..2580: mol_type = other DNA
atgggaccttggggttggaagttacgctggactgtggccctgttactggcagcagcgggaactgctgtcggcgacagatgcgagcggaatgaatttcagtgccaagatggcaagtgtatttcgtacaaatgggtctgtgacggttctgctgagtgtcaagacgggtctgacgaatctcaggaaacatgcctctctgtcacgtgtaagtccggagatttcagctgcggcgggagggtgaacaggtgcatcccacaattttggaggtgtgacgggcaagttgattgtgacaacggctctgacgaacagggttgcccgccgaaaacctgttcacaggacgaattccgatgtcatgacgggaaatgcatctctcgacaattcgtttgcgacagtgaccgggattgcttggatggctcagacgaggcctcctgtcccgtactaacctgtggacctgcttcttttcagtgtaactcatcaacctgcataccacagttgtgggcctgtgataacgatccggactgtgaggatggctctgatgagtggcctcaaagatgtagagggctgtatgtcttccagggggactcctctccctgttcagcattcgagtttcactgtctgagcggggagtgtattcatagtagctggcggtgtgatggtggacccgattgcaaagataagtctgacgaagaaaattgtgccgtagccacttgtagaccggacgaattccagtgttcggacggaaactgcattcacggcagtaggcagtgcgacagagagtatgactgtaaggatatgtctgacgaggtgggatgcgtgaacgttactctgtgcgaaggcccaaacaaatttaagtgtcattcaggagagtgcattactctggacaaagtgtgcaacatggctcgagactgccgggattggagcgatgagccaatcaaagaatgcggaacagccgcttgcctcgacaacaatggcggatgttcgcacgtgtgcaacgcgcttaagatcggggccgagtgcttgtgccctgatgggtttcagctcgtggctcaaagacgatgtgaggatattgatgaatgccaggatccagacacctgcagccagctgtgcgtcaacctggaagggggctataagtgccagtgtgaggaagggttccagctcgacccgcacactaaagcttgcaaggcagtcggcagcatcgcatacctgttttttacaaatcggcacgaagtgagaaaaatgacgctcgacagatctgaatatactagtcttatcccaaatctcagaaacgtggttgccctggacacagaggtcgcttctaaccgaatctactggagcgacctgtcccagcgtatgatttgttcgacccagctcgacagagctcacggagtgagttcatatgataccgtgataagcagggatatccaggcccctgacggactggctgtggattggatccactccaacatatattggactgatagtgtgctgggaacagtctcagtcgccgataccaagggcgtgaagcgtaagacgctcttcagagagaatggttcaaagcccagagcgatcgtggtagatcccgttcatggtttcatgtattggacagattggggtacccccgcaaaaattaaaaagggggggctgaatggcgtcgacatctattccttggttactgagaatatccagtggccaaatggtattacgttggatctgctgtcaggtcgcctctattgggttgacagtaaactacattctatcagcagcattgacgtcaacgggggcaaccgaaaaacgattctcgaggatgagaaacggctggctcatcctttttccttggccgtgttcgaggacaaggtcttttggaccgacatcatcaacgaagccattttctcggccaataggttgacgggctctgatgtgaaccttctggccgagaatttgctctctcccgaagacatggtgttgttccacaatcttacccagcctcgcggagttaattggtgcgagaggactaccctgtcaaatggtggatgtcagtacctctgcctccctgcaccccagatcaacccccactcgcctaagtttacttgtgcctgccccgacggaatgctcctggcacgggatatgcgaagttgcttaaccgaggcggaagccgccgtggctacacaagagacatccacagtgagactaaaggtgtccagcaccgccgtaaggacccagcatacgacaactcgccccgtgcctgataccagccggctgcccggcgccacacccggcttgacgaccgtggagatcgtcaccatgagccaccaggcactgggcgatgtggcaggcagagggaatgaaaaaaagccttccagcgtgcgggccctgagtatcgtgctgcctattgtcctactggttttcctgtgtttgggagtcttcctcttgtggaaaaactggaggctgaagaacattaattccattaactttgacaatccagtgtatcagaaaaccacagaagacgaagtgcatatttgtcacaatcaggacggttactcttacccctcccgccagatggtgtctttggaagacgatgtggct

SEQ ID NO: 16415 - DNA, 2580 bp, synthetic construct
  misc_feature 1..2580: note = source = /note="Description of Artificial Sequence: Synthetic coding sequence"
  source 1..2580: mol_type = other DNA
atgggtccttggggatggaagctgagatggacagttgcactgcttctggctgcagccggtacagctgttggcgataggtgtgaacgtaacgaattccagtgccaagatggtaagtgtatatcttataaatgggtgtgtgacggaagcgctgagtgccaggatggttccgatgaatcacaagaaacatgtctgtctgttacatgcaagagtggcgacttttcctgtggtggcagagtcaacaggtgcataccccagttctggaggtgcgatggccaggtggattgcgacaacggtagcgacgaacagggttgccctcctaagacatgctctcaggatgagttcaggtgtcatgatggtaagtgcatcagtaggcagttcgtgtgcgacagcgaccgcgactgcttggacggatctgatgaagcttcctgcccagtcctgacatgtggacctgcatcttttcaatgcaactctagtacttgtattcctcagttgtgggcttgtgacaacgaccctgattgcgaggacggatcagacgagtggcctcagagatgcaggggcctctatgtttttcagggagattcttctccctgttccgcctttgagtttcattgtctttctggagagtgtattcatagcagctggagatgtgacggcggtccagactgcaaggacaagtccgacgaagagaactgtgcagttgccacttgccgtcccgacgaattccagtgctccgacggcaactgtatccatggttccaggcaatgcgacagggagtacgactgtaaggatatgtccgacgaggtaggctgtgttaacgtgactctttgtgagggaccaaacaaattcaagtgccacagcggtgagtgtattacactcgacaaggtctgcaacatggcccgtgactgtagggattggagcgacgagcctattaaggagtgtggaaccgcagcttgtctggataacaatggaggttgctctcacgtgtgtaacgccttgaagatcggtgccgagtgcctgtgccccgatggtttccagttggttgctcaaaggagatgcgaggacatcgacgagtgtcaggacccagacacctgctcacaactgtgtgtcaaccttgaaggcggctacaaatgccaatgtgaggagggttttcaactggaccctcacactaaggcttgcaaggccgtcggatccatagcctacctgttttttacaaaccgtcatgaggttaggaagatgactttggatcgctccgaatatacttccctgattcctaatttgcgcaatgtagttgctttggatacagaagtggcttctaaccgtatttattggagcgatctctctcaaaggatgatttgttcaacccagctcgacagggcccacggtgtctctagctacgacaccgtaatatccagggacatccaagccccagacggactcgccgttgactggatccactcaaatatctattggactgactcagtacttggaaccgtctccgtcgctgacacaaagggtgtaaagaggaagactcttttcagggagaatggtagcaaaccaagagcaattgttgttgatccagttcatggtttcatgtactggacagactggggaacccccgctaagattaagaagggtggactgaacggcgtggatatctattcactggtgaccgaaaacatccaatggcccaatggaataaccctcgatctcttgtctggaagactgtattgggtggattctaaactccacagtatttcaagcattgacgtaaatggaggaaataggaagaccattctggaggacgagaagaggttggctcatccattctcactcgccgtctttgaagacaaggtgttctggaccgacatcatcaatgaggccatcttctcagcaaacagactgactggatctgatgtcaacctgttggcagaaaatttgctttctcccgaggatatggtcctgtttcacaatcttactcagccacgtggagtgaactggtgcgaacgtacaactctgagtaatggaggatgccagtacctgtgtctgcctgccccacagattaacccccattcccctaagtttacctgcgcttgtcctgatggtatgctgctggctcgcgatatgcgttcctgcctgaccgaggccgaggccgctgtggcaactcaggaaacctctacagtcagattgaaagtcagttcaaccgccgtaagaacccagcatactactacacgccccgtgcccgacacatctcgcctgcccggtgctacaccaggactcacaactgttgaaatcgtaacaatgagtcaccaagcccttggtgatgttgcaggcagaggcaatgagaagaagccatcctctgtcagagcattgtctattgtcttgccaattgtgctcctggtgtttctttgcctgggagtgtttctcctctggaagaactggagactgaagaacattaactctatcaacttcgacaaccctgtttaccagaaaacaaccgaggacgaagtccacatatgtcacaaccaggatggctatagctacccttcccgccagatggtctctctcgaagacgatgtagcc

SEQ ID NO: 16416 - DNA, 2580 bp, synthetic construct; identical to SEQ ID NO: 16396
  misc_feature 1..2580: note = source = /note="Description of Artificial Sequence: Synthetic coding sequence"
  source 1..2580: mol_type = other DNA

SEQ ID NO: 16417 - DNA, 2580 bp, synthetic construct
  misc_feature 1..2580: note = source = /note="Description of Artificial Sequence: Synthetic coding sequence"
  source 1..2580: mol_type = other DNA
atgggaccttggggatggaaacttcgctggactgtcgccctgctgctggcagctgccggcaccgccgtcggagatcgctgcgagcggaacgagttccaatgccaggatgggaaatgcatcagctacaagtgggtgtgcgacggatcggcagagtgccaggacggttctgacgaaagccaagaaacctgtctgtcggtgacctgcaaatcgggggacttttcctgcggcggacgcgtgaatcggtgtattccacagttttggcgctgcgatggacaggttgattgcgataacggttcagacgaacagggatgccctcccaagacttgcagccaggacgaattcagatgccacgacggaaaatgcatctcacgccagttcgtgtgtgactccgaccgggactgcttggacggatcagacgaagcctcatgtccggtgctgacttgcggaccggccagctttcagtgtaatagctcaacctgtatcccacagctctgggcctgcgacaacgacccggactgcgaggacggatcggacgagtggccgcagcgctgcagaggactctacgtgttccaaggagattcctccccctgctccgcgtttgaattccattgtctctcgggtgaatgtatccacagtagctggaggtgcgacggaggtccagactgcaaggacaaatcagatgaggagaactgcgcagtggcgacctgtcggccagacgaattccagtgtagtgacggcaactgcatccatggctcgcgtcaatgcgacagagaatacgactgcaaggatatgtcggatgaggtcggatgcgtgaatgtcaccttgtgcgaaggccctaacaaattcaagtgccattcaggcgagtgcatcactctggacaaggtctgtaacatggcacgggactgccgggactggtcagatgaaccaatcaaggaatgcggaactgccgcttgtctggataacaatggtggttgttcccacgtgtgtaacgccttgaaaataggtgcggagtgcctgtgcccggacggtttccaattggtggcccaacgccggtgcgaagatatcgacgagtgtcaggatccggatacctgctcgcagttgtgcgtgaatctggaaggcgggtacaagtgccaatgcgaagaaggattccagctggacccgcacaccaaagcctgcaaagccgtggggtccatcgcctacctgttcttcaccaatcggcacgaggtgcgcaaaatgactttggacaggtcggaatacacttcattgatccccaatctccggaatgtggtggcacttgacactgaagtcgctagcaatcggatttactggtcagacctgtcgcagcggatgatctgctcgactcagcttgaccgcgcacatggggttagctcctacgacaccgtgatcagccgggatattcaggcccccgacggtctggccgtggactggatccactctaacatctactggacggacagcgtgctcggtactgtgagcgtcgctgacaccaagggagtgaagcgcaagaccctgtttcgcgaaaacggatccaagccgcgggcaatcgtggtggaccctgtgcacggattcatgtactggaccgattggggaaccccagccaagatcaaaaagggcggcctgaacggcgtggacatatactccctggtgaccgagaacatccaatggcccaacggaatcactttggacctgctcagcggacgcctctactgggtcgactcaaaactccactcgatttcatccattgatgttaatggtggaaacaggaaaactatcctcgaagatgagaagcggctggcccacccgttctcgctcgctgtgttcgaggacaaggtattttggaccgacatcattaacgaagcgattttctccgccaaccggctgaccggaagcgatgtgaaccttctggcggaaaacctgctcagcccggaagatatggtgctcttccataacttgactcagccgaggggggtgaactggtgtgaaagaaccactttgtccaacggaggctgccagtatctgtgcctgccggccccccagatcaacccgcactccccgaagttcacgtgcgcctgccctgatggcatgctcctcgcccgcgacatgcgctcgtgtcttactgaggccgaagccgccgtggcgacccaggagactagcactgtgaggctgaaagtgtccagcactgcggtccggactcaacataccaccacccgccctgtccccgataccagccgcctgcccggagccacgcccggactgaccactgttgagatcgtcactatgtcgcaccaggctctcggagacgtggcgggacgcggcaacgaaaagaagcctagctccgtgcgcgctctgagcattgtgctgccaattgtgctgctggttttcctgtgccttggagtctttctgctctggaagaattggcggctgaagaacatcaattcgatcaatttcgacaaccccgtgtaccagaaaaccacggaagatgaggtccatatctgtcataatcaggacggctactcctacccgtcccggcagatggtcagcctggaagatgatgtcgcc

SEQ ID NO: 16418 - DNA, 2580 bp, synthetic construct
  misc_feature 1..2580: note = source = /note="Description of Artificial Sequence: Synthetic coding sequence"
  source 1..2580: mol_type = other DNA
atgggtccttggggttggaagctccggtggactgtggcactgctgctcgccgccgcgggcactgccgtgggtgacaggtgtgaacgcaacgagttccaatgtcaggatggtaaatgcatttcctacaagtgggtctgcgatgggagcgctgagtgtcaagacggatccgacgagtctcaagagacttgtctttctgtgacttgtaagtccggtgatttttcgtgtggcggccgtgtgaatcgctgtatccctcaattctggcgatgtgacggacaggtcgactgtgataatggatcggatgaacaaggatgcccccctaagacctgttcgcaggacgagtttcgatgccatgatggtaagtgcatctcccgccagtttgtgtgtgacagcgaccgggattgtcttgacggttccgatgaggcatcctgcccagtgctcacctgcggccctgcctcgtttcagtgtaactcaagcacctgtatcccacagctctgggcatgcgataacgaccccgattgtgaggacggaagcgatgagtggccgcagaggtgtagaggtctttacgtgttccaaggagattccagcccgtgttcggcatttgaattccactgtctctcgggggaatgtattcattcgtcctggaggtgcgatggcggtcctgattgcaaagataagtcagatgaagagaactgcgcagtggcaacttgtcggccagatgaattccaatgttccgatggaaattgtatccatggctcccggcagtgtgaccgtgaatacgattgtaaggatatgtccgacgaagttggatgcgtcaacgtgactctttgtgaaggtccgaacaagtttaagtgtcatagcggggagtgcattaccctcgataaggtctgtaatatggcacgcgattgtagagattggtcggatgaacctattaaggagtgcggaaccgctgcttgcctcgataacaatggtggttgtagccatgtctgcaacgcccttaagatcggagccgaatgcctgtgcccagacggattccagctggtggcccagcggcgctgcgaagatatcgatgaatgtcaagatccagatacttgttcgcagctgtgtgtcaaccttgagggagggtacaagtgtcagtgtgaggaaggctttcaactggatccgcacaccaaagcctgcaaagccgtgggctcaatagcatacctgtttttcactaaccgccacgaggtgcggaaaatgaccctggatcggagcgagtacacttcgctgatccctaacctgcggaatgtcgtcgcccttgatactgaggtcgcaagcaacaggatttactggtctgatctctctcagcgtatgatatgttccactcaactcgatcgagcacatggagtgtcctcctacgatactgtcataagccgcgatatccaagcacccgatgggctggcagtagactggatccattcgaacatatactggaccgacagcgtgcttgggaccgtctcagttgccgatactaagggcgtcaagcggaaaactctttttagagaaaatggctcaaagccacgcgcaatcgtggtggatcctgtgcatgggttcatgtactggacggactggggcactccagctaagattaagaaaggcgggctcaacggagttgacatctatagccttgtcactgaaaacattcagtggccaaacgggattacgctcgacctgctcagcggtcggctgtactgggtggatagcaaactccactcgatttcctcgattgatgtgaacggtggcaaccgcaagacgattctggaggacgaaaagcggctggcccaccctttttccctcgcagtgtttgaggacaaggtgttctggaccgatatcataaacgaagcgatattctcggcgaacagattgactggctccgacgtgaatctcttggccgagaatctcctttcaccagaggacatggtgctgtttcataaccttacccaaccaaggggagtgaattggtgtgaacgaactactctttccaacggtggttgccagtatttgtgccttccagcccctcagataaatcctcattcgccaaagtttacttgcgcatgccctgacggaatgctgctggcaagagatatgcggagctgtcttaccgaagccgaagctgcagtggcaacccaagaaacctcaaccgtgcgcctgaaagtctcaagcaccgcggtcaggacgcaacataccaccactcgacctgtcccagataccagcagactgccgggcgcaactcctggcctcaccaccgtcgagattgttaccatgtctcatcaagccctcggcgatgtcgcaggtcggggcaacgagaagaaaccatcctcggtccgcgccctttccattgtcctgcccatcgtgctgctggtgtttttgtgtttgggtgtgtttctgctttggaagaattggcgtctgaagaacattaactcgatcaattttgataaccccgtgtaccaaaagaccacggaagatgaagttcacatctgccataaccaagacggttactcgtacccgagccgtcaaatggtcagcttggaagatgatgtggca

SEQ ID NO: 16419 - DNA, 2580 bp, synthetic construct
  misc_feature 1..2580: note = source = /note="Description of Artificial Sequence: Synthetic coding sequence"
  source 1..2580: mol_type = other DNA
atgggcccgtggggttggaagctacggtggaccgtagcgctgctcctggcagcggctggaacagctgtgggggatagatgcgagcgaaatgaatttcagtgtcaagacgggaagtgcattagctacaagtgggtgtgcgacggctcagcggagtgccaggacgggtcggatgaaagtcaggagacatgcctatccgttacatgtaaaagcggtgatttctcatgcggcgggcgcgtgaatagatgtatccctcagttttggcgctgtgacggccaggttgactgtgacaatggatccgacgagcaggggtgtcccccaaaaacgtgcagtcaggatgaatttcggtgccatgacggcaaatgcattagtcgccagtttgtttgtgactcagatagagactgtcttgacggctcagacgaggcatcttgccctgtactgacttgtggcccagcgagtttccagtgtaattcctcaacttgtatcccgcagctgtgggcctgtgataatgatccagactgcgaggacggatccgatgagtggccacagagatgtcgtgggctgtacgtttttcaaggagacagttcaccttgcagcgcctttgagttccactgcctgtcaggcgaatgcattcactcctcctggagatgcgacgggggtccggactgcaaagataagagcgacgaggaaaattgcgctgtggccacttgccggcccgacgagtttcagtgctcagatggaaattgcatccacgggtcccgccagtgtgatagagaatatgattgcaaggacatgtccgacgaggtaggatgtgttaacgttaccctgtgcgaaggcccaaacaaatttaagtgccacagtggggagtgtattactctggacaaagtgtgcaatatggcgcgggactgccgagattggtccgatgagccaattaaggagtgtggaaccgcggcttgcctggataataatgggggatgctcccatgtctgtaatgctctgaaaatcggagctgaatgcttgtgcccagacggctttcagcttgtggcccagcggaggtgtgaggatatcgatgaatgtcaggaccctgatacctgttctcaactctgcgttaacttagaagggggctataagtgccagtgtgaagagggcttccagttagatccacacactaaagcctgcaaggccgtgggctccatcgcttatttgttcttcacaaacagacacgaagtgcgcaaaatgacattagatcggtctgaatacacttctctgattcccaatctgagaaatgtcgtggctctcgatacagaggtggcctctaatcggatatactggagcgatcttagccagagaatgatatgttccacacagctcgatagagcccacggcgtgagcagctatgatactgtaatctctcgcgatatccaagctcccgacggacttgctgttgactggatccactctaatatatactggactgatagcgtcctgggaaccgtaagcgtggccgatactaagggcgtcaagcgtaagacactctttcgcgaaaatggctctaaaccacgggcaatcgtggtagatcctgtacacggcttcatgtactggactgactgggggaccccagcaaagatcaagaagggggggctgaacggtgtagacatctatagtcttgtgacagaaaatattcagtggccgaacggcatcacattggacttgctgtctggtcgcctgtattgggtggatagcaagctgcactctatctcctcgattgacgtcaacggaggtaatcgcaagacgatcctggaggatgaaaagaggttagcgcatcccttctccctggcagtcttcgaagacaaggtcttttggacagacatcatcaacgaagcgattttctctgctaacagacttaccggctcagacgtgaacctgctggccgagaacctgctgtcacccgaggatatggtgctatttcacaatctgacgcagccaagaggcgttaactggtgcgaacgaaccacgttgtctaatggcggctgccagtacttatgcctccctgccccacagattaatcctcatagcccaaaatttacatgcgcctgccccgatggcatgctgctcgctcgggacatgaggtcatgcctaacagaagccgaagctgcggtcgccactcaagagacttctaccgttaggcttaaggtctcctcaacggcagtacgaacacagcacactactactcgccctgtccctgacaccagtaggttgcccggcgccacgccgggactgactacggtggaaatcgttaccatgtcacaccaggccctgggcgacgtggccgggaggggaaatgagaaaaagccatcctccgtgcgtgcactgtcaatagtgttgccaattgtgctcctggtgtttctttgcctgggcgtatttctgctctggaaaaattggagactcaagaacatcaactcaattaactttgacaacccggtctaccagaagaccaccgaagatgaggtccatatctgtcacaatcaggacgggtactcctatccttcaagacagatggtgtcactcgaggacgatgtagcc

SEQ ID NO: 16420 - DNA, 2580 bp, synthetic construct
  misc_feature 1..2580: note = source = /note="Description of Artificial Sequence: Synthetic coding sequence"
  source 1..2580: mol_type = other DNA
atgggaccttggggatggaaacttagatggacagtcgcactacttttggctgcagctggaacagcagttggagacaggtgcgagagaaacgagttccagtgtcaggacggaaaatgtatcagctacaaatgggtatgcgacggatccgctgaatgccaagacggatccgacgaatcccaagagacatgtctaagtgtaacatgcaaatccggagatttttcatgtggaggacgtgtaaatagatgtatccctcaattctggagatgtgatgggcaagtggattgtgataatggctccgatgaacagggttgtccacccaaaacctgttctcaagatgaattcaggtgtcacgacggcaagtgtatttcaaggcagttcgtttgcgactcagatagggattgcttggatggctctgatgaggcttcttgtcctgttttgacttgcggtcctgcctcatttcaatgtaactcttcgacctgcatcccacagctttgggcgtgcgacaacgacccagattgcgaggacggctctgatgaatggcctcaaagatgcaggggcttgtacgtttttcaaggggatagttctccttgcagcgctttcgagtttcattgccttagtggggaatgcatacattcctcctggagatgcgatggagggccggactgtaaagacaagtcagatgaagaaaactgcgccgttgccacttgccgacctgatgagttccagtgttcggacggaaactgcattcatggttcacgccagtgcgatagagagtacgattgcaaggatatgtccgacgaggtgggatgcgtcaacgttaccttgtgtgaggggccaaataaattcaagtgtcactctggcgagtgtataaccctcgataaggtgtgcaatatggcgcgtgattgtagggattggtcggatgaacccatcaaggaatgtggaacagctgcatgtcttgacaacaacggagggtgctcccatgtgtgtaacgcactaaagattggagcagaatgcttgtgccctgatggtttccaattggtggcacagagacgatgcgaagacatcgatgaatgtcaggatcctgacacatgctcccaactctgcgtgaatttggaaggaggttacaagtgtcaatgcgaagaaggtttccaactagatcctcatactaaggcatgtaaggctgtaggctcgatcgcatatttgtttttcactaacaggcatgaagtgcggaaaatgacattggataggtctgagtataccagtctgattcctaacttaagaaatgttgttgctcttgacacggaggttgctagtaatagaatttattggtcagatctttcacaaaggatgatatgttctacacaattggatagagcacatggtgtctcctcctatgacactgtgattagtagggacatccaagcgccagatggattagctgttgactggatccattccaatatatattggacagacagcgtattgggtacagtttcggttgcagacaccaagggtgtcaaacgtaaaactctcttcagagagaatggctccaaaccaagagcgatcgtggtagatcctgtccatgggtttatgtattggacggattggggaacacctgcgaaaattaaaaagggaggtctaaatggagttgatatctatagtctcgtcactgagaacattcaatggccgaacggaattactttggacttgttgtccggcagattatattgggtcgattctaagttgcatagcatttcatctatcgatgtgaacggaggaaaccgaaagaccatattggaagatgagaagagactggctcaccctttttctttggcagtcttcgaggacaaggtcttttggactgatataatcaatgaagcaattttctcagcaaatcgtttaacaggaagcgacgttaatctccttgcagagaaccttctctctcctgaagacatggttcttttccataatttgacgcagcctcgtggtgttaattggtgtgagcgaactactttgtcaaacggagggtgtcaatatttgtgtctacccgctcctcaaattaaccctcactctcccaagttcacctgtgcctgtcccgatggcatgttgcttgctagagatatgaggtcatgcttgactgaagctgaagctgctgtcgctactcaggaaacttcaacggtgcgcttgaaggtgagttcgacagccgttaggacgcaacatactactaccagaccggtgcctgatacctcgagattgccgggagctacaccaggactgaccactgttgaaatcgttacaatgagtcatcaagcactcggtgatgttgcaggtaggggtaacgagaagaaaccatcctcagtgcgcgctttgagtatcgtgctaccgattgttttgctggtgtttctctgcctaggagttttccttctctggaaaaattggaggcttaagaacataaattctataaatttcgataatcctgtctaccaaaaaactaccgaggatgaggtgcatatctgccacaaccaagacggttacagctatccgtcccgacagatggtttctttggaggacgacgtggct

SEQ ID NO: 16421 - DNA, 2580 bp, synthetic construct
  misc_feature 1..2580: note = source = /note="Description of Artificial Sequence: Synthetic coding sequence"
  source 1..2580: mol_type = other DNA
atggggccttggggctggaagctgcgatggactgtggctctcctcctcgccgctgctggcacggctgtgggagataggtgtgaacgaaatgagtttcaatgtcaagacggaaagtgtatctcctacaagtgggtttgcgacggctcagccgaatgccaagacggctccgacgagagccaggaaacctgcctgtcagtgacgtgcaaaagtggcgatttttcctgtggtgggcgggtgaataggtgtatccctcagttttggcgctgtgacggccaggtggattgcgacaacggtagcgacgaacagggatgcccccccaagacatgtagtcaagacgaatttcgatgtcacgacggaaaatgtatctcaagacagtttgtttgtgattcagaccgcgactgtttggatggatctgacgaggccagttgtcccgttctgacctgcgggcctgcgagttttcagtgtaatagctctacttgtatccctcagctttgggcttgcgacaacgatcctgattgtgaagacggaagtgacgagtggccgcaaagatgtcggggcctctatgtgttccaaggagatagcagtccctgttccgcctttgaattccattgcctgtccggcgagtgcatccatagctcatggcggtgtgatggtggccctgactgcaaagacaaaagcgacgaggagaattgcgctgtggccacctgcagaccagacgagttccaatgctctgatggcaactgcatccatgggtctagacagtgtgatagagaatacgattgcaaggatatgtcagacgaggtggggtgtgtgaatgtaacactgtgtgaaggaccaaataagtttaaatgtcactctggtgaatgtattaccctggacaaagtgtgtaacatggctagggactgccgtgactggagtgatgaacccataaaggagtgtgggacggcagcttgtcttgacaacaacgggggctgctctcacgtctgcaacgcgctcaaaatcggagccgaatgtctgtgccctgatggcttccagctggtggcgcaacggcgttgtgaagacatcgatgagtgtcaggatcccgatacttgttcacagctttgtgtgaacctcgaggggggctacaagtgccagtgtgaagaaggtttccagctggacccccatactaaggcttgcaaggccgtgggctccatcgcatacctctttttcaccaatcgccacgaggtgaggaagatgaccctggaccgaagcgagtacacttcactcataccgaacctgaggaacgtagtggcgctggatacggaggttgctagtaaccgcatttactggagcgaccttagccagaggatgatatgttccacgcaactggacagagcacacggggtgtcctcctacgataccgtgataagccgagacatccaagctcctgacggtctggccgtcgactggatccattctaatatttattggaccgattcagttctggggacagtctcagtggcagatacaaagggtgttaagcggaagaccctatttcgcgaaaatggatctaagccccgggcgatagttgttgacccggtgcatgggtttatgtattggacggattgggggaccccagcaaagatcaagaaaggcgggctgaatggtgtggacatttactccctggttacagagaacattcagtggcccaacggaataaccctagacttactgtccgggcggctgtattgggtggattctaagctacacagcatcagtagcatcgacgttaatggaggcaacaggaagactatactggaagatgaaaagcgactcgcgcaccctttctccctcgccgtctttgaggacaaagtgttttggaccgatattatcaacgaagctatcttcagtgcaaatcgtctgacgggatctgacgtgaatctgttagctgagaacctactgtctcccgaggacatggtgctgttccacaatctcacacaacctagaggagtgaactggtgtgagcgcactactctttcgaatggcggttgtcagtacctgtgcctgccggctccccagattaaccctcattcgccgaagtttacgtgtgcctgcccagatggaatgttgttagcgagggatatgcggagctgcttgacagaagctgaggctgccgtggctacccaggaaacatccacagtacggctgaaagtaagctcaacggccgtgaggactcaacacaccaccactcggcctgttcctgacacatccaggcttccgggcgccactcctgggttgaccacagtggagatagtcactatgagccatcaggccctgggcgatgtggcaggaagaggtaacgagaaaaagccatccagcgtcagagctcttagcatcgttctcccaatagtgctcctagtgttcctctgcttgggcgtgttccttctgtggaaaaactggaggctcaagaatattaacagcattaattttgacaatccagtgtaccagaagacaacagaggatgaggtccatatctgccacaatcaggacggctacagttatccttccaggcagatggtctctttagaggatgatgtcgcg

SEQ ID NO: 16422 - DNA, 2580 bp, synthetic construct
  misc_feature 1..2580: note = source = /note="Description of Artificial Sequence: Synthetic coding sequence"
  source 1..2580: mol_type = other DNA
atgggaccttgggggtggaaactcaggtggaccgtggcactcctactggcagcggctggtacggctgtcggggacaggtgtgagcgcaacgagttccagtgccaggatgggaagtgtatttcatacaagtgggtctgcgacggtagcgcagaatgccaagacggctctgacgagtctcaggagacctgtcttagtgtcacttgcaagtcaggcgatttttcctgcggaggaagagtgaacaggtgcattccacaattctggagatgtgacggccaagtagactgcgacaatggcagcgacgaacagggctgccccccaaagacctgttcgcaggatgagttccgctgccacgacggaaagtgtatctcccggcagttcgtgtgcgattccgatagggattgtttggatggtagcgacgaggctagctgccccgtgttgacctgcggacccgcctcatttcaatgtaactcatccacttgcattccgcagttgtgggcctgtgacaacgacccagactgcgaggacggttcagacgagtggcctcaaaggtgcagagggctgtatgtgttccagggcgatagcagtccttgttccgcattcgaattccattgcctcagcggcgaatgtatccattcgagctggcggtgtgacgggggtccggattgcaaggataaatctgacgaagagaactgtgcggtggctacttgtcgtcctgatgaatttcaatgcagtgatgggaactgtatccacgggtctcgccagtgtgaccgagaatacgactgcaaggacatgtccgacgaggtgggatgcgtaaatgtgacactctgtgagggccctaacaagtttaagtgccacagcggagagtgtatcaccttagacaaggtatgtaacatggccagagattgcagagattggtccgacgaacctattaaggagtgcggtacggctgcctgcctcgacaacaacggcgggtgttcccatgtctgcaacgccctcaagataggagccgagtgcctgtgccccgacggatttcagttagtggcccagcgtcgatgtgaggacatcgatgagtgccaggaccctgatacctgttcccagctctgtgttaacctggagggtggctataaatgccagtgtgaagagggcttccagctggatccacatacgaaggcctgcaaggccgtgggatcaatcgcgtacctgttctttaccaaccgacacgaggtccgtaagatgactctcgatagaagtgaatacacttctctgattcctaacctgaggaatgtggtggcactcgataccgaggtcgcatctaacagaatctactggagcgacctgtctcagcgtatgatttgttcaacccagttggaccgagcccatggcgttagtagttacgacactgtgatctccagagacatccaggcccctgacgggctcgccgtagattggattcattctaatatttattggaccgactctgtgctggggactgtgagcgtagctgataccaagggggtgaagagaaaaaccctgtttcgagagaatggctccaaaccccgggccattgtagtggacccagtgcacggctttatgtactggactgactggggaacaccagccaaaatcaaaaaaggtggattgaacggagttgatatctattccctcgtcacggagaacatccagtggccgaacggcatcacactcgatctgctgagcggtcggctctactgggtggacagtaagctgcatagcatcagtagtattgatgtgaacggtgggaacaggaagactattttagaggacgagaagaggttggcacatcccttctcccttgcagtgttcgaagataaagtcttttggacagacatcatcaacgaggccattttctccgccaaccggttgaccgggtccgatgtgaacctcctcgccgaaaatctactcagtcccgaggacatggtactgttccacaatctgacccagcctagaggggtgaactggtgcgagaggactacgctgtccaatgggggctgccagtacctgtgcctgcccgctccccagattaatcctcattccccaaagttcacctgtgcgtgcccagatggcatgctactcgccagagacatgagatcttgtttgactgaagcagaagccgccgtggccacgcaggaaaccagcacagtgcgcctgaaagtctcaagtactgccgtgaggactcagcataccacgacccggccggtgccagatacaagtcgtttgcctggtgccacccctgggctcacgaccgtcgaaatcgttaccatgagtcaccaggcactgggagatgtcgcaggaagagggaacgagaagaagcccagtagtgtccgggctttgtcgatcgtgcttccgatcgtattattggttttcctgtgtcttggagtcttcctcctgtggaagaactggcggttaaagaacatcaactccatcaattttgataaccctgtgtatcagaaaactactgaagatgaggtgcacatatgccataaccaagacggatatagctatccctctcggcaaatggtctcccttgaagatgatgtcgcc

SEQ ID NO: 16423 - DNA, 2580 bp, synthetic construct
  misc_feature 1..2580: note = source = /note="Description of Artificial Sequence: Synthetic coding sequence"
  source 1..2580: mol_type = other DNA
atgggcccttggggctggaaactgcgctggactgttgccctgctgctcgccgcggctggtaccgccgttggcgatagatgtgaaaggaacgaatttcaatgccaggatggcaaatgtatttcttacaagtgggtgtgcgatggatcagcggagtgtcaggacggctcagatgagtctcaggagacgtgtctgtcagtgacctgcaagtccggagatttcagttgcggaggaagagtcaatagatgtatcccgcaattttggaggtgtgatggtcaggtagattgcgataacggctctgacgagcaaggatgtccccctaagacgtgtagccaggacgagtttagatgccatgacggaaagtgcattagcagacaatttgtgtgcgattccgatagggactgtctcgacggatcagatgaagcgtcttgccccgtcctgacgtgtggtccggctagcttccaatgcaacagtagtacatgcatcccccaactctgggcttgcgataacgatcctgactgcgaagacggctccgacgaatggccacagaggtgcagaggactgtatgtattccagggagactcaagcccgtgcagcgcatttgagtttcactgcctgtccggtgagtgcatccacagtagctggcgctgtgatggaggtcctgactgtaaggacaagagcgatgaagagaactgcgcggtcgccacctgtagacctgatgaattccaatgctctgacggcaactgtatccatggttctcgccagtgcgatcgcgaatatgactgtaaagatatgagcgatgaagttggctgcgtaaacgtcactctctgtgaaggtcctaacaagttcaaatgccacagcggtgagtgcattactctcgataaggtatgtaatatggcaagggattgcagagactggtcagatgagcccataaaggaatgtggaaccgcagcttgtcttgataacaacggcggatgctcacatgtttgcaacgctctgaagatcggcgctgagtgcctttgccccgatggattccagctcgtagcacagaggagatgcgaagacatagacgagtgtcaagaccctgatacctgtagtcaactgtgtgtaaacctcgaaggtggttacaaatgccaatgcgaggagggcttccaactggacccacacaccaaagcgtgtaaagctgtcggatctatcgcttacctgttcttcaccaatagacatgaagtaaggaaaatgacactggacagaagtgagtacacctcccttataccaaatctccgcaacgtcgtagcccttgacaccgaagtggcgtctaatagaatctattggtccgacctgagccaacgcatgatctgctccacccaactggatcgcgcccacggagtttcctcctacgatactgtgatctctagggacatacaggctcctgacggccttgcagtcgactggatccactccaacatctattggactgactctgtattgggcacagtgtctgtggcggatacgaagggagtcaagagaaaaaccttgttccgcgagaacggatccaagccccgcgctattgtggtggatcccgtgcacggtttcatgtattggactgattggggcacacccgccaaaataaaaaaaggaggccttaatggtgtggacatctatagcttggtgacggaaaacatccaatggcctaacggaataactctggatctcctgagcggcagactgtattgggtggattctaaactgcactcaatatcttccatcgatgtgaacggaggcaaccgcaagactatcttggaggacgaaaaaagactggcacatccttttagcttggccgtgttcgaagacaaagttttctggaccgatatcatcaacgaggcaatcttctctgcaaacaggttgaccggatccgatgtgaatctcttggctgagaaccttcttagtccagaagacatggtattgtttcacaatctcacccagcccagaggtgtcaactggtgtgagaggacgacactctctaatggtggttgccagtacctgtgtcttcccgcgccacagattaacccccattcccccaagttcacgtgtgcttgccccgatggtatgctccttgctagggatatgcgctcctgcttgacagaggccgaggctgccgtggctacccaggaaacatccacggttcgcctcaaggtgtcctctacagctgtgaggacccaacacaccaccacgcgccctgtacccgacacatcaagattgccaggtgcgactcccggactcaccaccgtggagatagtgaccatgtcacaccaggcccttggagacgttgccggtaggggaaacgagaagaaaccatcctctgttagggccctctcaatagtgctgcccatagttcttcttgtcttcctgtgtctcggcgtgttcctgctgtggaagaactggaggcttaagaacattaactccatcaattttgacaaccccgtgtaccaaaagaccaccgaagacgaagtgcacatctgccataaccaggacggatattcttatccctccaggcaaatggtttctctggaggatgacgtggcg

SEQ ID NO: 16424 - DNA, 2580 bp, synthetic construct
  misc_feature 1..2580: note = source = /note="Description of Artificial Sequence: Synthetic coding sequence"
  source 1..2580: mol_type = other DNA
atgggtccatggggctggaagctgagatggaccgtggcccttctcctcgccgccgctggtacagctgtcggagaccggtgtgagcgaaatgagttccagtgccaagacggcaagtgtattagttacaagtgggtgtgtgacggatcagcagagtgtcaagatgggtctgatgagtcacaggagacctgtctgtccgtcacatgtaaatccggggacttctcatgcggagggcgcgttaatcggtgtatcccacagttctggaggtgtgacggccaggtcgactgtgataacgggagtgatgagcaggggtgtccccccaagacatgctctcaggacgagtttcggtgtcacgacggtaagtgtatctccaggcagttcgtgtgtgattccgatcgggactgcctggacggttctgatgaggcatcttgcccagttctcacctgtggcccagcttcctttcaatgtaattctagtacttgcatcccgcagctgtgggcatgcgataatgaccctgattgtgaagacggttctgatgagtggccccagaggtgccgcggactgtacgttttccaaggcgatagctcaccttgcagtgcattcgaatttcactgtctcagcggggaatgcatccactcctcctggcgctgcgacggcgggcccgactgcaaggacaaaagcgatgaagagaactgtgcggtggcaacctgtcggcctgatgagttccagtgcagcgatggtaattgcattcacggcagccgccagtgcgatcgcgaatatgattgtaaggatatgagcgacgaggtcgggtgtgtgaacgttacactgtgtgaggggcctaacaaattcaaatgtcacagcggagaatgcattacactggacaaagtgtgtaacatggcacgggattgtcgggactggtccgacgaacctatcaaggagtgcgggaccgccgcctgtttggacaataacggcggctgcagccatgtttgtaacgccctcaagattggggcggaatgtctttgtcccgacggctttcagttggtggcccaaagacggtgtgaagacatcgatgaatgccaagaccccgacacttgttctcagttgtgtgtgaacctggagggcggctataagtgtcagtgcgaggaaggattccagttggacccacacaccaaggcctgcaaagcagtcgggtctatcgcctacctgttctttaccaacaggcacgaggtcaggaaaatgacccttgaccggtctgagtacacgtctctgatccctaacttgaggaatgtggtggcgctggatacggaagtggcttccaatcggatttactggtccgacctgtcccagaggatgatctgcagtactcaacttgaccgcgcccacggggtcagttcatatgacaccgtaatctctcgggacattcaggctcctgatggacttgccgtagactggatccattctaatatttattggacagactccgtactgggcaccgtcagcgtggctgacaccaagggcgtgaaacggaaaaccctgttccgggaaaatggttcaaagcccagagcaatcgtagttgaccctgtacatgggtttatgtactggaccgactggggaactccggctaagatcaagaaaggaggtctgaatggagtggacatatatagtctggtcacggagaacattcagtggccgaatgggatcacactggaccttctgagcggaaggctgtactgggtcgattcaaagctgcattcaattagctctatcgacgtcaacggcggaaaccggaaaaccatcttggaagacgagaaaaggctggcccacccctttagcctggccgtctttgaggataaggtgttttggactgatatcatcaatgaggctatttttagcgccaaccgcctgacaggcagcgatgtgaaccttcttgcagagaacctgctgtccccagaagacatggtcctcttccataacctgactcagccgcgcggcgtgaactggtgtgaacgaacaaccctgtccaacggcggttgtcaatacctgtgcctgcctgctccacagatcaacccgcacagccctaagtttacctgtgcctgtcctgacggcatgttgctggctcgggatatgcggagctgcttgacagaagcagaagcagccgtggccacccaggagacctctactgttcggttgaaggtgtctagtactgccgtaaggacccaacacacgaccacccgcccagtgcccgatacaagtcggctccctggggccacaccaggactcactacagtcgagattgttaccatgtcccaccaggccctcggcgacgtggcggggaggggtaatgaaaagaaacctagttccgtgagagcactgagcatagtgctccctatcgttctgttggtattcctgtgcctcggtgtgtttcttctctggaagaactggcggctcaagaacatcaacagtatcaatttcgacaaccctgtgtaccagaagacaactgaggacgaggtgcacatctgccacaatcaggacgggtacagttatccaagtcgccagatggtctcactcgaagacgacgtagcc

SEQ ID NO: 16425 - DNA, 2580 bp, synthetic construct
  misc_feature 1..2580: note = source = /note="Description of Artificial Sequence: Synthetic coding sequence"
  source 1..2580: mol_type = other DNA
atggggccgtggggttggaagttgaggtggaccgtcgcgcttctgctggctgcggcaggaaccgcagtgggcgacagatgcgagcgcaacgaattccagtgccaggatggaaaatgcatttcatacaaatgggtgtgtgacggctcggcagaatgccaagacggttcagacgagtcacaagaaacctgtctgagcgtcacgtgtaagtccggggatttctcatgcggagggagagtgaaccgctgcattccgcagttctggcgctgcgacggccaggttgattgcgacaatggatcggacgagcaaggatgtccgccaaaaacctgctcacaggatgagttccggtgccatgacggaaagtgcatcagcagacagttcgtctgcgattccgacagagattgcctcgatggttcggatgaagcctcctgcccagtgcttacctgtggacccgcgtccttccagtgcaattcgtccacttgcatccctcagttgtgggcctgtgacaatgatccagactgtgaagatgggtccgacgaatggccgcaacggtgcaggggactgtacgtctttcagggcgattctagcccgtgtagcgcctttgaatttcactgcctgtccggagagtgcatccattcatcatggaggtgtgatgggggtccggactgtaaggataagagcgacgaagagaactgcgccgtggccacttgtcggccggatgagttccaatgttctgatggaaattgcatccatggttctcgccaatgcgatcgggaatacgactgcaaagacatgagcgatgaagtggggtgcgtgaacgtgaccctgtgcgagggcccgaataagtttaagtgccacagtggtgaatgtataactttggataaggtctgcaacatggccagggactgcagagattggtcggatgagccgattaaggagtgcggcactgcagcctgtttggataacaatggcggatgctcacacgtgtgcaacgcgcttaagatcggagccgagtgcctgtgcccagatgggttccagctcgtggcccagcgcaggtgcgaggatattgatgagtgccaggacccggatacttgctcccagctgtgcgtcaacctggaaggcggttacaagtgtcagtgtgaagagggatttcagctggaccctcacactaaagcctgcaaggccgtcggttcaatagcttacctgttcttcaccaaccggcatgaagtgagaaagatgaccctggatagatcagaatataccagcctgatccccaacctgcgaaacgttgtggccctcgacactgaggtggcgagcaaccggatctactggtcagacctgtcgcagagaatgatttgtagcacccaacttgacagagcgcacggagtgtcctcctacgacacggtgatctcgcgggacatccaggcgcccgacggacttgctgtcgactggatccactccaatatctactggactgattccgtgctcggaacggtgtccgtggcagacactaagggcgtgaaacggaaaaccctgttccgggaaaacggaagtaagcctcgggctatcgtggtggacccggtgcacggatttatgtactggactgactggggaactccggccaagatcaagaagggaggccttaacggcgtggacatttactcactggtcactgagaacatccagtggcccaacgggatcactctggacctcctgtccggccggttgtattgggtggattcgaaactgcattcgatctcctcgattgatgtgaacgggggtaatcggaaaaccatcctggaggacgagaaacgccttgcccatcccttctccttggcagtgttcgaggacaaagttttctggaccgatatcatcaacgaggccatcttctccgcaaacagactgaccggttcggacgtgaacttgctcgccgagaatctcctgtccccggaggacatggtgctgtttcataacctgactcagccccgcggagttaattggtgcgaacgcaccaccttgagcaacggaggctgtcagtacctgtgcctgcctgcaccacaaatcaacccgcattcccccaagttcacttgcgcctgcccagatggcatgctgctggctcgcgacatgcgctcgtgcctgacggaggctgaggcggctgttgcaacccaggaaactagcactgtgagattgaaggttagctctacggccgtgcgcacccagcatactactacccgcccagtgccagacacttcccgcctgcctggagcaaccccaggactcactaccgtggaaattgtgactatgtcacaccaagcccttggggacgtggccggcaggggaaacgaaaagaaacccagctccgtcagggcgctgtcgatcgtattgccgatcgtgctgctcgtgttcctctgtcttggtgtgttcctgctctggaagaattggcgcctgaagaatatcaactccattaacttcgacaatccagtgtaccagaaaaccactgaagatgaagttcacatttgtcataaccaagatggatactcgtacccgtcccggcagatggtgtctttggaggacgatgtggct

SEQ ID NO: 16426 - DNA, 2580 bp, synthetic construct
  misc_feature 1..2580: note = source = /note="Description of Artificial Sequence: Synthetic coding sequence"
  source 1..2580: mol_type = other DNA
atgggaccttggggatggaagctgcggtggaccgtggctctcctgctcgcggcggccggaaccgcagtgggcgaccggtgcgaacggaacgaattccagtgccaggatggaaagtgtatctcctacaaatgggtttgcgatggatccgccgaatgccaggacggcagcgatgaatcccaggaaacttgcctcagcgtcacttgcaagtcgggcgacttttcctgtggtggacgcgtgaaccggtgtattccacagttctggagatgtgatggacaggtggactgtgacaacggatccgacgaacagggatgcccgcctaagacgtgctcccaagacgagttcagatgccacgatgggaagtgtatctctcggcaattcgtttgtgacagcgaccgcgactgcctggatggaagcgatgaggcctcttgccctgtgctcacgtgcggcccggcgtcgttccagtgcaattcttcaacctgtatcccgcaactctgggcatgtgacaacgaccccgactgcgaggacggctcggatgagtggcctcagaggtgccggggactgtacgtttttcaaggtgactcgtccccatgctcagctttcgagttccactgcctctcgggagagtgcatccattcgtcctggcgctgtgatggaggaccggactgcaaagataagtcagatgaggaaaattgcgcagtggctacgtgtagaccggacgagttccaatgcagcgacgggaactgcattcatggctcgcggcagtgcgaccgtgaatacgactgcaaggacatgagcgacgaagtgggatgcgtcaatgttaccctctgcgaaggcccgaacaagttcaagtgtcactctggagaatgcatcaccttggacaaggtgtgcaacatggcacgcgattgcagggactggtccgatgaaccaatcaaagaatgtggtaccgcagcatgtctcgacaataacggaggatgctctcatgtctgcaacgcccttaagatcggagctgagtgcctgtgccccgacggctttcaactggtcgcgcagcggcgctgcgaagatatcgacgagtgccaggatccagacacttgctcccaactgtgcgtgaatctggaaggcggctacaagtgtcagtgtgaggaaggtttccaactggatccgcacaccaaggcatgcaaagcggtgggctctattgcgtacttgttcttcaccaatcggcacgaggtcagaaaaatgaccctggatcggagcgagtacacctccctcatcccgaatctgcggaatgtcgtcgccctggatacggaagtggcgtccaaccgcatctattggtccgacctgtcgcaaaggatgatttgttctactcagctggaccgcgctcatggcgtcagctcctacgacacggtgatcagccgcgatatccaggctcctgacggtttggccgtcgattggatacactcaaacatctactggactgactcagttctgggcactgtgtccgtggccgacactaagggggtgaaaagaaaaactctgtttcgggaaaacggatcgaagccgagggccatcgtggtggacccggtgcacgggttcatgtactggacggattggggtactcctgctaagatcaaaaagggaggtctgaatggagtggatatctactcgctcgtgactgaaaacatccagtggccgaacggaatcaccctcgatcttctcagcggacgcctgtactgggtggactccaaactccattcgatcagctcgattgatgtgaacggagggaaccgcaaaactatactggaggatgaaaagcgcttggcccacccattctcgctggctgtgttcgaggataaggtgttctggaccgacatcatcaacgaggccatattctcagccaaccgcctgaccggctcggacgtcaatctgctggccgaaaatctcctgtccccggaggacatggtgttgtttcacaacctgacccaaccccgtggagtgaattggtgcgagcggactactctgagcaatggtggttgccagtatctgtgcttgcccgcgccccagatcaatcctcattcacccaagttcacttgcgcgtgcccggacggcatgcttcttgccagagacatgcgatcatgtcttactgaggccgaagccgcagtggcaacccaggaaacgtcgactgtgcgccttaaagtctcgagcactgcagtcaggacccaacatactaccactcgaccggtcccggacacctcccgactccccggggccacgccggggctcaccaccgtggagattgtgacgatgtcgcatcaagcccttggggacgtcgccgggcgcgggaacgaaaagaagccatcttcggtccgcgcattgtcaattgtcctcccaatcgtgctgttggtttttctgtgtctgggagtctttctgctgtggaagaactggcgcttgaagaatatcaactcaatcaactttgataaccctgtgtaccaaaagaccactgaagatgaagtccacatttgccacaaccaggacggatacagctacccatccagacagatggtgtcccttgaggatgacgtcgca

SEQ ID NO: 16427 - DNA, 2580 bp, synthetic construct
  misc_feature 1..2580: note = source = /note="Description of Artificial Sequence: Synthetic coding sequence"
  source 1..2580: mol_type = other DNA
atgggtccgtggggatggaaacttagatggactgtggccttgctgctggccgcagccggcactgcagtgggagacagatgcgaacgcaacgagtttcagtgccaagacggaaagtgcatcagctacaagtgggtgtgtgatgggagcgcagagtgccaggatggctccgacgagtcccaggagacttgtttgtccgttacgtgtaagtccggagacttctcatgcggaggccgggtcaacaggtgtatcccacaattctggcgctgcgatggtcaagtggactgcgataatggatcggatgaacagggatgcccacctaaaacttgcagccaagatgaattccggtgccacgacggcaagtgcatctcgcggcagttcgtgtgtgattcggatagagactgcctggacgggtccgacgaggccagctgtccggtgcttacctgtggccctgcatcatttcagtgcaattcgtctacttgcatcccgcagctctgggcgtgcgataacgatccagactgtgaggacgggtctgacgaatggccccagcgctgccgcggactgtacgtgttccaaggggactcgagcccatgctccgcgttcgagtttcactgcctctccggcgaatgcattcacagctcgtggcgatgcgatggtggacccgactgcaaagacaagtcagacgaggaaaattgtgcagtggccacttgtcgcccagatgaattccagtgctccgacggtaattgcatacatggatcaaggcagtgcgacagggaatacgactgcaaggatatgagcgacgaggtgggatgcgtcaatgtgactctgtgcgaaggaccaaacaagttcaagtgccatagcggcgagtgcattaccctggacaaggtctgcaatatggcccgcgactgtagggactggtcggatgagcctatcaaagaatgcggaaccgccgcttgccttgataacaacggaggctgctcacacgtgtgtaacgcactcaaaatcggagccgaatgcctgtgtccggacggcttccaactcgtggcccagaggcggtgcgaggatatcgacgaatgccaagatccagacacttgttcccagctgtgcgtcaatctcgaaggaggatacaaatgtcagtgcgaagaaggattccagcttgaccctcacactaaggcgtgtaaggccgtcggatcaatagcatacttgttcttcaccaaccggcatgaagtgagaaagatgactctggatagatcagagtacacgtccctgatcccaaatctccgcaacgttgtggcgcttgatactgaagttgcgtcgaaccgcatctactggtccgacttgagccagagaatgatttgtagcacgcaactcgatcgggcccacggtgtgagctcgtacgacactgtgatcagccgcgacatccaggcccctgatggcctggcagtggactggatccatagcaacatttactggacggattccgtgttgggaacggtttcggtggccgatactaagggagttaagagaaagaccctgttcagagagaacgggtccaaaccgcgggcaatcgtggtcgaccctgtgcacggctttatgtactggactgactggggaactccagctaagatcaagaagggtggactcaacggcgtggatatctactcgctggtgaccgaaaacatccaatggcccaatggcatcaccctggatcttctgtccggtcgcctgtattgggtcgatagcaaactccactcaatctcgtccatcgacgtgaacggcggcaaccgtaaaaccattctggaggatgaaaagaggctcgcgcatcctttctccttggccgtgttcgaggacaaggtgttctggaccgacatcatcaatgaggctatcttttcggctaatcgcctgaccggtagcgacgtgaatttgctggccgaaaacctcctctcgcccgaggacatggtgctctttcacaacctgacccagccgcggggagtcaactggtgcgaacggaccaccctgtcgaacggaggatgccagtacctgtgcctgcctgccccacaaatcaatcctcattcgccaaaattcacctgtgcatgcccggatggaatgctgttggcacgcgatatgcgctcctgcctgaccgaagctgaggcggctgtggcaacccaggaaaccagcacggtgagattgaaggtgagcagcactgctgtcagaactcagcatactaccacccgccccgtcccagacacgagccggttgccgggcgcgaccccgggcctgacgactgtggaaattgtgactatgtcgcaccaagccctcggagacgtggcgggaagaggcaatgagaagaagccgtcatcggtcagagcactcagcattgtcctcccaatcgtgctgttggtgtttctctgcctcggagtgttcctgctgtggaaaaactggcggctgaagaatatcaactcaatcaattttgacaacccggtgtatcaaaagacgacggaggacgaagtgcacatctgtcacaatcaggacggatactcatacccctcgcgccagatggtgtcgctggaagatgacgtcgcc

SEQ ID NO: 16428 - DNA, 2580 bp, synthetic construct
  misc_feature 1..2580: note = source = /note="Description of Artificial Sequence: Synthetic coding sequence"
  source 1..2580: mol_type = other DNA
atgggtccctggggctggaagctccgctggaccgtggcacttttgctagcagcagctggcaccgccgtcggagatcgatgtgaacgcaatgagtttcaatgccaggacgggaaatgtatctcttacaaatgggtctgcgatggtagtgccgagtgccaggatggctccgatgagagtcaggagacatgccttagtgtgacctgcaagtccggtgacttttcatgtggggggcgtgtgaataggtgtatcccacagttttggaggtgtgatggtcaggtggattgtgataatggatcagatgagcagggctgcccacctaaaacatgtagccaagacgaatttagatgtcatgacggaaagtgcatatcccggcagtttgtgtgcgatagtgatcgagactgtctcgatggcagtgacgaagctagctgtccagtgttaacatgtggacctgcctccttccaatgcaactcttctacttgtatccctcagttatgggcttgcgacaacgaccccgattgtgaggatgggtctgatgaatggcctcagaggtgtcgtgggctctacgtgttccagggagactcctcaccatgctcagcattcgaatttcactgcttgagcggagagtgcatacactccagctggcgctgtgatggcggacctgattgtaaagataaatccgatgaggagaactgtgccgtggccacatgcagaccagacgagtttcagtgtagcgacggcaactgcatccacggtagccgacaatgtgatcgtgagtacgactgcaaggatatgtctgacgaggttgggtgtgtgaacgtcacactgtgtgagggaccaaacaaattcaagtgtcatagtggggagtgcatcacgcttgataaggtgtgcaatatggccagagactgccgggactggtctgatgagccaatcaaagagtgcgggacggccgcttgtctcgacaacaacggtgggtgttctcacgtttgcaacgccctgaagattggggcagagtgtttgtgtcctgatgggtttcagctggtagcacagcgtagatgtgaagacatagacgaatgtcaggacccagatacatgttcgcagttgtgcgtgaacctggaaggggggtataaatgtcagtgcgaggaggggtttcaactggatccccataccaaggcgtgcaaggcggtggggtccatcgcttacctcttttttaccaacaggcacgaggtgagaaagatgactctggatcgtagtgaatataccagtttaatacccaatctccggaatgtggtggcactggatacagaagtggcgtcaaatcggatttactggagcgatcttagccagcggatgatctgctccacgcaactggatagggcccacggcgtgtcaagctatgatacagttatttctcgggatatccaggctcccgacggcctagcagtcgattggattcacagcaatatctactggacggactcagtgttgggcacggtaagcgtcgcagataccaaaggagtgaaaagaaaaacactgttccgagagaatggaagtaaacctcgcgcaattgtagtagaccctgtgcatggattcatgtattggaccgactgggggactcccgcgaaaatcaagaaagggggcctgaatggggtggatatttattccttagtcactgaaaatatccagtggcccaatggcattactctggatttgctgtctgggcgcctttactgggtggattccaagctgcactccatctctagcatcgatgtgaacggcgggaacaggaaaacaatcttagaggatgagaagcggcttgcccacccattcagcctggccgtgttcgaagataaggtgttttggaccgacattataaacgaggccatattttcggcgaaccgtctgaccggctcagacgttaacctcttggcagagaatttgctatcgcccgaggacatggtgctgttccataatctcacacagccacgtggggtcaactggtgtgagcggactacattgtcaaacgggggctgccaatacctgtgtctgccagcgccccagatcaatccccattcccctaaatttacgtgcgcctgccccgacggcatgctgctggcaagagacatgaggtcctgcctgactgaggctgaagcagccgtggccacacaagagactagcaccgtgcgcctgaaagtatcttccactgccgtccggactcagcacaccaccacaagacccgtccctgatacttctcgactgccgggggccacgccggggctgacaaccgtggagattgtcaccatgagccaccaagctctcggggatgtggccggcagagggaatgaaaagaagccgtcatcagtgcgggctctgtctattgtgctcccgatcgtgctgctagtgtttctgtgcttaggggttttcctcctctggaagaactggagactcaagaacatcaacagcataaacttcgacaaccccgtatatcagaaaactactgaagatgaggtacatatttgtcataatcaggatggatactcgtacccttcaagacaaatggtgtctctggaagatgacgtcgcc

SEQ ID NO: 16429 - DNA, 2580 bp, synthetic construct
  misc_feature 1..2580: note = source = /note="Description of Artificial Sequence: Synthetic coding sequence"
  source 1..2580: mol_type = other DNA
atgggcccatggggatggaagctgcgctggactgtggcgctgctgctggcggcggccgggaccgcggtgggtgaccgctgtgaaagaaacgagtttcagtgtcaagacggaaagtgcatctcctacaaatgggtgtgcgatggctccgcggagtgccaagacggctcagatgaaagccaagagacttgcctgtcggtgacttgcaaaagcggagattttagctgcggaggtagagtgaacaggtgcatacctcagttttggaggtgtgatgggcaggtcgattgtgataacgggtcggacgaacagggatgccctcctaaaacttgctcgcaggacgagttccggtgccacgacgggaagtgcatctctcggcagtttgtgtgcgactccgatcgggactgtctcgatggatcagacgaagcctcctgtccagtgctgacttgcgggccggcttcattccagtgtaacagctcgacttgtatcccgcagctctgggcatgcgacaatgaccccgactgtgaagatggctcagatgagtggccgcaacgctgtagaggactgtacgtgttccagggcgattcaagcccatgctcggctttcgagtttcattgtttgagtggagagtgcatccactcctcgtggaggtgcgacgggggaccggattgcaaggataaatcggacgaagagaattgcgcagtggcgacctgtcgccctgatgaattccagtgttccgacggaaattgcatccatggatcccggcaatgtgaccgcgagtacgactgtaaggacatgtccgatgaagttggatgcgtgaatgtcacgctctgcgaaggaccaaacaagttcaaatgtcactcgggcgagtgcatcactctcgacaaggtttgtaacatggcacgggactgcagagactggtcggacgagcccattaaggagtgcggaaccgccgcatgccttgacaacaacggtggctgctcgcacgtctgtaacgctctgaaaatcggcgcggaatgcctctgccccgacggctttcaactggtcgctcagaggcgctgcgaagacatcgacgagtgtcaggacccggatacctgcagccagctctgcgtgaacctggaagggggttacaagtgtcaatgcgaggagggatttcaactggatccgcatactaaggcatgtaaggccgtgggttcgattgcgtacctgttctttaccaatagacacgaagtgaggaagatgactctggaccgctcggaatacacttcgctgatcccgaatctgcgcaacgtggtggccctggacaccgaagtcgcttcgaatcgcatctactggtccgatcttagccagagaatgatctgttcaacccagctcgacagagctcacggtgtctcctcctacgacaccgtgatctcgcgggacatccaggcgccggacggactggcggtggattggatccactctaacatctactggaccgattcggtgcttggaaccgtgagcgtggcagacactaaaggcgttaagcgcaaaaccctcttccgcgaaaacggctcaaagccgcgggcgatcgtcgtggatccggtgcacggcttcatgtattggactgattgggggaccccggccaagatcaaaaagggcggactgaacggagttgacatctacagcctcgtcaccgagaatatccagtggccgaacggaattactctcgatctgctctcgggacgcctttactgggtcgatagcaagctgcattcgatctcttccatcgacgtgaacgggggcaatcgcaagacgatcttggaagacgaaaaacggctcgcccacccgttctcattggccgtcttcgaagataaggtgttctggactgacatcatcaacgaagctattttctcagcaaatagactcactggatcggacgtgaatctcctcgcagaaaatctgttgtcgccggaggacatggtgctgttccacaacctgactcagccacggggagtgaactggtgtgagcgcactaccttgtcgaacggggggtgccaatacctgtgcctgccggccccacagatcaatccacactcacctaagttcacctgcgcctgccctgatggcatgctgctggctagggacatgagaagctgtctgactgaagccgaagcggctgtggcgactcaggaaacgtcgactgtgagacttaaggtgtctagcactgctgtgcgcacccagcacactactactcgaccggttccggacactagcagacttccgggtgcaaccccaggcctcactaccgtggaaattgtgaccatgagccatcaggccttgggcgacgtggcgggtcgcggaaatgaaaagaagccgtcctcagttagagcgctgtcgatcgtgctcccaatcgtgctcctggtgtttttgtgcctgggagtgttcctgctgtggaaaaattggcgcctcaaaaacatcaattcgatcaacttcgataatccggtctaccagaagaccaccgaagatgaagtgcatatctgtcacaatcaggatgggtacagctacccgtcccgccaaatggtgtcactggaggatgacgtggcg

SEQ ID NO: 16430 - DNA, 2580 bp, synthetic construct
  misc_feature 1..2580: note = source = /note="Description of Artificial Sequence: Synthetic coding sequence"
  source 1..2580: mol_type = other DNA
atgggaccttgggggtggaaactgaggtggactgtcgcccttctcctcgccgccgctgggactgctgtcggggatagatgcgaacgaaatgagtttcagtgccaggacgggaagtgcatctcatacaaatgggtctgcgatgggagtgccgagtgccaggacggttccgatgagagtcaggagacgtgtctgtccgtgacctgcaagtccggtgatttttcctgtggcgggcgggtgaaccgatgcatacctcaattttggcgttgtgatgggcaggtggactgcgacaatggatccgatgaacaggggtgcccccccaagacttgctcacaagatgagtttcgttgccatgacggtaagtgtatatcacgacaattcgtatgcgattctgacagggattgtctggatggaagcgatgaggcatcttgcccagtgctgacgtgcggacccgcaagcttccagtgtaactctagcacctgcattccacaattgtgggcctgcgacaatgaccccgactgtgaggacgggagtgatgagtggcctcagcgctgccgtggtttgtatgtatttcagggagacagttctccatgtagtgcctttgaatttcactgtctgagcggtgagtgtatccactcatcttggagatgtgacggaggacccgactgtaaagacaagtcggacgaggaaaattgtgccgtcgccacctgtcgaccggatgaatttcagtgcagtgacggcaactgtatccacggatcgagacagtgcgacagggagtacgactgtaaagatatgtcagatgaggtggggtgcgttaatgtgacactttgtgagggccccaataagtttaaatgtcatagcggtgagtgcattaccttagataaggtttgtaacatggcgagggactgccgtgactggagtgatgaaccaatcaaagagtgcggcacggccgcgtgcttggataacaacggtggatgttcccacgtttgcaacgccctcaaaatcggcgctgaatgcttatgtcccgatgggtttcagttggtggcccagcggcgctgtgaggacatcgacgaatgccaggatcccgatacctgtagccagctgtgtgtcaatctggagggagggtacaagtgtcagtgtgaggaaggcttccaattagacccccacacaaaggcttgcaaagcggtcggttcaatcgcctacctcttcttcacaaaccgccatgaagttaggaagatgacattggatagatccgaatacactagtctaattcctaacctacggaatgtggtggcattagacacagaagttgcaagtaatcgcatctactggtccgacctgtcacagcgcatgatttgtagcacacaactcgatcgtgcccatggtgtgagtagttacgacacagtgatctctagggatattcaggcacctgatggcttggccgtggattggatacacagtaacatttactggactgacagtgttcttggaactgtttctgtggccgacacgaagggcgtcaaacggaagacgctgtttcgggagaatggcagcaaacctcgcgccattgtggttgatcccgtgcacggattcatgtactggactgactggggcaccccggcaaaaattaagaaaggggggttgaatggagttgacatctactctttggttacggagaatatccaatggcccaatggtattactctagatctgttaagtggacgactgtactgggtggactccaagttgcactctatttcctccatcgacgtgaatggtggcaacaggaagactatactagaggatgagaagagactcgcccatcctttctccctcgccgtattcgaggataaggtcttttggacggacattatcaatgaggctattttctctgctaaccgtctcacaggctccgatgtgaacctgctagctgaaaacctgctgtctccagaggatatggtgcttttccataacctgacgcagcctcgaggggttaactggtgtgaaagaactaccctctcgaacgggggttgtcagtatctctgtctccctgccccgcaaattaatcctcattctcccaagtttacctgcgcttgccctgacggtatgctactcgcccgcgacatgcgttcttgccttactgaggcagaagccgctgttgccacccaggagacctccacagtgcggttgaaggtaagtagcacagcggtgcgaactcagcacaccacaacacggccagtcccagatacatctcgcttacccggcgctacccctggacttaccacagtggagatcgtgactatgagccaccaggccttgggggacgtcgccggcagagggaatgaaaagaagccttcgtctgtccgagccctgtctatagtgctgcccattgtgctgttggtgtttctctgtctgggagtgttcctgttgtggaaaaactggcggctaaaaaacattaattccatcaactttgacaatccagtataccagaagaccaccgaggatgaagtccacatctgccacaatcaggatgggtactcttacccctcccgccagatggtgtctctcgaagacgacgtcgca

SEQ ID NO: 16431 - DNA, 2580 bp, synthetic construct
  misc_feature 1..2580: note = source = /note="Description of Artificial Sequence: Synthetic coding sequence"
  source 1..2580: mol_type = other DNA
atgggcccctggggctggaaactgcggtggacagtcgccctcttactcgccgctgctggtacagctgtgggtgatagatgtgaacgaaatgagttccagtgtcaggacgggaaatgtatctcctacaagtgggtctgtgacggctctgcagagtgtcaggatggaagcgacgagtcccaagaaacttgcctgagcgtcacatgcaagtccggcgactttagttgcggaggtcgcgttaatcggtgcattcctcagttttggagatgcgacggacaggtggattgcgacaatggctcggatgagcagggctgtcctcccaaaacctgttcccaagacgaattccgctgccacgatggtaagtgcatcagcaggcagtttgtttgcgatagtgaccgcgattgcctcgacggatcagacgaagctagctgtcctgtcctgacatgtggacctgcatcattccagtgtaacagttctacttgcattccccagctctgggcgtgtgataatgacccggactgcgaggatggcagcgatgaatggccacagcgttgccgtggtctttatgtttttcaaggggacagctcgccttgttcagccttcgaattccattgtttatccggagaatgtattcactccagttggcggtgtgacggaggccctgattgtaaagataaaagtgacgaggagaactgcgccgtggccacttgccgccctgacgaattccagtgctctgatgggaattgtatccatggaagtagacagtgcgaccgagagtacgactgtaaagatatgtcagacgaggtggggtgcgtgaatgtgaccttgtgcgaggggcctaataaatttaagtgtcactcaggtgaatgcatcacactggacaaggtctgtaatatggcccgggactgtcgtgactggtccgatgaaccaattaaggaatgcggcaccgccgcctgtttggacaataacggaggatgctcgcatgtctgtaacgcccttaaaataggggccgaatgcctctgtccagatggtttccaactagttgctcagagacgatgtgaagacatagatgagtgtcaggaccccgatacttgttcgcaattgtgtgtcaacttggaaggaggctacaaatgccagtgtgaagaggggtttcagttagatcctcataccaaggcctgtaaagcagtaggatctattgcctatctcttctttacaaatcggcacgaggttcgtaaaatgaccctggataggtcagagtataccagcttaatccctaatctcaggaatgtcgtcgctctggacaccgaagttgcaagcaatcgaatctactggagtgacctgtcgcaaagaatgatctgcagcacccagttggaccgcgcacacggggtttcctcctatgacacggttattagtcgcgacatccaggcaccggacggactggccgtggactggattcattcaaatatctactggacagattcagtgttgggcaccgtgagcgttgccgatacgaagggcgtcaaaaggaaaacgctgttcagagagaacggaagtaaacctcgagctatagtcgttgaccctgtacacggctttatgtactggacagattgggggacccctgctaagatcaagaaggggggacttaatggagtcgacatttactccctggttacagagaacatccagtggcctaatgggatcactttagacctccttagcggtaggctgtattgggtggattctaagctgcattctatctctagcatcgatgtgaacggaggcaacaggaaaaccatcttagaagatgaaaagcgcctggcccaccctttttcactcgcagttttcgaagataaagtgttttggaccgacattataaatgaggctattttttccgctaatcggctgaccggtagtgatgtcaatctcctggccgagaatttactcagccccgaagacatggtcctgttccacaacctcacccagccccggggtgtgaactggtgcgaacggactaccttatcgaacggcggttgccagtacctatgcctgcctgccccccagattaatccccactccccgaagttcacctgcgcctgtccggatgggatgctactggcacgagacatgcggtcgtgtcttactgaggctgaggccgccgtagctactcaggagaccagcaccgtaagacttaaagtctcatcaactgcagttagaacccagcacacaacaactcggccagtaccggacacctcgcgactgccgggcgcaacaccggggctgacaaccgtggaaatagtcacaatgtcccatcaggctctgggagatgttgctgggaggggaaatgagaagaagcccagctctgtaagggctctctccatagtactccctatagtgctgttggtcttcctgtgcctgggcgtctttctgctatggaaaaattggcggttgaagaacatcaactctatcaattttgacaatcccgtttaccagaaaacaacggaggacgaggttcatatatgccacaaccaggacggatacagctacccttctagacagatggttagtctggaggacgatgtggcc

SEQ ID NO: 16432 - DNA, 2580 bp, synthetic construct
  misc_feature 1..2580: note = source = /note="Description of Artificial Sequence: Synthetic coding sequence"
  source 1..2580: mol_type = other DNA
atggggccgtggggatggaaacttagatggaccgttgcattgttgttggcggcggcaggcacagcagtaggggacaggtgtgagcgcaacgagttccagtgtcaggatggaaagtgtatttcatacaaatgggtgtgcgatggaagcgctgagtgccaggacggaagcgacgaaagccaagagacatgcttgagtgtaacatgtaagtccggcgattttagctgcggggggcgcgttaacaggtgcatcccgcaattctggaggtgtgacggccaggtggactgtgataacggtagcgatgagcagggctgcccgcctaagacatgtagccaagacgagtttcggtgtcacgacggaaagtgtatttcaagacaattcgtctgcgattccgacagggattgtctcgacggatctgatgaagccagttgtcctgtcctgacctgcggcccggctagcttccagtgtaatagttctacttgcattccgcagctgtgggcatgcgataatgatccagactgtgaggacggatctgacgaatggcctcaacggtgtagaggcctctacgtatttcaaggtgattcttcaccgtgtagtgcattcgagtttcactgtctgagcggagaatgtatccactcaagctggcgctgcgacggaggtcccgattgtaaggacaaaagtgatgaagaaaactgcgctgtggcgacttgcaggcccgatgagtttcagtgtagcgacgggaactgcatacacggtagccggcaatgcgacagggaatacgattgtaaggatatgtctgatgaagttgggtgtgttaatgtgaccctttgcgagggccccaacaagtttaaatgtcacagcggtgagtgcataaccctggataaagtgtgtaacatggctcgtgattgcagggattggagcgacgagccaattaaagaatgtggcacagcagcatgccttgacaacaacggggggtgcagccacgtgtgcaacgctctgaagattggggcagagtgcctttgtcctgacggcttccaactggttgctcagagaagatgcgaggacattgatgaatgtcaggatcccgacacttgcagtcaactctgcgtcaacctcgagggtggatacaaatgtcaatgcgaggaaggctttcagcttgacccacataccaaggcgtgcaaagctgtgggcagcattgcttacctgtttttcactaaccgccatgaggtgagaaaaatgactctcgatagaagtgagtatacttccttaattcccaatctgcgcaatgtagtagctcttgacactgaagttgctagcaaccgaatctattggtctgatcttagccagaggatgatatgctctactcagctcgaccgggcacatggcgtgagtagttacgataccgttattagtcgagacatccaagctccggacgggctcgctgtggactggattcactcaaacatttattggacagactctgtgctgggcaccgttagtgtagctgataccaaaggagtgaaacgaaaaaccctcttcagggagaacgggtcaaagccacgggctatcgtcgtggatccagttcacggtttcatgtattggaccgattggggaacaccagctaaaattaagaagggaggtctcaatggggtggacatctacagcctcgtcactgagaacattcagtggcccaatggaatcacattggatcttctgagcggtagactctactgggtcgattctaaactgcattccatcagttctatcgatgtgaacggcgggaacagaaaaaccatcttggaggacgaaaaaagacttgcacacccgtttagtcttgccgtttttgaagataaagttttttggaccgacatcataaacgaggcaatcttcagcgcaaataggctaactggatctgacgttaacctgctcgctgaaaaccttctgagcccagaagacatggtgctgttccataacctgacccagccaagaggagtgaattggtgtgaacgtactacactttccaacggcggctgtcagtacttgtgcctgccagcgccccagatcaacccccactcacctaagtttacatgcgcttgtccagacggcatgcttctcgctagagacatgcgcagctgtcttaccgaagccgaggctgccgtggcaacacaagagacctctaccgtaaggctcaaagtctcaagcaccgctgttaggacacagcataccaccacaagacctgttcctgatacttcaaggttgcctggcgccacccctggcctcacaaccgtagaaatcgttaccatgtcccatcaggccctgggcgacgtggccggccggggcaacgagaagaagccctcaagcgtaagggcactgtctatcgtgctgcccatcgtccttctggttttcttgtgtttgggggtcttcctgctttggaaaaactggaggctcaaaaatattaactctattaactttgacaatcccgtgtaccagaagaccacagaagatgaagtgcacatctgtcacaatcaagacggatactcttacccctcaagacaaatggtttctcttgaagacgatgtcgca

SEQ ID NO: 16433 - DNA, 2580 bp, synthetic construct
  misc_feature 1..2580: note = source = /note="Description of Artificial Sequence: Synthetic coding sequence"
  source 1..2580: mol_type = other DNA
atgggtccctggggctggaaactgcgatggactgtggccctgttgctcgccgctgctgggaccgcagtcggggatcgctgcgagcgaaacgaattccagtgtcaggatggcaaatgtatcagctacaagtgggtgtgtgacggaagcgctgaatgccaggatggatccgacgaaagccaggaaacatgcctttccgtgacttgcaagtcgggtgatttttcttgcgggggcagagttaatcgctgtattccgcaattctggcgatgcgatggccaagtagactgtgataacggcagtgacgagcaggggtgcccccccaaaacctgttcgcaggatgagtttcgatgccatgacgggaagtgtatctcccgccagtttgtgtgtgactccgacagagactgtttggatgggtccgatgaggcctcttgccctgtgcttacgtgcggacccgcgagctttcagtgcaattcgtcaacatgcatcccacagctgtgggcgtgtgataacgaccctgactgcgaagatggctccgacgagtggccacagcggtgtagggggctttacgtgttccaaggcgattcgtccccttgctccgcatttgaattccactgtctgtccggcgaatgtatccactcttcatggaggtgtgacgggggaccagattgcaaggacaaatccgatgaggagaattgtgcggtcgccacctgtcggccagacgagttccagtgttccgacggcaactgcatacacggatctcgccagtgtgatcgcgaatatgattgcaaagatatgtccgacgaggtcggctgcgtaaatgttaccttatgtgaaggtcctaataagttcaagtgtcattctggcgagtgtataaccctggacaaggtctgtaatatggcgagagactgtcgcgattggagcgatgagccaattaaggaatgcggcacagcagcttgtctggacaataatggcggatgtagtcacgtctgcaacgctcttaagataggcgctgagtgtctgtgtcctgacggctttcagttggtggctcagaggcgctgcgaagacatcgatgaatgccaggatcctgacacttgctctcaactgtgcgtgaatctggaggggggttacaagtgtcagtgtgaagagggattccagctggatcctcatacaaaagcttgcaaggctgtgggcagtatcgcctacctcttcttcacaaacagacacgaagtcaggaagatgacactggacaggtctgagtacaccagcctgattcctaaccttcgcaacgtagttgctcttgatacagaggtggctagtaaccgtatctactggtcggatttgtctcagcggatgatctgtagtacccagctcgacagggctcacggagtatccagttacgacacggtgattagtagggacatccaggcacccgacggactcgcagtagactggatacactccaatatttattggaccgactctgtcttggggacagtttcagtggcagacacaaagggggtcaaacggaaaacacttttccgggaaaacggctcaaagccgcgggctattgttgtcgatcccgtccacggctttatgtactggaccgactggggcacccctgctaaaataaagaagggaggcttaaatggagtagatatatacagccttgtgaccgaaaatatacaatggcccaacggtatcaccctggatttgctgagcggtaggctctactgggtcgactcgaaactccatagtatctctagtattgacgtgaatggcgggaacaggaaaactatcctggaagacgagaagcgcctcgcccatcctttctccctagctgtgttcgaagacaaagtattctggacagacattataaatgaggcaatcttctcggccaatcgccttactggctctgacgtgaaccttctggccgagaacctactgagccctgaagacatggtcctgtttcacaacctcactcagccacggggcgtgaactggtgcgaacgtactaccctgtctaacggaggatgtcagtatctgtgtttgcctgcacctcagattaatccacacagcccaaaattcacatgcgcttgcccagatggcatgcttctggcacgggacatgcgttcttgtcttactgaggctgaagctgccgttgccactcaagagacttctactgtgaggctaaaagtttcctccaccgccgtccggacccaacacacaaccactcgtccagtacctgacactagtcgactcccaggggctacgccaggcctgacaaccgtagaaattgtgacaatgtctcatcaagctcttggcgatgtagctggtcgtggcaacgaaaaaaaaccctcctccgtgcgagctttgtccatcgtactccctattgtcctcctggtgtttctttgtctaggggtctttctgctgtggaagaattggcgtctgaagaacatcaattcaataaactttgacaaccccgtgtatcagaagaccacggaagacgaggtccacatctgtcacaaccaggacggctatagctatccttcccgacagatggtgtcacttgaggacgacgttgct

SEQ ID NO: 16434 - DNA, 2580 bp, synthetic construct
  misc_feature 1..2580: note = source = /note="Description of Artificial Sequence: Synthetic coding sequence"
  source 1..2580: mol_type = other DNA
atggggccctggggatggaaacttcggtggacagtggctcttctactcgctgccgctgggacagcagtgggagatcgatgtgaacgaaacgaatttcagtgtcaggatgggaagtgtatttcctataaatgggtgtgtgatggatctgccgaatgtcaggacgggtccgacgaatcccaggaaacatgtcttagtgtgacttgtaaaagtggggatttttcctgtggggggagggtgaacaggtgtatccctcagttctggcggtgtgatggacaggttgattgtgataatggatcagacgagcaggggtgtccacccaagacatgcagtcaggatgaatttaggtgtcatgatgggaaatgcatatcccggcagttcgtatgcgactcagatcgggattgtttggacgggtcagatgaggcttcctgcccagtgctgacttgtggacccgcatcatttcagtgtaattcctctacttgtatccctcagctctgggcctgcgataacgaccccgactgcgaagacgggtctgatgaatggcctcagagatgtagggggctctatgtgttccagggggatagttcaccttgtagtgctttcgagttccattgtcttagtggggaatgtatccactccagttggcggtgtgatgggggacctgattgtaaagataaaagtgatgaagaaaattgcgccgttgccacttgccgcccggatgagttccagtgtagtgatggaaattgtattcatggatccaggcaatgcgatcgcgagtatgattgtaaagatatgtccgatgaagtgggatgcgttaacgtcacactgtgtgaagggcccaataagtttaaatgccatagtggggaatgcataactttagacaaagtatgtaacatggcacgggattgccgggactggtccgatgagccaattaaagaatgcggaacagccgcctgtctcgataacaatggggggtgctcccacgtgtgcaatgccctgaaaataggagcagaatgcctctgcccagatggatttcagctagtcgcacagcgaaggtgtgaagatatagatgaatgtcaagaccctgatacttgttctcagctctgcgttaatttggaagggggatataaatgccagtgcgaagaaggatttcaactagatccccacactaaagcatgcaaagctgtggggtctatcgcttacctcttttttacaaaccgacacgaagtgcgcaagatgactctagatagatccgaatatacaagtctcatcccaaatctccgaaacgtggtggccctggatactgaagtggcatcaaatcggatctattggtctgatctctctcagagaatgatttgttctacacaactagatcgagcacatggagtgtcatcttacgatacagtgatctctcgagatattcaggcacccgatgggctagccgtggattggatacatagtaacatatattggactgattcagtgcttgggactgtatctgttgcagatactaaaggagtgaaaaggaagactctgtttagggaaaacggaagtaagcctagagccatcgtagtggaccccgttcacggatttatgtattggacagactgggggactcctgctaaaatcaaaaagggagggctgaacggggtcgacatatacagtttagtaacagaaaatatccagtggccaaatggaataactctagatctactgagtgggcggctttattgggtcgattctaaattgcactccattagttctattgatgtcaatggagggaatcgaaagactatcctggaggacgagaaacgacttgcccatccattttctctggccgtatttgaagataaagtgttctggacagatatcattaacgaggctattttttctgctaacagattaactggatccgatgtcaatctcctggccgagaacctcctgtcccccgaagatatggtgttgtttcacaacctcacacaaccaagaggagtgaattggtgtgaacgaacaacactttccaatggggggtgtcagtatctgtgtttgcctgctccacaaatcaacccccactctccgaagttcacttgcgcctgccccgatgggatgctcttagcacgcgacatgagatcttgtctcactgaagcagaggcagccgtggcaactcaggaaactagtacagtacggttaaaagtgtcttcaacagccgttagaacacagcacactactacacgccctgtgccagatacttccagactgcctggggccactccaggactgactacagtggaaattgtgactatgtcccaccaggctcttggagatgtcgccggacgcgggaacgagaaaaaaccctcgtctgtaagggccctatccatagttctccctatcgtgctgctggtatttttatgcctaggggtttttctcctttggaaaaactggcggcttaaaaacataaactccatcaactttgacaatcctgtgtatcagaaaacaacggaagatgaggtgcacatatgtcataaccaggatgggtactcctatccctcgcggcagatggtgagtctggaagatgatgtcgct

SEQ ID NO: 16435 - DNA, 2580 bp, synthetic construct
  misc_feature 1..2580: note = source = /note="Description of Artificial Sequence: Synthetic coding sequence"
  source 1..2580: mol_type = other DNA
atgggaccatggggctggaaactgaggtggactgtggcgctcctgctggccgctgcgggaactgcggtcggagacagatgcgaacgcaatgaattccagtgccaggacggaaagtgcattagctacaaatgggtgtgcgacggatcagccgaatgccaggacggcagcgacgagtcacaggaaacctgcctctccgtgacgtgtaaatccggggatttctcgtgcggcggccgcgtgaatagatgcatcccgcagttctggaggtgcgatggacaggtcgattgcgacaatggatcggatgagcaaggttgtccgccgaaaacctgctcgcaggacgagttccggtgtcatgatgggaagtgcatcagcaggcagtttgtctgcgatagcgaccgcgattgtctggatggaagcgacgaggcgtcatgtcctgtgctcacgtgtggcccggcctcgttccagtgtaactcctcgacctgcataccgcaactgtgggcgtgcgataacgacccggactgcgaagatggatcggacgaatggccccaacggtgccggggactctacgtctttcagggagactcgtcaccatgttcggctttcgaatttcattgcctgagcggtgaatgcatccactcttcgtggcggtgcgatggagggcctgattgtaaggacaagagcgacgaggagaactgtgccgtggctacctgtcggccggacgagtttcagtgctcggatggcaattgcattcacggaagccgccagtgcgatcgggagtacgattgcaaggatatgtcggacgaagtgggatgcgtgaacgtgactttgtgcgaaggccccaataagtttaagtgccatagtggtgagtgtatcacgctggacaaagtgtgtaatatggcaagggactgtcgtgattggagcgacgagccaatcaaggagtgcggaactgccgcgtgtctggataacaacggtgggtgcagtcacgtgtgcaatgctctcaagattggcgccgaatgcctgtgcccagatgggttccagctggtcgctcaacggagatgcgaagatattgatgagtgtcaagatcctgacacttgctcgcagctctgcgtgaaccttgagggagggtacaaatgccaatgcgaggagggatttcagctggatccgcacaccaaagcgtgcaaagctgtgggatcgatcgcatacttgtttttcactaataggcatgaagtccgcaagatgaccctcgaccgctccgaatacactagcctgatcccgaacctgcgcaacgtggtcgcgctcgacactgaggttgcctctaacagaatctattggagcgacctttcacagcgcatgatctgttccactcagttggaccgggcccacggagtcagctcttacgatactgtcatctcgcgggatatccaggccccggacggactcgcggtggattggatccactcgaacatctattggacggattcggtgctggggaccgtctcggtggccgacaccaagggagtgaagagaaagaccttgtttcgcgagaatggctcgaagcctcgcgccatcgttgtggacccggtgcacggatttatgtactggacggactggggaactccggcgaagatcaaaaagggcggactgaatggtgtggatatctacagcctggtgactgaaaacatccagtggccgaacggtatcactctggatctcttgtcgggacggctttactgggtcgattccaagttgcattcgatttcgtccatcgacgtcaacggaggtaaccggaaaaccatactcgaggacgaaaaaagacttgcccacccgttctcactggccgtgtttgaggataaggtgttctggaccgacatcatcaacgaagccatcttctccgccaatcgcctgactgggagcgacgtgaacctgctggcggagaacctcttgagtccggaagatatggtgctgttccataacctgacgcaaccgcgcggagtcaactggtgtgagcgcaccactctctccaatggaggctgccagtacctgtgcctcccagcaccgcaaatcaatcctcattcgccgaaattcacctgtgcatgcccggacggtatgctgctggcccgggacatgcgctcgtgcctcactgaggcagaggcagctgttgctacccaggagacttccaccgtccgactcaaggtgtcatccactgcagtgaggacccagcacaccaccacccggcctgtcccggacacgtcgaggctgcccggagcgaccccgggtctgaccaccgtggaaatcgtgactatgtcccaccaggcgctgggagatgtggcaggtcgcggcaacgaaaagaagccttcctcggtgcgtgccctgagcattgtgctgcccatcgtgctcctcgtgtttttgtgcttgggagtgttccttctgtggaagaattggcgcctgaagaacatcaattcgatcaattttgacaacccagtgtaccaaaagacgacggaagatgaagtgcacatctgccacaaccaggacggatacagctacccttcccggcagatggtgtcgctggaggacgatgtcgca

SEQ ID NO: 16436 - DNA, 2580 bp, synthetic construct
  misc_feature 1..2580: note = source = /note="Description of Artificial Sequence: Synthetic coding sequence"
  source 1..2580: mol_type = other DNA
atgggcccgtggggctggaagctgagatggaccgtggctctgctcctggcagccgcgggtactgcggtgggggaccgctgcgagagaaatgaatttcaatgccaagatggcaagtgtatctcgtacaagtgggtgtgcgatggatcggcggaatgtcaggacgggtcggatgaatcacaggaaacctgcctgtctgtgacctgcaaatccggagatttttcatgcgggggacgcgtgaaccgctgcatcccgcaattctggagatgtgacgggcaggtggactgcgacaacggaagcgatgagcagggttgcccgccaaagacctgctcgcaggatgaattccggtgccatgacgggaaatgtatctcacgccagttcgtgtgcgacagcgatagagattgcctcgacggcagcgatgaggcaagctgtcctgtgctgacttgcggaccggcctcattccagtgcaacagctccacctgcatccctcaattgtgggcctgcgacaatgacccagactgtgaagatggatcagacgaatggccgcaacgctgtagagggctgtacgtgtttcaaggagacagctccccatgctcggcgttcgaattccattgcctgtcgggagaatgcattcactcgtcgtggcggtgcgacggaggaccggactgcaaagacaaatcagacgaggaaaattgcgccgtcgcaacttgtcgcccagacgaattccaatgcagcgatggcaactgcattcatggctctcggcagtgcgaccgcgaatatgactgcaaggacatgagcgatgaagtgggctgcgtcaacgtgactctctgcgaaggaccgaataagtttaagtgccatagcggcgagtgtataactttggacaaggtctgcaacatggcccgcgactgccgagactggtctgacgagccgatcaaggagtgcggaactgcggcttgcttggacaacaatggcggatgcagtcacgtctgcaatgcgctgaaaataggcgcggagtgcctgtgtccggacggctttcagctcgtggcacagcgccgctgcgaagatatcgacgaatgtcaggatccggacacctgcagccagctttgcgtcaatctggaaggaggatacaagtgccagtgcgaggagggcttccagctggacccgcacactaaggcttgcaaagcagtaggatccattgcatacctcttctttaccaataggcatgaagtgcgaaagatgactctggatcggagcgaatacacctcccttatcccaaatctgcggaatgtggtggccctggacaccgaagtggcgagcaacagaatctattggagcgacctgtcgcagaggatgatctgcagcacccaattggatcgcgcccatggagtgtcctcgtacgataccgtgatcagccgcgatatccaggctccagatggattggctgtggactggatccactcgaacatttactggaccgactctgtgcttggcactgtgagtgtcgcggacaccaagggggtcaagcgcaagacgctgtttcgggagaatggaagcaagcctcgtgcgatcgtcgtggacccggtccacggttttatgtactggacggactggggaactccggccaagatcaaaaagggcgggctcaacggagtcgacatttactctctggtcactgagaatatccaatggccaaatggaatcactctcgatctgctgtcaggacggttgtactgggtcgattccaagctgcactcgatctcgtcaatcgatgtgaacggaggaaacagaaaaaccatcttggaggacgaaaaacgactggcccacccattcagcttggccgtctttgaggataaagtcttttggaccgatatcatcaacgaggccattttcagcgcgaaccgactcactggtagcgacgtgaacctccttgcggagaatctcctctcgcctgaggatatggtcctgtttcataatctgactcagccgcggggcgtgaattggtgtgagagaaccaccctttccaacggaggatgccagtacctgtgtctgcctgctccgcaaatcaatccacactcgcccaagtttacctgcgcctgtccggatggaatgttgcttgcgagggatatgcgctcatgcctgaccgaagcagaagccgcagtcgctacccaggaaacctccacggtccggttgaaggtgtcctcaactgccgtgaggacccagcacaccaccacgaggcctgtgccagacacctcccgccttccgggagctactcccggactgactaccgtggagattgtcaccatgtcccaccaggccctcggggatgtggctggtcggggaaacgagaaaaaaccttcctcagtgagagccctgtcgattgtcctccctattgtgctgctggtgttcctctgcctgggcgtgttcctgttgtggaaaaactggcgcctgaagaacatcaactccattaacttcgataaccccgtgtaccagaaaacgactgaggacgaagtgcatatttgccataaccaggatggctactcatacccgtcaagacaaatggtgagcctcgaggacgacgtggcc

SEQ ID NO: 16437 - DNA, 2580 bp, synthetic construct
  misc_feature 1..2580: note = source = /note="Description of Artificial Sequence: Synthetic coding sequence"
  source 1..2580: mol_type = other DNA
atgggcccttggggatggaagctcagatggacagttgccttacttctggccgctgccggaactgccgtcggagacagatgcgaacggaacgaatttcagtgccaagatggcaaatgtatttcttacaagtgggtgtgtgatgggagcgcggaatgccaagatggctctgatgagtctcaggaaacctgcctgtcagttacctgcaaaagtggtgatttcagctgtggcgggagagttaataggtgtattccccaattttggaggtgcgatgggcaggttgattgcgacaacgggtctgacgagcaaggttgccctccgaagacctgtagtcaagacgaatttagatgccatgatgggaaatgcatatcccgacaatttgtttgcgatagcgaccgagactgcctggatggtagtgatgaagcttcttgccccgtcctcacctgcgggccagcatcctttcagtgtaatagtagtacctgtatccctcaactgtgggcatgcgataacgacccggactgcgaggacggtagtgacgagtggccccagagatgcagaggactctatgtgtttcagggagattcatccccctgcagtgcatttgaatttcactgcctgtcaggtgaatgcatccacagctcatggcggtgcgatggcggcccagattgtaaggacaagtccgacgaagaaaactgtgctgttgccacctgcagaccagacgaattccagtgctcggatgggaattgtatacacgggtccaggcaatgcgacagggagtatgactgcaaggatatgtctgacgaggtcggttgtgtgaatgtgacactgtgtgaggggccaaacaaattcaagtgccatagtggggagtgcatcacgttggacaaggtttgcaacatggccagggactgtagagactggtccgacgaaccaattaaagaatgtggaacggccgcttgtttggataacaatggagggtgctcacatgtgtgcaatgcacttaaaattggggccgagtgtctgtgccccgacgggttccaactagttgctcagcgcagatgcgaggacatagatgaatgccaggaccccgacacctgttcacagctgtgtgtaaacctggaaggaggctataagtgccagtgcgaggagggctttcagctggatccccacacgaaagcctgtaaggcagttggcagcatcgcttatctgttttttactaacagacacgaggtgagaaagatgactctcgacaggagcgaatacacttcattgatcccaaatttgcggaacgtagtggcactggatacggaggtagccagtaaccgaatctattggagcgacctctcccagcgaatgatttgtagtacccagcttgatagggctcacggcgtgtctagctacgataccgttattagcagagatattcaggcccccgatggcctagcagtagattggatccactccaatatttactggacagacagcgtcttgggaactgtatccgtggccgacacaaaaggagttaagcgaaaaacgttgtttagagagaacggatccaaacccagagccatcgtcgtggatcctgttcatggcttcatgtactggaccgactggggcacacccgccaagataaaaaagggaggtctgaatggcgtggacatttattctttagtcaccgagaacatccagtggcctaacggtatcactctggatttgctgtctggacgactctattgggtggattcaaagctgcatagtatctccagtatagatgtcaatggaggaaacagaaagacaatacttgaagatgagaagaggctggcgcacccattttccctggcagtcttcgaggacaaggtcttctggacagacattattaatgaggcgatattctcagcgaaccgactgacgggtagcgacgtgaaccttctcgcggagaacctcctgagcccggaagatatggtgctgttccataatttaacacaaccaaggggagtgaattggtgcgaacgtacaacactcagcaacggcggatgtcagtacctgtgtttacccgccccacagataaaccctcactcccccaaatttacgtgtgcctgccctgatggcatgctgctcgcccgtgacatgcgtagctgtctaaccgaagccgaggctgcagtggcgacccaagagaccagtaccgtcagactcaaagtctcctcgactgctgtccgaacacagcacacaactacccgaccagtgcctgatactagcagacttcccggcgccaccccaggcctcactacagttgaaatagtgacaatgagccatcaggcattgggggacgtagcaggacggggcaacgagaaaaaaccttcatcggtcagagctctatctattgtcttaccgatagtgcttctggtgttcctgtgccttggcgtatttctgctttggaaaaattggagactgaagaatataaactctatcaacttcgacaatccagtctatcagaaaaccaccgaagatgaggtgcacatttgccacaatcaggatggatacagttacccctccaggcaaatggtgtctcttgaggacgatgtcgcc

SEQ ID NO: 16438 - DNA, 2580 bp, synthetic construct
  misc_feature 1..2580: note = source = /note="Description of Artificial Sequence: Synthetic coding sequence"
  source 1..2580: mol_type = other DNA
atggggccttggggatggaagctgcgatggaccgtcgccttgctgcttgccgccgccggcactgctgtaggagataggtgtgagcgaaatgaatttcaatgtcaggacggcaagtgcattagttataagtgggtctgcgatggaagcgcagagtgtcaagacgggtccgatgagtcccaggaaacttgtctctcagttacctgtaaatctggggactttagctgtggaggcagagtaaaccgctgtattcctcagttctggcgctgtgacggccaggttgattgcgataacggatccgacgagcaggggtgcccaccaaaaacctgctctcaggatgagttccgctgtcacgacggtaagtgcatatctaggcagtttgtatgtgattctgatagggactgtctggatggatcagatgaggcaagttgcccagttctcacctgcggaccagcttctttccagtgcaactcctcgacctgtataccccagttgtgggcctgcgacaatgatccagactgcgaggacggtagtgatgaatggccgcagcgatgtcgcggtctctacgtgttccaaggggactctagcccttgtagcgccttcgagttccattgccttagtggagaatgcatccactccagttggaggtgcgacggcgggccagattgcaaggataaatctgatgaagaaaattgtgccgtggccacctgcagacctgacgagtttcaatgctctgatggaaattgtatccatggcagcaggcagtgcgaccgtgaatatgattgcaaggacatgagtgatgaagtggggtgtgtgaacgtgaccttgtgtgaaggacccaacaagtttaaatgccattcaggagagtgtatcacgcttgataaggtgtgcaacatggcgcgggactgcagagactggtccgatgaaccaatcaaggagtgtgggacagcggcctgcctggacaataacggcgggtgctcacacgtgtgtaacgccttaaagataggtgctgaatgcctgtgtccggatggtttccaactggtggcccagcggaggtgcgaggatattgacgagtgccaggatcccgacacctgcagtcagttgtgcgtcaacctggaaggcggctataagtgccagtgcgaggaggggttccagttggacccacacacaaaagcttgcaaagctgttgggagtattgcctatctctttttcaccaatcgccatgaggtacggaagatgacactggacaggagcgaatacacgagtctgatcccaaatctgaggaatgtggtggcattggataccgaggtggccagcaatcggatctactggtctgatctgagccagcgcatgatttgttcgacacaactagatcgagcccacggtgtgagctcctacgacacagtgatcagcagggacatccaggcacccgatggacttgccgttgattggatccattctaatatttattggaccgattccgtgctaggcaccgtgagcgtcgcggacaccaaaggcgtgaaaaggaaaaccctgtttcgcgagaatggaagcaaaccacgggccatagtcgtggatcccgtacacggctttatgtattggactgactggggtacccccgccaaaatcaaaaagggaggcctgaatggtgtggacatttactctttggtgaccgagaatatccagtggccaaacggtattacactggatctgctgagcgggaggctgtattgggtagacagtaagctgcacagtatcagcagtattgatgtgaatggggggaacagaaagaccattctggaagacgaaaagaggcttgctcatccgtttagtctggctgtgtttgaagacaaggtgttttggactgatatcatcaacgaagccatcttttcagccaacagacttaccggcagcgacgtgaacctcttggccgagaacttactgagccctgaggatatggtgctattccataacctgacccaaccacgtggggtgaattggtgtgaacggacaactctgagcaatggagggtgccagtacctgtgcctccccgctccccaaattaatccccatagtcctaagttcacttgtgcctgccctgatggaatgcttctggctagagatatgcgctcctgtttgacggaagctgaggcagccgtagctacccaggaaacctctacagtgagacttaaggtgtcatccactgcagtgcgtacccagcacacaactactcgtcccgtgccagatactagcagactgcccggcgccacacctggtctcacaactgtagagattgtgactatgtcccatcaagccctcggtgacgtggcaggccgcggaaatgagaagaaaccctcttctgtgcgggcactctccattgttctgcccatcgtgctcctggtcttcctgtgcttgggcgtgttcctgttatggaagaactggcggctcaaaaacatcaactccataaattttgacaatcctgtgtatcaaaagactaccgaagatgaagttcacatctgccacaaccaggatggatactcatacccaagcagacaaatggtatctcttgaagatgatgtggcg

SEQ ID NO: 16439 - DNA, 2580 bp, synthetic construct
  misc_feature 1..2580: note = source = /note="Description of Artificial Sequence: Synthetic coding sequence"
  source 1..2580: mol_type = other DNA
atgggtccctggggttggaagctgcggtggacggtggcccttctgcttgccgcagcaggaactgcagtgggtgataggtgtgagaggaatgagttccaatgccaggacggaaagtgtatctcgtacaagtgggtgtgcgacggttctgcagagtgtcaggatggctcggatgaatcgcaagagacttgtttgtccgtgacctgtaagtccggagatttcagctgtggtggtcgtgtgaaccgatgtattccacaattttggcgatgcgacggacaggtcgattgtgacaatggaagtgatgaacagggatgtccaccaaaaacctgctctcaagacgagttcagatgtcacgatgggaaatgcatatcaagacaatttgtgtgtgattcggatcgtgactgtctcgatggatcagacgaggcttcctgtcctgtcctcacttgtgggccagcctcgtttcaatgtaactcctcgacctgtattccacagctctgggcctgcgataacgaccccgattgcgaggacggcagcgacgagtggcctcaacggtgtaggggtctttacgtgtttcaaggtgactcctcaccatgctccgcctttgagtttcattgcctttcaggagaatgcattcactcaagctggcgctgtgacggaggacccgattgcaaggacaaatccgacgaagaaaactgtgccgtggcaacttgtcgccccgacgagtttcagtgtagcgacggtaattgtattcatggttcgcggcagtgtgatcgtgaatatgactgcaaggatatgtctgatgaagtgggatgtgtcaatgtgactctgtgcgaagggccaaacaagttcaaatgtcattccggggaatgtataactctggataaggtgtgcaacatggctcgggactgccgggattggtcggatgaacctatcaaggagtgcggtactgcggcatgtctcgacaacaacggaggctgtagtcacgtctgtaatgctcttaagataggagccgaatgcctttgtcctgatggattccaactggtcgcccaacgtaggtgtgaagatatcgatgagtgccaggaccccgatacttgttcccaactttgcgttaaccttgaaggaggatacaagtgtcagtgtgaagagggatttcaattggatcctcacaccaaggcttgtaaagcggtgggttccattgcgtaccttttctttaccaaccgccatgaggtgcgcaagatgacccttgaccgttccgaatacacttccctcatccctaacttgaggaatgtagtggccctggacacggaggtggcgtccaatcgcatttactggagcgatctttcacagagaatgatttgctccacccaactcgacagagcacatggagtctcctcgtacgatactgtgatttcgagagacattcaggcacctgacggcctggccgtggactggattcattccaacatctactggacggactctgtcctggggactgtctccgtggccgatacgaagggagtgaagcggaaaaccctctttcgtgaaaatggctcaaagccacgcgccattgttgtcgaccctgtccacggctttatgtactggaccgactggggtaccccggcaaagataaagaaaggcgggctgaatggcgtggatatctactcgctggtcactgaaaacatccagtggcctaacggaattaccttggatctgcttagcggacggctttactgggtggatagcaagctccattccattagtagcatcgatgtgaacgggggcaatcgtaagaccattttggaagatgagaagcgtcttgcgcatcctttcagccttgcagtgttcgaagataaagtgttttggaccgatatcataaatgaggcgatcttttcagcaaatagattgactggatcggatgtgaacctgctcgcagagaacctgctctcgccagaagatatggtgctgttccacaaccttacccagccgaggggcgtcaactggtgtgagcgtactaccctgtcgaacggaggctgccagtacttgtgtctgccagcaccccagattaaccctcattcaccaaaattcacttgtgcgtgccccgatggtatgctcttggctagagatatgaggtcatgtcttaccgaagcagaagcagcggtggccacccaagaaacctcaaccgtcagactgaaagtgtcctccaccgccgtgcgcacccagcatactactactagacctgtccccgatacctcacgccttcccggtgcgaccccaggattgaccactgtggaaatcgtgaccatgtcgcaccaagcgctgggtgatgtggcaggacggggaaatgaaaagaagccgtcctccgtgcgcgccttgagcatagtgcttccaattgtgctcctggtgtttctgtgccttggagtgtttctgctgtggaagaactggcgccttaagaatatcaatagcataaacttcgataacccagtctaccagaaaactacggaggacgaggttcacatctgtcataaccaggacggatactcatatccttcgcgacaaatggtgtccctggaggacgatgtcgct

SEQ ID NO: 16440 - DNA, 2580 bp, synthetic construct
  misc_feature 1..2580: note = source = /note="Description of Artificial Sequence: Synthetic coding sequence"
  source 1..2580: mol_type = other DNA
atgggaccttggggttggaagctgaggtggactgttgctctcctgttggccgctgccggaaccgcggtgggcgaccgctgcgaaaggaacgagttccagtgccaggacggaaagtgtatcagctacaagtgggtctgcgacggatccgctgaatgccaggatggcagcgatgaatcgcaggagacttgtctctccgttacttgcaagtcgggagatttctcatgcggaggtcgggtgaatcggtgcataccgcaattttggcgctgcgacggacaggtggattgcgacaacggatctgatgaacaggggtgcccgccgaaaacttgcagccaggacgaattcagatgccatgacgggaagtgtatatcccgccaatttgtttgcgactcggaccgagactgcctcgatggctccgacgaggcctcctgtcccgtgttgacttgcggcccggcctcgttccagtgcaatagcagcacttgcattccacaactgtgggcgtgcgacaacgatcccgattgcgaggatggctcagatgaatggccgcaacggtgccgcggactctacgtttttcaaggggattccagcccttgctcagccttcgaattccactgcctgtccggggaatgcatccactcatcctggcggtgtgatgggggacctgactgcaaagataagtccgacgaggaaaattgtgcggtggcgacttgccggccggatgaattccagtgctcagacggtaactgcatccatggttcgcggcagtgcgaccgcgaatatgattgcaaggacatgtcagacgaggtcggttgtgtgaacgtgactctctgtgagggccctaacaaattcaagtgtcactcaggagagtgcattactcttgataaagtgtgcaacatggcacgcgattgtagagactggtccgacgagccgatcaaagagtgcggaaccgctgcttgccttgacaacaacggcggatgttcacatgtgtgtaatgctctgaaaattggggccgagtgcctctgtccagacggattccaattggtggctcagcggcgctgcgaagatatcgacgaatgccaggaccctgacacgtgctcgcaactgtgcgtgaacctggagggaggttacaaatgccagtgcgaagagggattccagctggatccgcatactaaagcctgcaaggccgtcggctcgatcgcctacctgttcttcaccaaccggcatgaggtccggaagatgactctggatcgctcagaatacacctctctcatcccgaatctgcgcaatgtcgttgcactcgacactgaggtggcaagcaatcgcatctactggtcagatttgtcacagcgcatgatctgctcaactcagctcgaccgggcgcacggagtgtccagctacgatacggtcatcagcagggatattcaggcacctgacggactcgccgtggactggatccactcaaatatctactggacggactcggtgctggggactgtgtcagtggcggataccaaaggcgtcaagcgcaagaccttgttccgcgaaaacggatccaagccgcgggctatcgtggtggacccggtgcacggctttatgtactggactgactgggggactccagcgaagatcaaaaagggcggactgaatggcgtggacatctactcgctggtgaccgagaacatccaatggcctaacggaataacgcttgatttgttgtcaggtcgcttgtactgggtcgactcgaagctccattccatctccagcatcgacgtcaatgggggcaatcggaaaaccattctcgaagatgaaaaacgcctggcccacccgttctcgctcgccgtgttcgaggacaaggtgttctggaccgatatcataaacgaggcaattttctccgccaacagactgaccggatctgatgtcaatctcctggcggaaaacctgttgtctccggaagatatggtcctcttccacaacctgacccaaccgcggggggtgaactggtgtgagcggacgactctgagcaacggtggctgccaatacctgtgccttccagccccacagatcaacccccattccccgaagtttacctgtgcctgcccagacggcatgctgctcgcgcgtgatatgcggagctgtctcactgaagccgaggcggcagtcgccactcaagagacttccactgtgcgcttgaaggtgtcgtccactgcggtgagaacgcagcacaccacgacccggcctgtccccgatacctcacgcctgccgggtgccactccaggcctgaccaccgtggaaatcgtcactatgtcccatcaggcactgggggacgtggcgggtcgaggaaacgagaaaaagccatcttcagtgcgcgctctgagtatcgtcctgccgatcgtgctgctggtctttttgtgcctgggagtgttcctgctgtggaagaactggcggctgaaaaacatcaattccatcaatttcgacaatccagtgtatcaaaagaccaccgaggacgaagtgcatatctgtcataaccaggacggatactcgtacccctcgcggcagatggtgtcactcgaagatgacgtggca

SEQ ID NO: 16441 - DNA, 2580 bp, synthetic construct
  misc_feature 1..2580: note = source = /note="Description of Artificial Sequence: Synthetic coding sequence"
  source 1..2580: mol_type = other DNA
atgggtccttggggttggaaacttcgctggactgttgcactgctcttggcagcagccggcaccgccgtcggggatcggtgtgagagaaacgaattccagtgccaggacggcaagtgcatctcttacaaatgggtctgtgatggatcagccgaatgtcaagacggctccgatgagtcccaagagacttgcctttcggtcacttgtaaatccggtgatttttcatgcgggggtagagtgaatcgttgtataccgcaattttggcgctgtgatggacaggtggattgcgataacggatcggatgaacaagggtgtcctcctaagacctgtagtcaagatgaatttagatgtcatgacggcaagtgtatttcaaggcaatttgtgtgcgattccgaccgagattgtctggacggaagtgatgaagcctcatgtcccgtgctgacgtgcggcccggcatctttccaatgcaattcgtcgacttgcatcccccaattgtgggcatgtgataacgaccctgattgcgaggatggtagcgacgaatggcctcaacggtgtagaggcctgtatgtctttcagggcgactcatcgccctgttcggcctttgaatttcattgtctctcaggagagtgtatccactcctcatggcggtgcgatgggggacctgattgtaaggacaagtccgatgaggagaactgtgcagtggcaacctgtagacctgatgaatttcaatgctcggacgggaattgtatccacggctcaagacaatgtgacagagagtacgactgtaaggatatgtctgatgaagtgggatgcgtcaatgtcactctttgtgaaggaccaaacaagttcaaatgtcactccggagagtgtattaccctggataaggtctgtaacatggcaagggattgtcgagactggtccgatgaaccaataaaggaatgtgggactgccgcgtgtctggataacaacggcggttgttcacacgtgtgtaacgctctgaaaataggtgccgaatgtctctgtcctgatggttttcagcttgtggcccagagaagatgtgaggatatagatgaatgccaagatccggacacctgtagccagctttgtgtgaacctggaaggaggctacaagtgtcaatgtgaggaaggatttcagctcgatccacataccaaggcatgtaaggccgtgggaagcatcgcatacctgtttttcacgaatcgacacgaagtccgaaaaatgactcttgaccgctccgaatacaccagccttattcctaacctgagaaacgtggtggcactggacactgaggtggcatccaaccggatttactggtccgatctgagccagcggatgatctgttcaacccaacttgacagagcacatggtgtgtcatcgtacgatacggtgatttcgagggatatacaggcacctgacggattggccgtcgactggattcatagcaacatttactggactgattctgtgttgggaacggtgtcggtggcggataccaaaggcgtgaagagaaagaccttgtttagagagaatggtagcaagccacgagccatagtcgtcgaccccgtgcatggttttatgtactggaccgattggggcactcccgccaagattaagaagggcggccttaacggggtggatatctatagcctggtgactgaaaacattcaatggccaaacggcatcacccttgatctgctgtcaggacgcctgtactgggtcgatagcaaactgcacagcatttccagcattgacgtcaacggaggtaacagaaaaactatcctggaggacgagaagcgtttggcccatccattctcgctggccgtgtttgaagataaggtgttttggactgatatcatcaatgaggcaatcttctcggctaatagactgacgggaagcgatgtgaacctgcttgcggagaatcttttgtcaccagaagatatggtcctgtttcacaacctcactcaacctagaggagtcaattggtgtgaacgaaccaccctgtccaacggtggttgtcaatacctttgtctcccagctccacagattaacccacattcccccaagtttacttgtgcatgccccgatgggatgctgctggcgcgcgacatgcggtcatgccttactgaagcagaagcagctgtcgcaacccaggaaacttcgaccgtcaggcttaaggtgagctcaactgccgtgagaacccaacataccaccactcggcctgtgcccgatacgtcccggctgcccggtgcaacccctggactgactaccgtggaaatagtcactatgtcgcaccaagcactcggtgacgtcgcaggaaggggtaatgaaaagaagccttccagcgtgagagcactgagcatagtcttgccaatagtgctgctggtgtttctttgtctgggagtctttctcctctggaagaattggaggcttaagaacattaactcgattaacttcgacaatcctgtgtaccaaaaaaccaccgaggatgaggtccacatctgccacaaccaagacggctactcgtacccctcgagacagatggtgtccctggaagatgacgtggca

SEQ ID NO: 16442 - DNA, 2580 bp, synthetic construct
  misc_feature 1..2580: note = source = /note="Description of Artificial Sequence: Synthetic coding sequence"
  source 1..2580: mol_type = other DNA
atggggccatgggggtggaagctcaggtggaccgtcgccctgctgctagctgcagctgggaccgccgtgggtgatagatgcgaaaggaatgagtttcagtgccaggatggcaaatgcatctcctacaagtgggtgtgtgacggctctgctgagtgccaagacggaagcgacgaatctcaggaaacctgcctatccgttacttgcaagtctggtgatttctcctgcggcgggcgcgttaaccgctgtatcccacaattctggcggtgtgatggccaggttgattgtgataacggcagcgacgaacaggggtgccctcctaagacctgctcccaggatgagttcagatgtcacgatggcaagtgtataagcaggcaattcgtgtgtgactctgatcgtgactgtttggatggatctgatgaggcctcttgcccagtgctaacctgtggacccgcttctttccagtgcaattcctctacctgcatcccccagctgtgggcttgcgataatgatccagattgcgaggacgggagcgacgaatggcctcagcgatgtaggggcctgtacgtgttccagggagattcctccccttgctctgctttcgagtttcattgtctgtctggggagtgcatacatagttcctggcgctgcgatggcggaccagattgcaaggacaagtccgacgaggagaattgcgctgttgctacctgccggcctgatgaattccaatgtagcgatggcaattgtatccatggaagtcgccagtgtgacagggagtacgactgcaaggatatgtctgatgaggtggggtgcgtgaacgtgacactgtgcgaaggccccaataagttcaaatgccattcaggcgagtgcattaccctggacaaagtgtgcaatatggcaagggactgccgtgactggagtgacgaacccatcaaggagtgcggcaccgctgcctgtctggacaacaacggcggatgtagtcacgtctgcaatgccctgaaaatcggcgccgagtgtctatgccccgatggatttcagttggtcgcacaaagacgatgcgaagacattgatgagtgtcaagatcctgatacctgcagccagctctgcgttaatctggaaggcggatacaagtgtcagtgcgaagagggcttccagctggatccccatacaaaggcctgcaaagccgtgggctccatcgcctacctgttctttacaaatcgacatgaagtgcgtaaaatgaccctggatcgcagtgagtatacctctttgatacctaacttacgtaatgtagtggctctggataccgaggtggccagtaatcgcatctactggagcgatctcagccaacggatgatttgttcaacccaactggatagagctcacggcgtctcatcttacgatactgtgatatcccgggacatccaggcacccgacggcctcgcagttgactggatccacagtaatatatactggaccgactcagtactgggtaccgtgtctgtggccgacacaaagggtgtgaaaaggaagactttattcagagaaaacggttctaaaccacgcgctattgtggtagatccagtgcatggcttcatgtactggaccgattggggcacccccgccaagatcaagaaaggcggcttaaatggcgtggacatttatagtctcgtgaccgagaacatacagtggcctaatgggattaccctagatttactaagcgggaggctgtactgggtggacagtaaactgcattccatctcttctattgacgtcaatggtgggaatcggaaaacaatacttgaagatgaaaagcggctggctcacccctttagcctggcagtttttgaagacaaggtcttttggaccgatatcatcaacgaagctatcttttctgcaaatcggctgaccggctctgacgtgaatttactggccgagaatctgttgtcccccgaagacatggtgctgtttcacaatcttactcagccccgtggtgttaactggtgtgagaggaccaccctcagcaatggcgggtgtcagtacctctgcctgcccgcacctcaaatcaaccctcattcaccaaagtttacctgcgcatgtcccgacggaatgctactggcaagagatatgcggagttgcctgactgaagccgaggctgctgtggccacccaggaaacctcaaccgtgcgcctgaaggtctcctccactgctgtgagaacacagcacactaccacccgtcccgtgccagataccagccgtctgcctggagccacccctgggttgactaccgtagaaatcgtgaccatgtcccatcaggccctgggcgacgttgccggccgcggcaatgagaagaaaccaagcagtgtgagagcactgtccattgttttacccattgtgctactagtgtttctgtgccttggcgtgtttttactttggaagaactggcgccttaagaacataaactctatcaatttcgataacccagtataccaaaaaaccaccgaagacgaggttcatatttgtcacaatcaggacgggtactcctaccccagccgacaaatggtttcactggaggacgatgtggct

SEQ ID NO: 16443 - DNA, 2580 bp, synthetic construct
  misc_feature 1..2580: note = source = /note="Description of Artificial Sequence: Synthetic coding sequence"
  source 1..2580: mol_type = other DNA
atgggaccatggggatggaagctgaggtggaccgtggcattgctgctggccgccgccgggacggccgtgggtgacagatgcgagagaaacgaattccaatgccaggacggcaagtgcatcagctacaagtgggtgtgcgacggatccgcggaatgccaagatggatcggacgaatcccaagaaacttgtctgtccgtcacctgcaaatcgggagatttttcgtgcggcgggagggttaacagatgcatccctcagttttggcgttgcgacggacaggtcgattgcgacaatgggagcgacgaacaaggctgcccaccgaaaacctgcagtcaggacgagttcagatgccacgacggaaagtgcatctcgcgccagttcgtgtgtgacagcgaccgcgactgcctcgacgggtccgatgaggcgagctgtccagtccttacctgcggaccggcctcgttccagtgcaactccagtacgtgcattccccagctttgggcgtgtgacaacgaccctgactgtgaggacggctcggatgagtggccccagaggtgccggggcctctatgtctttcagggagattcgtcaccgtgttcggccttcgaattccattgtctgtcgggcgagtgcatccactcgtcgtggcggtgtgatggaggaccagactgcaaggataaatccgatgaagaaaactgcgccgtggcaacgtgtagacctgatgaatttcaatgtagcgatggaaactgtatccacggtagccgccaatgcgacagggagtacgattgtaaggacatgagcgatgaagtggggtgcgtgaatgtaaccctctgcgagggcccgaataagttcaagtgccatagcggggagtgtatcacgcttgacaaggtgtgcaacatggctcgcgactgccgtgactggtccgacgaaccaatcaaggaatgcggcaccgcagcatgcttggacaataacggaggttgcagccatgtgtgtaacgctctgaaaattggcgccgaatgcctttgtccggatggattccaactcgtcgcacagaggaggtgcgaagatatcgacgagtgccaagatcccgatacttgcagccagctctgcgtgaacctcgagggagggtataagtgccagtgtgaggagggttttcaactcgacccgcacactaaagcctgcaaggcagtgggatcgattgcgtacctgttcttcaccaatcgccatgaagtgagaaagatgactctggaccgctcagaatacacctcgctcattccgaatctgagaaatgtggtcgcgttggatacggaagtggccagcaataggatctactggtcagatttgtcgcaacgcatgatctgctccacccagctcgaccgggctcacggagtctcgtcatacgacaccgtgatcagccgcgatatccaggccccggatggcctcgccgtggactggatacactcgaatatctactggactgatagcgttctggggactgtctccgtggccgacactaaaggcgtgaagagaaagaccctgttccgcgagaatggctcgaagccacgcgccatcgtggtcgaccccgttcatggcttcatgtactggactgactgggggactcccgcgaagatcaagaaaggaggtctgaacggggtggacatttactctctggtgacggagaatatccaatggccgaacggcatcaccctcgatttgctgtcgggacggctgtactgggtcgactcgaaacttcactccatcagctcaatcgacgtgaacggaggcaacaggaaaacgatcctggaggacgaaaagcgcttggcacatcctttctcgctggccgtgtttgaagataaggtgttttggaccgacatcattaacgaggccatcttttccgcaaaccgcctgactggatcggacgtgaatctgctggccgaaaatctgctctccccggaagatatggtgctgttccacaatctgacgcaaccccgtggagtgaactggtgtgagcggactaccctgtcaaatggcggatgccagtacctgtgccttccagccccgcagatcaatcctcactcgccgaaattcacctgcgcttgtcctgacggaatgctgctggctcgcgacatgcggtcctgcctcaccgaagcagaagccgctgtggccacccaggagacttccaccgttcgactcaaggtatcgagcaccgcggtccgcacccaacacactactacgcggccagtgccggatactagcagactccctggggcgacgccaggattgactacggtggagattgtcaccatgtcccatcaagcactcggggacgtggctgggaggggtaacgaaaagaaaccatcaagcgtacgggcgctctcgatcgtgttgccgattgtgctcctggttttcctgtgccttggcgtctttctcctttggaaaaactggcggctcaagaacatcaactcaattaacttcgataacccggtgtaccagaaaaccactgaagatgaagttcatatctgccacaaccaggacggatactcttacccctcacggcaaatggtttcgttggaagatgacgtcgcg

SEQ ID NO: 16444 - DNA, 2580 bp, synthetic construct
  misc_feature 1..2580: note = source = /note="Description of Artificial Sequence: Synthetic coding sequence"
  source 1..2580: mol_type = other DNA
atgggaccttggggttggaagctgaggtggaccgtcgccctgttgctggcagcagcaggcaccgcagtgggcgaccgatgtgaacggaacgagtttcaatgtcaagatgggaagtgcatttcctataagtgggtttgcgatggatcagcggagtgtcaggatggctccgacgaaagccaggaaacctgtctctccgtgacgtgtaaatccggtgactttagttgtggcggaagagtgaacaggtgtataccgcagttctggagatgcgatggacaggtggattgtgataacggaagtgatgaacagggatgcccacctaaaacctgttcccaagatgagtttagatgtcacgacgggaagtgtatttcccgtcagttcgtgtgtgactccgacagagattgtctcgatggaagcgacgaggcatcctgccctgttctcacttgcggcccggccagctttcagtgtaattcaagcacctgcattccccaactgtgggcgtgcgacaacgacccggattgtgaagatggaagcgatgaatggccgcaaagatgtcggggactctacgtctttcaaggcgattcaagcccatgctccgcatttgaattccactgtctgagcggcgaatgtattcattcctcatggcgctgcgacgggggacctgattgcaaggataagtcggacgaagaaaactgtgcagtcgcaacgtgtagaccagatgagtttcaatgctccgacggtaactgtatccatggttcccgtcaatgtgatcgcgaatacgattgtaaggacatgagcgatgaagtagggtgcgtgaatgtgaccctgtgtgaaggtccaaacaagtttaagtgccattcgggtgaatgtattacccttgataaagtgtgcaacatggctcgtgactgccgcgattggtcagatgaacctattaaggaatgtggaaccgcggcttgcctcgacaacaatggcggatgtagccacgtctgcaatgcgctgaaaatcggagcagaatgtctctgtcccgatggcttccagcttgtggcccaacgacggtgcgaggacatagatgagtgtcaagaccccgacacttgttcacagctgtgcgtgaacctcgaaggggggtacaagtgccagtgtgaagaagggtttcaactcgatcctcacaccaaggcgtgtaaggccgtcggttcaatcgcctacttgttctttactaaccgccatgaggtcagaaaaatgacccttgatagatccgaatacacttcacttatacccaaccttcgcaacgtggttgcactggatactgaagtggcatcgaaccggatctactggtccgacctgagtcaacgcatgatttgttcgacgcaactcgatcgagcacatggcgtttctagctacgacaccgtcattagccgcgatattcaggctcctgacggcctggcagtggattggattcattcgaacatttactggactgactcggtgcttggaactgtgtcggtggcagatactaagggtgtcaagcgaaagactttgtttcgggaaaacggatcaaagccgagggcaattgtcgttgacccagtccacggatttatgtactggacggattggggaactccagcaaagattaagaaaggtgggcttaatggagtggatatctactcactggtgaccgagaacatccagtggccgaacggtatcactcttgacctgctgtcgggccgtttgtattgggtggactccaaacttcactccatatcgtcaatcgacgtgaatggaggaaaccgtaaaactattttggaggatgagaagaggctggcacatccattttccctcgcagtatttgaagataaggtgttttggacggacatcattaacgaagctattttctctgcaaatcgacttaccggttccgatgtgaatctcttggccgaaaatcttctttcgccagaggatatggtgctgtttcataaccttacccagccccgcggggtcaattggtgtgagcgaaccaccctgtcaaacggcggctgccagtacctgtgccttcctgctcctcagatcaatccgcactctcctaaattcacctgtgcctgtcctgacggaatgttgctcgcccgagacatgagaagttgtctgaccgaggcggaggcagccgttgccactcaagagacttcaacggtccggctgaaagtctcgtcgactgcagtcagaacccaacatactactactcggcccgtgccagacactagccgcctccccggagcgacccctggacttactactgtggaaatcgtgactatgtcgcatcaggcgcttggagacgtggcggggagaggtaacgagaagaagccatcgtcagtccgcgcactcagcatcgtccttccaattgtgcttctggtgtttctttgtctcggcgtgtttctcctgtggaagaattggcgactgaagaatatcaactcgattaacttcgataacccagtgtaccagaaaaccaccgaagatgaagtccatatctgccataatcaagatggttacagctacccttcgagacaaatggtatctctcgaggatgacgtagcc

SEQ ID NO: 16445 - DNA, 2580 bp, synthetic construct
  misc_feature 1..2580: note = source = /note="Description of Artificial Sequence: Synthetic coding sequence"
  source 1..2580: mol_type = other DNA
atgggaccgtggggatggaaacttagatggactgtggcactgctgcttgcagcggccggaaccgcagtgggtgaccgctgcgaaagaaacgagtttcaatgtcaagacgggaaatgtatttcgtacaaatgggtgtgcgacggctcggcagaatgtcaagatggtagcgacgagagccaagaaacctgtctttcagtgacttgtaagtccggtgacttttcgtgcggcggtagagtgaataggtgtatccctcagttttggcgttgtgatggacaagtcgattgtgataacggtagcgatgaacaaggctgccctccgaaaacttgtagccaggatgaatttcggtgtcatgatggcaaatgcatctcgaggcagttcgtctgtgattccgatcgagattgtcttgacggcagcgacgaggcctcctgtcccgtgcttacttgtgggccagcatcctttcagtgtaactcatccacttgcattccgcagctctgggcttgcgataacgacccagattgcgaggatggatccgatgaatggccacaaagatgtcgcggactttacgtgtttcagggggatagctcgccatgttccgcgtttgagttccattgtctgtcaggggaatgcatacactcgtcttggcggtgcgacggagggccagattgcaaggataagtctgatgaggaaaactgtgccgtcgcaacttgtcgtccagacgaattccagtgctccgacggaaattgtatccacggaagccgccaatgcgacagagagtacgactgtaaggatatgagcgacgaagtgggatgtgtcaatgtgaccctttgtgagggtccaaacaaattcaaatgtcactccggtgaatgtatcactctcgataaggtctgcaacatggcgagggattgccgggattggagcgacgaacccattaaggagtgcggtaccgcggcctgtcttgacaataatggtgggtgctcccatgtgtgcaacgctcttaagatcggtgctgaatgcttgtgtcctgatggcttccagcttgtcgcacaaagaaggtgtgaagatatcgatgaatgtcaggacccggacacctgtagccagctttgtgtgaaccttgagggcgggtacaagtgccaatgtgaagaaggattccagctcgacccgcacaccaaggcatgcaaggcagtgggttcaatcgcgtacctgttctttactaacagacacgaggtccggaagatgaccctcgaccgctcagagtacacctcactgatacctaacctgcgcaacgtggttgcactggatactgaagttgcatcgaaccggatctactggtcggatctgtcgcaacgcatgatttgctcgacccagctcgatcgcgcccacggtgtgagcagctacgataccgtgatttccagagacattcaggcacctgatggactcgccgtggattggatacattccaatatctactggaccgattcagtgcttggcactgtgagcgttgccgataccaagggtgtcaaaagaaagactctgtttcgggagaacggcagcaagcctagggcaattgtggtcgatccagtgcatggattcatgtactggactgattggggcactccagcgaagattaagaaaggagggctgaacggtgtcgatatctatagcctggtgactgagaacattcaatggcctaacggaattacccttgacttgctgtcaggtcgcctgtactgggtggattcgaagctgcattcaatttcgtccattgatgtcaatgggggcaacagaaagaccattctggaggatgaaaagcggcttgcccatccattctcgctggcagtgtttgaagataaggtgttctggactgacattatcaacgaagccatctttagcgccaaccgccttactggctcagatgtgaatttgcttgccgaaaacctcctgtccccagaagatatggtgctgtttcataacctgacccaacctcggggagtgaattggtgtgaaagaactacgctctcaaacggaggctgccaatacctttgtctccctgcgccacagattaatccacattcgcctaaattcacctgtgcctgtcctgacggaatgctcctcgcacgagatatgcggtcctgtcttacggaagcggaagcagcagtggcaacccaagaaacttcgactgtgcggcttaaggtgtcaagcaccgcagtccgaacccaacacactactacccgccccgtgccagacacctctaggctcccgggggctacccctgggcttaccaccgtcgaaatcgtcaccatgagccatcaggcccttggcgatgtcgcgggacgaggtaatgagaagaagccgtcctcggtgagagcgctttccattgtgcttcccatagtcctgttggtctttctttgtctgggcgtgtttctcttgtggaaaaactggcgcctcaaaaacattaactccattaactttgataatccagtgtaccaaaagactacggaagatgaagtgcatatttgccataatcaggacggttacagctacccgtcccggcagatggtcagccttgaggatgacgtcgcg

SEQ ID NO: 16446 - DNA, 2580 bp, synthetic construct
  misc_feature 1..2580: note = source = /note="Description of Artificial Sequence: Synthetic coding sequence"
  source 1..2580: mol_type = other DNA
atgggtccctggggatggaaacttagatggaccgtggcacttctgctcgcagcagcgggtactgccgtgggagatcgctgtgaacgaaacgaattccagtgtcaagatggtaaatgtatttcttacaagtgggtgtgtgatggctccgccgaatgccaagacggatctgacgagtcgcaagaaacttgtctctccgtcacctgcaagagcggggactttagctgcggaggccgggtgaatcgatgcattcctcaattttggcggtgtgatggacaggtcgactgtgataatggttcggacgaacagggttgcccgcctaaaacgtgtagccaagatgagttcagatgtcatgatgggaaatgtatctcaagacaatttgtgtgtgactcagaccgggactgcctggacggatcggacgaggcatcgtgtcctgtgcttacgtgtggcccagcatccttccaatgtaattcctcgacctgtattccacaactgtgggcatgcgataacgatcctgactgtgaagatggaagcgatgaatggccgcagcggtgccgcggcctttacgtgttccaaggggattcatccccatgtagcgccttcgaatttcattgtctttcaggcgagtgtattcattcaagctggcggtgtgacggaggtcctgactgcaaggacaagtcggatgaggagaactgtgcggtggcaacctgccgaccagacgaattccaatgttccgacggaaactgtatccacggttcccgccagtgtgatagggaatacgattgtaaagatatgagcgacgaagttggatgcgttaacgtgactctttgtgaaggccctaataagtttaagtgccatagcggagaatgtattactctggataaggtgtgtaatatggccagagattgtcgcgactggagcgatgaacctataaaggaatgcggtacggcggcctgtctggacaacaatggtgggtgttctcatgtgtgtaacgccctcaagatcggagcagagtgtctctgccctgatggttttcagctggtggcacaaagacggtgcgaggatatcgacgaatgtcaagaccctgatacctgttcacaactttgcgtgaaccttgaggggggatacaaatgtcaatgtgaagaagggttccagcttgatccccatactaaagcatgtaaggcagtgggttcaatcgcatacctgtttttcaccaataggcatgaggtgcggaagatgacccttgaccgcagcgagtatacttcccttatccctaaccttcggaatgtggtggctctcgatacggaagtggcatctaaccggatttactggtcagatctgtcgcagcggatgatttgttcgactcaactggatagggcacacggggtgagctcctacgatactgttatttcccgcgatatccaggcccctgatggtcttgccgtcgattggattcatagcaatatctactggactgattccgtgcttggtaccgtctccgtggccgatactaagggggtgaagcggaaaaccctttttcgggaaaacggctcgaaaccacgcgctatcgtggtggatccagtccacggttttatgtactggactgactgggggaccccagccaagattaagaaaggaggattgaacggggtcgatatctactcgctggtcaccgaaaacattcaatggccaaatggaattaccttggatcttctgtccggacggctctactgggtggattctaaactgcattcgatatcatcgatagatgtgaatggcggtaatcgaaagactatcctggaagatgaaaagcgactggcacatcccttttcgctcgctgtgttcgaagataaggtgttttggactgatatcattaacgaggccattttcagcgccaacaggctcactggttcagacgttaaccttcttgccgagaatctcttgtcgcctgaggatatggtgctgtttcacaaccttacccagccacgcggtgtcaactggtgcgaaagaaccaccctgtcaaatggaggctgccagtatctttgcctgcctgcccctcagataaaccctcattcccctaagtttacgtgtgcctgcccagatgggatgttgctggcaagagatatgagatcgtgtctgactgaagcagaagctgcggtcgcgacccaggagacttcaactgtgcgactcaaggtgtccagcaccgcggtaaggactcaacataccaccacgcgacccgtcccggatacttcacgactgcccggcgcaactcctgggctgactaccgtggaaattgtgactatgtcccatcaggcgctgggggatgtcgcaggacggggcaacgaaaagaagccttcttcggtgagggcattgtccattgtgcttcctattgtccttcttgtctttctttgtctgggcgtgtttcttctttggaagaactggaggctgaaaaacattaactcgatcaatttcgataaccccgtgtaccaaaagaccactgaggatgaagtgcatatctgccataaccaggatggttactcgtacccaagccgacagatggtcagcctggaggatgacgtggcc

SEQ ID NO: 16447 - DNA, 2580 bp, synthetic construct
  misc_feature 1..2580: note = source = /note="Description of Artificial Sequence: Synthetic coding sequence"
  source 1..2580: mol_type = other DNA
atgggaccttggggatggaaattaagatggacagttgctttattattagctgcagcaggtactgccgttggtgatagatgtgaacgtaacgaatttcagtgccaagatggtaaatgtatttcatataagtgggtttgtgatggatcagcagaatgtcaagatggatcagatgagtcacaagaaacttgtcttagtgtaacatgtaaatcaggagatttttcttgtggaggtcgtgttaatagatgtattccacaattttggagatgtgatggacaagttgattgtgataatggatctgatgaacaaggttgtccaccaaaaacatgtagccaagacgaattcagatgtcatgatggtaaatgtattagtagacaatttgtttgtgattctgatagagattgtcttgatggaagtgatgaagcaagttgtcctgttcttacttgtggacctgcaagttttcaatgtaattcttcaacatgtattccacaactttgggcatgtgacaatgatcctgattgtgaagacggatcagatgaatggccacaaagatgtagagggttatacgtctttcagggtgatagttcaccatgctcagcttttgaattccattgcttatcaggtgaatgtattcattcttcatggcgatgtgatggaggtccagattgtaaagataaatcagatgaagaaaactgtgctgtagctacatgtcgtccagatgaattccaatgtagtgatggaaattgtatccatggatcaagacaatgtgatagagaatatgattgtaaagacatgtcagatgaagtaggatgtgttaatgttacactttgtgaaggaccaaacaaatttaagtgtcatagtggagaatgtattactcttgataaagtatgtaatatggctagagattgtcgtgattggtccgatgaaccaattaaggaatgtgggacagcagcatgtttagataacaatggtgggtgttcacatgtctgtaatgctcttaaaattggtgccgaatgtctttgtccagatggattccaacttgtagctcagagaagatgtgaagatattgatgaatgtcaagatccagatacttgtagtcaactttgtgttaatcttgaaggaggatataaatgtcaatgtgaagaaggattccaattggatccacatactaaagcttgtaaggcagttggaagtattgcttatcttttttttactaatagacatgaagtaagaaaaatgacattagatcgttcagaatatacaagtttaattccaaatttaagaaatgtagtagcattagatactgaagttgcatcaaatagaatttattggtcagatctttcacaaagaatgatttgttcgacacaattagacagagcacatggagtttctagttatgatactgtaattagtagagatatacaagctccagatggattagcagttgattggattcattctaatatttattggactgactctgtattaggtactgtgagtgttgcagatactaaaggtgttaagagaaaaacattatttagagaaaatggaagtaaaccaagagcaattgtagtagatccagttcatggatttatgtattggacagattggggaactccagctaaaattaaaaaaggaggacttaatggagttgatatttattctttagttactgaaaatatacaatggccaaatggaattactttagatttactttcaggacgtttgtattgggttgattcaaagttgcattctattagttcaatagacgttaatggaggaaaccgtaaaacaattttagaggatgaaaaaagattagcacatccattttctttagcagtatttgaagataaagttttttggacagatattattaatgaagctattttctctgctaatcgattaactggatcagatgttaatcttttagcagaaaatcttttaagcccagaagatatggttttattccacaatcttacacaaccacgtggtgttaattggtgtgaacgaacaacattaagtaatggtggatgtcaatatttatgtttacctgcaccacaaattaacccacatagtcctaaatttacatgtgcatgtcctgatggtatgttacttgctagagatatgagatcatgtttgactgaagcagaagctgcagttgctactcaagaaacatccacagtcagacttaaagtctcaagtacagcagtgagaacacaacatacgactaccagaccagtaccagatacatcaagattgccaggtgcaacaccaggacttacaacagtagaaattgtaacaatgagtcatcaagctcttggagatgttgcagggagaggaaacgagaaaaagccttcaagtgtaagagcattaagcattgttcttcctatagttttacttgtttttctatgtttaggagtatttcttttatggaaaaattggagattaaagaatattaattcaattaattttgataacccagtatatcaaaaaactactgaagatgaagtccacatctgtcacaaccaagatggttattcatatccaagtagacaaatggtttcattagaagatgacgttgca

SEQ ID NO: 16448 - DNA, 2580 bp, synthetic construct
  misc_feature 1..2580: note = source = /note="Description of Artificial Sequence: Synthetic coding sequence"
  source 1..2580: mol_type = other DNA
atggggccttggggatggaagctgcgctggacagtcgctctgctacttgctgctgctgggacagcagtcggagaccgatgtgaaaggaatgaatttcaatgccaggatggcaagtgcatatcgtataaatgggtgtgtgacggaagcgccgaatgtcaagacggcagtgatgagtcccaagagacctgcctgtcggtgacatgtaagagcggagattttagttgtggcggtcgtgtgaaccgctgcatcccccaattttggcgctgcgacggccaggtcgactgcgataacggatctgatgagcagggttgtccaccaaagacctgctcccaggatgaatttcgctgccacgatgggaagtgcatttcccggcagttcgtttgcgactctgatagagactgtctcgacggctcggacgaggcaagctgtcccgtgttaacatgcggaccagcctcctttcagtgtaactcaagcacatgtattccacaactctgggcctgcgacaatgatcccgactgcgaggatgggtccgatgaatggccacagcggtgccgaggactttatgtgttccagggagactctagcccctgcagcgctttcgagttccattgtctcagtggcgaatgcatacatagtagctggaggtgcgacgggggtcccgattgcaaagataagagcgatgaagagaattgtgccgttgccacttgtcgtcccgacgaatttcaatgctctgatgggaactgtatccacggtagccggcagtgtgacagagagtacgattgtaaggacatgagcgatgaggtcggttgcgtaaacgtgactctatgcgaaggacctaataaattcaaatgccattcaggggaatgtatcacactggataaagtgtgtaacatggcacgtgattgtagagattggtccgatgagcccattaaggagtgcgggaccgcagcctgcttggataataatggggggtgttctcacgtctgtaatgccctaaaaattggtgccgaatgcctctgccctgatggctttcagctggttgctcagcggaggtgtgaagatatcgacgagtgtcaggaccccgatacttgcagtcagttgtgcgtgaaccttgagggagggtacaaatgccagtgcgaggagggatttcagctcgacccccataccaaggcatgtaaggcagtgggcagcattgcttatctctttttcaccaacagacatgaagttcgcaagatgacactcgatcggtcggaatacacatctctgatccctaacctaaggaatgtcgtcgccttagacacagaggtggcaagtaaccggatttattggtcagacctttcgcaaagaatgatttgtagcacccagctggatcgggcccacggagtctcatcatacgacactgtcatctcacgagatattcaagcccccgatgggctggccgtggattggattcactccaatatttactggacagactccgttctgggtaccgtatccgtggcagacaccaaaggggtgaaacgcaagacgctgtttcgcgaaaacggatcaaagccgcgcgcaatagtggtagaccccgtgcacggatttatgtactggaccgactggggtaccccagcaaaaattaagaaaggcggactgaacggtgttgacatctatagtctcgtgaccgaaaacattcagtggcccaacgggattactctcgacctgcttagcggtcgcctctattgggtggacagtaaactgcactccatctcaagcatcgatgttaacggcgggaaccggaagactattctcgaggacgagaagcgtctggcccatcctttttccctggctgtgttcgaggataaggtgttctggacagatatcataaatgaagccatcttctctgccaatcggttgacaggatccgacgttaatctgttagccgaaaatttgctgtcacccgaggacatggtgctattccataatctcacgcagcctcgaggtgtaaactggtgtgagcggactacactgtcgaacgggggctgccaatatttgtgtctgccagctccacaaataaatcctcacagtcctaaattcacttgtgcatgtcccgacggaatgctcctcgcacgcgatatgaggtcgtgcttgacagaggccgaggctgctgtggccacacaggaaacttctacagtgcgcctcaaggtctcttccacggctgtgaggacgcaacacacgaccactcggccggtcccagatacctccaggctgcccggtgctacacctggcctgactaccgttgagattgttacgatgtcccaccaagccttgggcgacgtcgccggccggggaaatgagaagaagccctcttccgtccgcgcactgtctatcgtactccccatcgtgctcctggtgtttttgtgtcttggggtgtttctcctatggaaaaactggcgactcaagaatatcaattcgattaatttcgacaatccagtgtaccagaagacaacggaggacgaagttcatatatgtcacaatcaagatggatactcgtatccaagtcgccagatggtttctctggaggatgatgtggca

SEQ ID NO: 16449 - DNA, 2580 bp, synthetic construct
  misc_feature 1..2580: note = source = /note="Description of Artificial Sequence: Synthetic coding sequence"
  source 1..2580: mol_type = other DNA
atgggcccatgggggtggaagctaaggtggacagttgcgctgttgctcgccgctgcaggaaccgctgtaggtgacaggtgtgaacgcaacgaattccagtgtcaggacggcaagtgcataagttataaatgggtgtgcgacggttctgccgagtgccaggacggctctgatgagtcccaagaaacatgcctgtccgtcacttgtaagagtggtgacttctcatgcggcggtagagtcaatcggtgtatcccccagttctggcgttgcgacgggcaggtggactgtgacaacgggagcgacgaacagggctgcccacctaagacctgttcccaggacgaatttagatgtcatgatggaaagtgtatctcccgccagtttgtttgcgatagtgaccgcgattgtcttgatggctctgacgaagcatcttgtccagtgctgacctgcggtccagcctccttccaatgcaattcatcaacatgcataccacaactgtgggcctgtgataacgacccagattgcgaagacggatccgatgaatggccccagcgctgtagaggtctgtatgttttccaaggagacagcagtccatgctccgcattcgagtttcattgcctttctggagaatgtattcacagcagttggaggtgcgacggcggacccgactgtaaggataagtctgacgaggagaattgtgcagtggccacctgccggcccgacgagtttcaatgttctgatggtaattgcattcacggctctaggcaatgtgaccgagaatatgactgtaaggacatgagtgacgaggtgggctgcgtgaatgtaacattatgtgagggacccaacaagttcaaatgccactccggtgaatgcattactttagacaaggtctgtaatatggcacgagattgcagagactggtccgatgaacctatcaaggagtgtggaaccgctgcatgccttgacaacaatggcggctgttcgcacgtgtgcaacgcactcaagatcggcgcagaatgtttgtgccccgatgggttccagctggttgcccagcgccggtgcgaggacatcgatgagtgccaggacccagacacatgcagccaactgtgcgtgaacctggaggggggatacaagtgtcaatgcgaggaaggtttccaactggacccgcacacaaaggcttgtaaagccgtgggatccattgcctacttgttctttacaaaccgtcatgaagtccggaaaatgacactcgatcgcagcgaatatacttctctaattcccaatttacgtaatgtcgtggcgctggacactgaggtcgccagcaatagaatatattggtctgatcttagtcagcggatgatctgcagcacccagttggaccgtgcccacggagtgtccagctatgatacagtcatctcacgcgacatccaggcacctgatggactggcagtagactggatacattccaacatttactggaccgacagcgtactgggcaccgtgtccgtggcagacacaaagggagtgaaaagaaagacactcttccgagaaaatgggagtaagcctcgggcgatcgtggtcgatccagttcacggattcatgtactggaccgactggggaacacccgctaaaataaagaaaggagggctgaacggtgttgacatatactctcttgtgaccgaaaacattcagtggcccaacgggattacactcgatctcctgagcgggcgactttactgggtggactccaaactgcatagcatttcttccattgatgtaaacggcggcaatagaaagacaatcctagaggatgagaaaaggcttgcccatccgttctctcttgcggtgtttgaggataaggtcttctggaccgacatcatcaatgaggccattttttcagcaaatcgcctgactggctcagacgtgaacctattagccgagaatctgctatcacctgaggatatggtgctcttccataatctgacgcaaccgcgcggagtgaattggtgtgaacgaaccactctgagcaatgggggttgtcaatacctgtgcctgcctgctcctcagattaaccctcattcccccaaattcacttgcgcctgtccagacggtatgctgctggcgagggatatgaggtcatgcttgacggaagctgaggcagcggtggcaactcaggagacgtccaccgtcaggctgaaggtgtctagcaccgcggtgagaactcagcatactactactagaccggtgcccgatacatcccgtctcccaggggctacgcctgggctaactacagtggagattgtcacaatgagccaccaggctctgggggacgttgccggcagggggaatgaaaagaaaccctcaagcgttagagcactttcaatcgtcttgcccatcgtattactggtctttctctgcctcggggtctttcttttgtggaaaaactggcggctgaagaatatcaactctataaacttcgacaatccagtatatcaaaaaactactgaggacgaggtacacatctgccacaaccaggacgggtattcctatccatccaggcagatggtgtctctcgaggacgatgtggcc

SEQ ID NO: 16450 - DNA, 2580 bp, synthetic construct
  misc_feature 1..2580: note = source = /note="Description of Artificial Sequence: Synthetic coding sequence"
  source 1..2580: mol_type = other DNA
atggggccatggggatggaagctcagatggacagtagcgctcctgttggctgctgccggcacagccgtcggagatagatgcgagcggaatgagttccagtgccaggacggaaaatgcatttcctacaagtgggtctgtgacggttccgctgagtgtcaggacggaagtgacgagtcccaggagacttgccttagtgttacgtgcaaatctggggatttttcatgtggagggcgcgtgaaccgctgtatcccacaattctggagatgcgacgggcaagtggactgcgataacggttcagacgagcaggggtgccccccaaaaacctgttcccaggacgagttccggtgccacgacggtaagtgcatctccaggcagtttgtgtgtgatagcgatcgtgactgcctagacggatccgacgaagccagctgccccgtgctcacttgcggcccggcttctttccagtgcaatagcagcacctgcatcccccagttatgggcctgtgataacgatccagattgtgaggatggtagcgatgagtggcctcaacggtgtcgagggctttacgtttttcagggggacagtagcccttgctctgctttcgagtttcactgcttatcgggtgagtgcatccactccagttggagatgtgacgggggccctgactgcaaggataaaagcgacgaagagaattgcgccgtggctacctgtagaccagacgaatttcaatgtagcgatgggaattgcattcacgggagcaggcaatgtgatcgggaatacgactgcaaagatatgtccgatgaagttggctgcgtcaatgttacactgtgcgaggggccaaacaaattcaagtgtcattcaggagagtgcatcaccttggataaggtttgtaacatggcgagagattgtcgagattggagcgacgagcccattaaagaatgtggaaccgctgcctgcctggacaacaacggtgggtgctcgcatgtgtgcaacgctctgaaaataggcgctgaatgcctgtgcccagatggatttcagctggtggcccagcgcagatgcgaagacattgacgagtgccaagacccagatacatgttcccagctgtgtgtgaacttggaaggtggatacaagtgccagtgcgaggagggcttccagctggacccccatactaaagcctgcaaggccgtagggagtatcgcatatctcttcttcaccaacagacatgaggtaagaaagatgacactggacaggtcagagtacacctccctcataccaaatctgagaaacgtagtcgctctggataccgaggttgcctctaaccggatttattggagcgatctgtcccaaaggatgatctgcagtactcaattggaccgagcccacggagtttcttcttacgatacggtgatcagcagggacatccaagcccctgatggtctcgctgtggattggattcacagcaacatctactggacagattcagttttggggactgtgtctgtcgcagatactaagggggttaagcgcaaaacactgttccgcgagaacggatccaaaccacgcgctatagtggtggatcctgtccacggcttcatgtactggactgactggggaacacctgcgaagatcaagaagggaggccttaacggggtagacatttattctctggtgaccgagaatattcagtggcctaacggaattacattagacctcctgtcaggaagactgtactgggttgatagtaagctacacagcatctccagcattgatgtcaacggcggcaaccgtaagacaatcttggaagatgagaagaggctggcgcatcccttcagcctcgccgtgttcgaggacaaagtgttctggactgatattattaatgaggccatcttctccgccaatcggcttaccgggtcagacgtgaacttattggccgaaaacctgttgagccccgaagatatggttttgttccacaatctgactcaaccacgcggcgtcaactggtgcgagaggacgacactttccaatggcggatgccaatacctgtgcctgccggctccccagattaatccacatagcccaaagttcacttgcgcttgcccagacggcatgctattagcccgggacatgagaagttgcctgaccgaggccgaggccgccgtggccacacaggaaacatctaccgtacggctgaaagtatccagcacagccgtaaggactcagcatactactacacgacccgtccccgataccagcagactgccgggggctactcccggactgacgaccgtcgagatcgtgacgatgtcacaccaggctttgggtgacgtcgctggaagggggaacgagaagaaaccaagttctgtacgggctctttcaattgtactgcccatagtgctcctggtgttcctctgtttgggcgttttccttctgtggaagaattggcggctcaaaaacatcaacagcataaactttgacaatcctgtgtaccaaaagaccacagaggacgaggtgcacatctgccataaccaggacggctatagttatccctcgagacagatggtaagcttagaagatgacgtggcc

SEQ ID NO: 16451 - DNA, 2580 bp, synthetic construct
  misc_feature 1..2580: note = source = /note="Description of Artificial Sequence: Synthetic coding sequence"
  source 1..2580: mol_type = other DNA
atgggcccttggggctggaagttacgttggaccgtggcactcctactcgccgcggccggcacagcagtgggagacaggtgcgaaaggaacgagttccagtgccaagatggaaaatgtataagctataaatgggtctgcgacgggtccgctgagtgccaggacggtagcgatgagagtcaggaaacttgtctgagcgtcacctgtaaatcgggtgacttttcatgcgggggccgagttaaccggtgcatacctcagttctggcggtgtgacgggcaggtcgactgtgataacggaagcgatgagcaaggatgccctcccaaaacctgctcacaggacgaatttcgttgccacgatggtaaatgcatatcacggcagttcgtctgcgactcggacagggactgtcttgacggcagcgacgaggcctcctgtccagtgctaacatgtgggccggcaagcttccagtgcaatagtagtacatgtattccccaactctgggcctgcgataatgaccctgactgtgaagatggatccgatgagtggccacagcggtgccggggactgtacgttttccagggagacagctctccatgttctgcttttgagtttcactgcctatcgggagaatgcattcatagctcctggcgatgtgacgggggaccagattgcaaagacaagtctgatgaagaaaactgtgccgtggctacgtgcagaccagatgagtttcaatgctccgatggcaactgcattcatgggagccggcagtgcgaccgcgaatacgattgcaaggatatgtctgacgaagtaggttgcgtgaacgttactttgtgtgaaggcccaaataaatttaaatgtcatagtggagaatgtataacactcgataaggtgtgcaacatggccagggactgcagagactggtccgacgagcccattaaagaatgtggaacagctgcctgcctagataataacggcggatgtagccatgtgtgcaacgctttgaaaataggcgccgaatgtctgtgcccggacggcttccagcttgtggcacagcggcgatgcgaggatattgatgagtgtcaggatcccgacacgtgttcacagctttgtgtcaacctggaaggaggttataagtgccagtgcgaggagggctttcaactcgaccctcacacaaaagcctgtaaggccgttgggtccatagcatatctgttcttcaccaaccgccacgaggtaagaaagatgacactggaccgcagtgaatacacttcgcttatcccaaatctgaggaatgtcgtggccctggacaccgaggtggcttctaaccgcatttactggtctgatttgagccagagaatgatctgcagtacccagcttgaccgggcgcacggagtgagcagctacgacaccgtaatttctcgagatatccaagcccctgatggccttgcggtggactggatccatagtaacatctattggacggattcggttttgggtacggtgtccgtggcggacaccaaaggcgtaaagcggaagaccttattcagggagaacgggagcaagcccagggctatcgtcgttgatccagtgcacgggttcatgtattggactgattggggaactcctgcaaaaatcaaaaaaggcggcctgaatggagtggacatctatagtctggtgacagagaatatccagtggcccaatggaattacgctcgacctgctgtctggacggctctactgggtggattccaagctgcactccatcagcagcattgacgtgaacggagggaatagaaagactatcttagaagatgaaaagcgcctcgctcaccccttctctcttgcggtcttcgaagataaggtattttggaccgacatcataaacgaggccattttctcagccaacagattaacgggcagcgatgtgaatctgctggccgagaacctcttaagccccgaggacatggtgctctttcataacctaacacagccccgcggggtcaactggtgcgaacgtactaccttaagcaacggcggatgtcagtacctatgcctgccggccccccaaatcaacccccattctcccaaattcacatgcgcatgcccagatggaatgctgctggccagggacatgcgttcatgcctgacagaagccgaggctgccgtggccacacaggagacttctacagtccgtttgaaggtttcctctaccgccgtgcgaactcaacatacaaccacacgacctgtgcctgacacctctcgcctgcctggggctaccccagggctgactactgtggagatcgtgaccatgtcacaccaggcattaggggatgtcgccggacgggggaacgaaaaaaagccaagctccgtgcgtgcactttcaatagtcctcccaatcgtcctgcttgttttcctttgtcttggcgtttttctgctttggaaaaactggcgtctgaaaaatatcaatagcataaatttcgataaccctgtgtaccagaagactacagaggatgaagttcacatctgtcacaaccaggacgggtatagctatcccagcaggcagatggtttctctcgaggatgatgtagcg

SEQ ID NO: 16452 - DNA, 2580 bp, synthetic construct
  misc_feature 1..2580: note = source = /note="Description of Artificial Sequence: Synthetic coding sequence"
  source 1..2580: mol_type = other DNA
atgggaccatggggatggaagctgaggtggaccgtggcgcttctgctcgcggctgccggaactgcggtcggagatcgctgcgagcgcaatgaatttcagtgccaagacggtaagtgcatcagctataagtgggtttgtgacggaagtgctgaatgccaggatggttctgacgaatcgcaggaaacgtgcctttcagtcacctgcaagtccggtgacttcagctgcggtggccgagtgaatagatgtataccgcagttttggcgctgcgatggacaggtcgactgtgacaatggatccgacgaacaggggtgcccgccaaagacctgctcccaagacgaattccggtgccatgacggcaagtgtatctctcgacagttcgtgtgtgactcagatcgcgactgcctggatgggagtgatgaggcgtcctgcccggtcctcacctgcggaccagcctcattccaatgcaattcttccacctgcattccacaactgtgggcctgtgacaatgacccagattgcgaggacggaagcgacgagtggccgcaacgctgcaggggcctgtacgtctttcagggagacagcagcccgtgctcggctttcgaattccactgcctgtccggcgaatgcatccactcctcctggcggtgcgacggcggccccgactgcaaggacaagagcgatgaggagaattgcgctgttgccacttgtcgcccggacgagttccagtgctcggatgggaattgtatccacggttcgcgccaatgcgatcgcgaatacgattgcaaggatatgtcagacgaggtcggttgcgtcaacgtcaccctttgcgagggcccgaacaagttcaagtgccactcaggagaatgtataaccctggacaaggtctgtaacatggcccgtgattgtcgggactggtcggacgaacctatcaaggagtgtgggactgcagcgtgcttggacaacaacggagggtgctcccacgtgtgcaacgcattgaaaatcggcgctgaatgcctctgcccagacggattccaactggtggcccaacggcgctgcgaagatatcgatgaatgccaagacccggatacctgctcacagctctgtgtgaacctggaagggggctacaaatgccagtgtgaggagggctttcaactggacccccatactaaagcctgcaaagcagtgggatccatcgcgtacctcttctttaccaatcgccatgaagtcagaaagatgaccctcgacagatccgaatacacttctcttatcccgaacctcaggaacgtcgtggcccttgataccgaagtcgcttccaacagaatctactggtctgacctgtcacagcgcatgatctgtagcactcagctcgatcgcgcacatggtgtgagctcatacgacaccgtgatcagccgcgatattcaggccccggacgggttggcggtggattggatccattcgaatatctattggacggacagcgtgctgggaaccgtctcggtcgccgatacgaaaggtgtgaagcgcaagaccctcttcagagagaatggatcgaaaccgagagccatcgtcgtagatcccgtccatggatttatgtactggacggattggggaactcccgcaaagatcaaaaagggcggactgaacggagtggacatctactcccttgtcacggagaacatccagtggcctaacggaatcaccttggacctgctgagcggacgcctgtactgggtcgattcaaagctgcactcaatttcgtccatcgatgtcaacggagggaataggaaaaccatcctggaggacgagaagaggctggcgcacccattctcacttgccgtgttcgaggacaaggtgttctggactgacatcatcaacgaagccatcttctccgccaaccggttgacgggatcggatgtgaatctgctggccgagaacctgctgtcgcccgaggatatggtgttgttccataacctgacccagcctcggggcgtgaattggtgcgagcgcactaccctgtcaaacgggggatgccaatacctgtgcctccctgccccacagatcaatccacactcgccgaagtttacctgtgcgtgtccggatggcatgctgctggcccgggacatgagatcgtgcctgaccgaagcagaggccgcggttgccacccaggagacttcaactgtccgcttgaaggtgagctcgactgccgtgcggacgcagcacaccactactaggccggtgccggatacttcgcgcctgccaggggccacgcccgggctgaccaccgtggagattgtgactatgtcccatcaggcactcggagacgtggccggtagagggaatgagaaaaagcccagctccgttcgcgccctgtcgatcgtcctccctatcgtgcttcttgtctttctgtgccttggagttttcctcttgtggaagaactggagactcaaaaacataaactcgatcaactttgataacccggtttaccagaaaacgactgaggatgaggtgcacatctgccacaaccaggacgggtacagctacccatcgaggcaaatggtgagcttggaagatgacgtcgcc

SEQ ID NO: 16453 - DNA, 2580 bp, synthetic construct
  misc_feature 1..2580: note = source = /note="Description of Artificial Sequence: Synthetic coding sequence"
  source 1..2580: mol_type = other DNA
atgggcccatgggggtggaagctccgatggacggtcgctctcctgcttgccgcagccggtacggcagtgggagatcggtgtgaacggaacgagtttcagtgtcaggatggaaaatgcatttcatataaatgggtttgcgacggtagcgccgagtgtcaggacggatcagatgagtcgcaggaaacatgcctttcggtaacatgcaagagcggagatttcagttgcggcggaagggtgaataggtgcataccgcagttctggaggtgtgatggccaggtggattgcgataacggcagtgatgagcaagggtgccctccgaagacatgctcccaggacgaatttcgatgtcacgatgggaaatgcatcagccggcagtttgtgtgcgacagtgacagggactgcctggacgggtctgacgaagccagctgccccgtattgacctgtggccccgcaagcttccaatgtaactcatccacatgcatcccacagttgtgggcctgcgacaatgatcctgactgtgaggacgggagcgacgaatggcctcagaggtgcaggggattatacgtctttcagggggattcatctccctgtagcgcctttgagtttcactgtctgagcggagagtgcatccattccagttggaggtgcgacgggggtcctgattgtaaagacaagagtgacgaggagaactgtgccgttgctacctgcaggcccgacgaatttcagtgctcagatggtaattgcatacacggttcaaggcaatgtgacagggaatacgactgcaaggatatgtccgatgaagtaggctgcgttaacgtgaccttatgtgagggacctaataaatttaagtgtcacagcggcgaatgtattaccctagataaggtctgtaatatggctcgagattgtcgggactggagcgatgagcccattaaagaatgcggcactgccgcgtgcctcgataataatggagggtgtagtcatgtatgtaacgcgctcaagatcggtgcagaatgtctctgccctgacggattccagcttgtggctcaacgtcggtgtgaggacatcgacgagtgtcaggatccggacacgtgtagccaactctgtgtgaacctcgaaggcggttataagtgtcagtgtgaagagggttttcagcttgacccccacactaaggcctgtaaagccgtcggtagcatcgcctacctgttctttacaaaccgccacgaggtgagaaaaatgacattggataggagcgagtacacttcactgatccccaacctgagaaacgttgtggcgctcgacactgaggtggccagcaaccgcatttattggagcgatctgtctcagcgtatgatatgctccactcagctggaccgagcacatggcgttagtagctatgacacggtgatatccagggatattcaggcccccgacggcctggccgtggattggattcactctaatatttattggactgattccgtcttggggaccgtctccgtggcagataccaaaggagtaaagaggaaaacgctgtttcgcgagaacggatcgaaaccgcgggctatcgtggtcgatcctgtgcatgggttcatgtactggacagactggggaacacccgcaaaaattaagaaaggcggtctgaacggtgtcgacatctacagcctagtgaccgagaacatccagtggccaaacggaataacattagatttgttgagtggccgattgtactgggtggactccaaattgcactccatctcatccatagacgttaatgggggcaacaggaaaacaatattagaggatgaaaagaggctcgcacaccccttcagcttagccgttttcgaagacaaggtattttggaccgatataataaacgaagccatctttagtgctaatcgccttaccggctccgatgttaacctcttggcagaaaacctgctgagccctgaggacatggtactgttccataacctgactcagcccagaggagtaaactggtgtgagcggacaaccttgtccaacggagggtgccagtatctgtgcttgccagctccccagattaatccacatagtcctaagttcacctgtgcctgtcctgatggcatgctcttggccagagatatgcggagctgtctcacagaagcagaggcagcggtcgccactcaggagacctccaccgtgcgcctgaaggtctccagcaccgcagtcaggactcagcacactacaactaggcctgttcctgatacttcccggctgccaggtgcgacgcctggccttacaaccgtcgagattgttacaatgtctcatcaggccttgggcgacgtggctggtagaggcaacgagaagaagcctagttcagtccgtgccctatcaatcgtgctacctatagtgctgctggtgttcctgtgcctaggtgttttccttctctggaagaactggcggctcaagaatatcaactctatcaattttgacaacccagtgtaccagaaaaccactgaggatgaagtgcacatttgccacaatcaggatgggtacagttatcccagtagacaaatggtgtcactcgaggatgatgtggca

SEQ ID NO: 16454 - DNA, 2580 bp, synthetic construct
  misc_feature 1..2580: note = source = /note="Description of Artificial Sequence: Synthetic coding sequence"
  source 1..2580: mol_type = other DNA
atgggcccttgggggtggaagctgcgatggaccgtagccctgctactggcggcggccggcaccgccgttggcgaccggtgtgagcggaacgaattccagtgtcaggatggtaaatgcatttcatacaagtgggtgtgcgatggttccgctgaatgtcaagacggcagtgatgagagccaggagacctgcctctctgtgacttgcaaatctggcgacttcagctgcggcggaagagtgaatcgctgcatcccccagttttggagatgtgatgggcaggtggactgtgacaacggaagcgatgagcagggttgcccgccaaaaacttgttcccaagatgaattccgatgtcatgacggcaaatgcatttcacgacagtttgtctgcgacagtgacagagattgtctcgatggttctgacgaggctagttgtccagtcctcacctgcgggcctgcatctttccagtgtaattctagcacctgcatcccccaactgtgggcctgcgataatgaccccgactgcgaggatgggtcggacgagtggccgcagcggtgcagagggctgtatgtgttccagggggacagtagtccttgttccgctttcgagttccactgtctgtctggcgagtgcatccacagttcttggagatgcgacggagggcctgattgtaaggataagagtgatgaggagaactgtgccgtcgcaacgtgtcggcccgacgaattccagtgtagcgatggtaattgtattcacggaagtcgccagtgtgatcgcgagtacgattgtaaggatatgtccgatgaggtcggctgcgtgaacgtcactctttgtgaaggtccgaataagtttaagtgtcactcgggagagtgcatcacccttgacaaagtttgtaacatggccagagactgtagagactggtcagacgagccgataaaggaatgtggcactgccgcctgtctcgataacaacggcggatgctcgcacgtgtgcaatgcactgaagattggagccgagtgtctgtgtccagacggcttccagctggtggcacagaggaggtgtgaggacatcgatgagtgccaggatcctgacacgtgttcacagctttgcgtgaacctggagggagggtataagtgtcagtgcgaagagggctttcagctagatccacatacaaaggcatgtaaagctgtcggtagtatcgcgtaccttttttttacaaataggcacgaggtgaggaaaatgactttggacaggtccgaatatacatcacttatccccaatctgcgcaacgtggtggccctggacacagaggtggcatctaacagaatctattggtcagacctatcacaacggatgatttgttctacccagttggatcgagcccatggagtttcatcatatgataccgtgatttcccgggatatacaggctcccgatggcctggccgtggattggatacactcaaatatctactggacagatagcgtccttgggacagttagtgtagccgatacaaaaggcgtgaaacgaaagacactttttagagaaaacggatctaaacctcgcgccattgtcgtggaccctgtgcacggctttatgtattggacggattggggcacccccgcaaagattaaaaaaggaggtctgaatggcgtcgacatttacagtctggtgacggaaaacattcagtggcccaacgggatcactctggacctgttgagcggccggttatactgggtagatagcaagctccactcaatttcatctatcgacgttaatggtgggaataggaagaccattttggaggatgagaaacgattggcacaccccttcagccttgctgtgttcgaggataaagtcttctggacagatataattaacgaggccatcttcagtgctaataggttaaccggcagcgatgttaacttgctagcggagaaccttttgagcccagaggatatggttctcttccataacctcacccagccacgtggggttaactggtgcgagcgcacaacgctgagcaatggaggctgccagtacctgtgcttgccggccccacagatcaacccccactcccccaaatttacctgtgcgtgccccgatggcatgttgctggcaagagacatgcgctcctgtctaacagaggctgaggccgctgtggctacacaggaaaccagcactgtacggctgaaagtgtcgagcacagctgttcgtacccaacataccacaaccagacctgttcccgacacctcacggctgcctggggctacacctgggctcactactgtggagattgtgacaatgtcacatcaggccctgggcgatgttgctggacgtggcaatgagaagaagccgtcatcagtcagagctctctccattgtactccccatcgtactactcgtgttcttgtgcctgggcgtttttttgctttggaagaactggcgcctcaaaaacatcaactctatcaactttgataatcctgtttaccagaagacaaccgaggacgaagtgcacatttgccataaccaggatggttattcctaccctagtcgtcagatggtgtcactggaggatgacgtggct

SEQ ID NO: 16455 - DNA, 2580 bp, synthetic construct
  misc_feature 1..2580: note = source = /note="Description of Artificial Sequence: Synthetic coding sequence"
  source 1..2580: mol_type = other DNA
atgggcccgtggggatggaaattgcgctggaccgtggcgcttctcctcgcagccgctggaactgccgtgggcgatcgctgcgaacgcaatgaatttcagtgtcaagacggaaagtgcatctcctacaaatgggtctgcgatggtagcgcggagtgccaggatggatctgacgagagccaagaaacctgcctcagcgttacttgtaagtcaggagacttcagttgcgggggacgggtgaaccgctgcatcccgcagttctggcgctgcgacggacaagtggactgcgacaatggaagcgatgagcagggatgccccccaaagacctgttcgcaggacgaattcagatgtcacgatggtaaatgtatctcccggcagttcgtgtgcgattcggaccgggactgcctggatggctcggacgaagcatcctgcccggtgcttacctgcggcccagcctcgttccagtgtaactcgtccacctgtattcctcaactgtgggcatgcgacaacgaccctgattgcgaggacggctcagacgaatggccgcagcgttgtaggggactgtacgtgttccagggcgacagctccccatgttccgccttcgaattccattgcctgtcgggtgaatgcatccactctagctggcggtgtgacggtggacctgattgcaaggacaagtccgatgaagagaactgcgcggtcgccacgtgcaggccggacgagtttcaatgctccgacgggaactgcattcacggatccaggcaatgcgaccgggagtacgactgcaaggatatgtcggatgaagtgggatgtgtgaacgtcaccttgtgcgaaggaccaaataagttcaagtgccactccggggaatgcatcactctcgacaaggtttgtaacatggcccgggattgccgggactggtcagatgaaccgataaaagagtgcggcacggctgcctgcctcgataacaacggtggttgctcgcatgtgtgcaatgccctgaagattggagccgaatgcttgtgcccggacggattccagctcgtggctcagagaagatgcgaggacatcgatgaatgtcaggacccagatacttgctcccaactgtgtgtgaacctggagggcggatacaagtgccaatgcgaggagggattccaactcgatcctcatactaaagcctgcaaggcggtcgggtccatcgcgtacctcttctttaccaatcggcacgaagtgaggaagatgacgctggatcgcagcgagtacacttcactcatccccaacctgagaaatgtggtggccttggataccgaagtcgcatcgaaccgcatctactggtccgatctgtcccagcgcatgatctgctcgacccaactggaccgggcacacggcgtgagctcgtacgacacggtgatctcccgtgatatccaagcccctgacggactggcagtcgattggattcactctaatatctattggacggactcagtgctgggaaccgtctccgtcgccgacactaaaggcgtgaagcgcaagaccctgttcagagaaaacggctcgaaaccgagggccattgtggtcgacccggtccacgggttcatgtattggaccgattggggtactccagcaaagatcaaaaagggaggacttaatggggtggacatctactcgctggtcactgaaaacatccagtggcctaacggaatcactttggacctcctctcagggcggctgtactgggtggattcaaagctccattcgatctcaagcatcgacgttaacggagggaatagaaaaacgatcctggaggatgagaaacggttggcccatccatttagcctggccgtgtttgaagataaggtgttctggaccgacatcatcaatgaggctatcttcagcgcaaacagactcaccggtagcgacgtgaacctgttggcggagaacctgctgtcacctgaagatatggtgctgttccacaacctgactcagccccgcggagtgaattggtgcgaacggactaccctcagtaatggcggatgccaatacctttgcctgccggctccacaaatcaacccccactcgccaaagttcacctgtgcttgtccggatggcatgcttttggctcgcgacatgcgatcctgtctgactgaagccgaggctgcggtggcgacccaggaaacttcaactgtccgcctgaaggtgtcaagcaccgcagtgagaactcagcataccactacccggccggtgccagacacctcgcgcctgcccggggcgacccctggcctgactactgtcgagatcgtcaccatgtcccatcaggccctgggagatgtcgctggccgaggaaacgaaaagaagccgtcgtcagtgcgcgcgctttcgatcgtgctcccgatcgtcctgctcgtgtttctgtgtctcggtgtatttcttctgtggaagaattggcgcctcaagaacattaattcgatcaacttcgacaacccggtgtaccagaaaactaccgaggacgaagtgcatatttgccacaatcaggacggatactcatacccgagcagacagatggtttccctggaggacgacgtcgcg

SEQ ID NO: 16456 - DNA, 2580 bp, synthetic construct
  misc_feature 1..2580: note = source = /note="Description of Artificial Sequence: Synthetic coding sequence"
  source 1..2580: mol_type = other DNA
atgggcccgtggggctggaagctgcgctggaccgtcgctctgctgctggccgctgccggcaccgctgtgggtgatcgctgcgagcgcaacgagttccagtgccaagacggtaagtgtatctcctataagtgggtctgcgacggttccgcggaatgccaggacggtagtgacgagtctcaggagacctgtttgtccgtcacgtgtaagagcggcgacttcagttgcgggggtcgcgtcaaccggtgcatcccccagttctggaggtgcgacggtcaggtcgattgtgataatggatccgatgagcagggttgtccacccaaaacctgctcgcaggacgagttccgctgccacgacggcaagtgtatctctcgtcagttcgtctgcgacagcgaccgcgactgtctggacggctccgacgaggctagctgcccagtcctaacatgcggtccggcgtccttccagtgcaattcctcgacttgcatcccccagctttgggcatgtgataatgatcctgactgcgaagatggatcggacgaatggccgcaacggtgcagaggtctgtacgttttccagggtgacagttccccctgttccgccttcgaattccattgtttgagcggggagtgtatccatagctcttggcgttgcgacggaggccctgactgcaaggataagtctgacgaggaaaactgtgctgtggccacgtgcaggcccgacgagttccagtgctcagatggtaactgtatccacggttcccgtcagtgcgatcgtgagtacgattgcaaggatatgtctgatgaggtcggttgtgttaacgtgacattgtgcgaggggcctaacaagttcaaatgtcatagtggcgagtgtatcaccctggacaaggtctgcaacatggcccgagactgtagagattggtccgacgagccgattaaggagtgcggcaccgcggcctgcttggacaacaacggcggttgttcgcacgtgtgtaacgccctgaagatcggtgctgagtgcctctgcccggacggtttccagttggtcgcccagcggcggtgcgaagatatcgacgagtgtcaagatcccgacacttgctcgcaactctgtgtcaatttagagggcggctacaagtgccagtgcgaggagggcttccagctggaccctcacactaaggcctgtaaagcggtcggttccatcgcctatctgttttttaccaaccggcatgaggtccgcaagatgactttggaccgctcggagtacaccagcctcattcccaacttgcgcaacgtcgtggccctggacacggaggttgcctcgaataggatctattggtcggatctttcacagcgaatgatctgttcaacccagttagacagggcccacggtgtatcgtcctatgatacggtcatcagccgggatatccaggcgcctgatggcttggctgtggattggatccattctaacatctattggacggactcggttttgggcactgtttccgtcgcggatactaagggcgttaagcgcaagacgctcttccgggagaatggaagtaagcctagggctatcgttgtcgacccggtgcacggctttatgtactggacagattgggggacccccgccaagataaaaaagggaggcttgaatggagttgatatatactccctcgttaccgaaaatatccagtggcctaatggaataacccttgatcttctgtcagggcgcctgtactgggtcgactcgaagctgcacagcattagctcaatcgacgtcaacggcggaaaccgtaagaccatcctcgaggatgagaagcgtctcgcccatcccttctccttggccgtgttcgaggacaaagtcttttggaccgatattattaacgaggctatcttctccgccaaccgtttgaccggcagtgacgtgaatctgttggccgagaatttgctctcccccgaggacatggttcttttccacaacctgacgcaacctcgtggagtcaattggtgcgagcggaccactctttccaacgggggctgccagtacctgtgcctgccggcgcctcagatcaacccgcactcccctaaattcacttgcgcttgccccgacggcatgttgctggcccgcgatatgcgttcttgtttgacggaagccgaagccgctgttgccacacaggagacctccaccgtccgccttaaggtctcgagcactgctgtccgcacccagcacactaccacgcgacctgtccctgacacgagtcgcctcccgggtgctacaccgggcttaactacggtcgagatcgtgaccatgagccatcaggctctgggagacgtggctggacgcggtaatgagaagaagccatcttcagtccgcgctctctctatcgttctgcccattgtcctgctggtctttctgtgccttggcgtcttcctattgtggaagaattggaggctcaagaacatcaacagtatcaacttcgacaaccccgtctatcagaagactaccgaagatgaggtccatatttgccacaaccaggatggttactcgtatccgtcccgccagatggtctctctggaggatgatgtggcc

SEQ ID NO: 16457 - DNA, 2580 bp, synthetic construct
  misc_feature 1..2580: note = source = /note="Description of Artificial Sequence: Synthetic coding sequence"
  source 1..2580: mol_type = other DNA
atgggaccttggggatggaaactcagatggactgtcgcactcctgcttgcagcagctggcaccgcggtgggagatagatgtgaacgcaacgaatttcagtgtcaggacggtaagtgtatttcgtataagtgggtctgtgatggatcggcagagtgccaggatggtagtgacgaatcgcaagaaacttgcctgtctgtcacctgtaagtccggagatttttcgtgtggtgggcgggtgaatagatgcataccacaattttggagatgcgatggtcaagttgattgtgataacggttccgatgaacagggatgcccaccaaaaacttgttcacaagacgagtttagatgtcatgatgggaagtgcatcagtagacaatttgtgtgtgactccgatcgagattgcctcgatggatccgacgaggcctcctgcccagtgttgacttgtgggccagcgagctttcaatgtaattcttccacttgcattccgcagctttgggcttgcgacaatgacccggattgtgaagatgggtctgatgaatggccccaacgatgtaggggtctgtacgtttttcagggagattcatcaccgtgttcggcctttgagttccactgtctttcaggcgaatgtatccacagcagctggcgctgtgatggcgggccagattgcaaagacaagtcagacgaagagaattgtgccgtggcgacctgtcggcccgatgaattccaatgttccgatggaaattgtatccatggtagcagacaatgtgacagagagtacgattgtaaggatatgagtgatgaagtcgggtgtgtcaacgtcaccctctgtgagggcccaaataagtttaagtgtcattcaggcgagtgtataactctcgataaggtctgcaatatggcccgggattgccgcgactggtcggacgagcctatcaaggaatgtggaactgcagcctgcctggacaataacggaggttgtagccacgtgtgtaacgcgcttaagattggtgccgaatgcctttgtccggacggcttccaactggtcgcacagagacgatgtgaggacattgacgaatgtcaagatcctgatacctgttcccagctgtgcgtaaatcttgaaggtggatacaagtgtcagtgtgaagagggatttcagctcgaccctcatacgaaggcatgcaaggcggtcgggtcgattgcatacctgtttttcaccaaccgccatgaggttcgaaagatgactctggacagatcggaatacacttctctgatcccaaaccttcgaaacgtggtggcacttgatactgaagtggcttccaatcgaatatactggtcggacctgagccaaaggatgatttgctcaacccagctggatagggctcatggggtgagctcatacgataccgtgatctcccgggacatccaagcacccgacggacttgccgtggattggattcattcgaacatatactggacggattccgttcttggtaccgtgtccgtggcagataccaagggtgtgaaaagaaaaactctgtttcgggagaatggctcgaagcctcgcgctatagtggtcgatccagtgcatggatttatgtactggaccgactggggaactccagcaaagattaagaagggcggcctgaacggtgtggatatctattcccttgttactgagaacattcagtggcctaacgggattactctcgatctcttgagcggacgtctgtactgggtggatagcaaactgcattccatttcgtcgattgacgttaacggcggaaacagaaaaactatcctggaggatgagaaacgtttggcccaccctttttcgctggcagtgttcgaggataaagtgttctggaccgatatcatcaatgaagcgattttctctgcaaacaggctcaccggcagtgatgtgaaccttttggcagaaaacctgctctcccctgaagatatggtcctttttcataacttgacccagcctcgaggtgtgaactggtgcgaacggactactctttcaaacggtggatgccaatacctgtgtttgcccgcaccacagattaacccacactcgcccaagttcacctgtgcatgcccagacggaatgcttcttgcacgcgacatgcgttcgtgcctgactgaagccgaagccgcagtggccacccaagaaaccagcacggtgagacttaaggtttcgagcactgcagtccgcacccaacataccaccacgaggccggtccctgatacctcgagactgcctggagcaacccccggactgacgaccgtggagatcgtcacgatgagccaccaggccctcggtgacgtggcaggacggggaaatgaaaagaaaccctcgagcgtgcgggcattgagcatcgtgcttcctattgtcctcttggtgttcctctgtctgggagtgttcttgctttggaaaaactggaggcttaagaatatcaacagtattaactttgacaatcctgtttaccaaaaaacgaccgaagatgaagtacacatttgccataatcaagacgggtacagctaccctagcaggcagatggtgtctctcgaagatgacgtggcg

SEQ ID NO: 16458 - DNA, 2580 bp, synthetic construct
  misc_feature 1..2580: note = source = /note="Description of Artificial Sequence: Synthetic coding sequence"
  source 1..2580: mol_type = other DNA
atgggtccctgggggtggaaactgcgctggaccgtggcattgcttttggccgctgccggaaccgcagttggcgacagatgcgaaagaaacgagtttcagtgccaggatggtaagtgtataagttacaagtgggtttgcgatggatccgcagagtgccaggacgggtcagacgagtctcaagaaacctgcctgtccgtcacgtgtaaatccggtgacttttcttgcggtggacgagtgaatagatgtataccccagttctggagatgtgacggtcaggtggattgtgataacggcagtgatgagcaaggctgccccccgaagacatgttcccaagacgaattccgctgtcatgacgggaagtgcatatctaggcaatttgtttgtgacagcgacagagattgcttggacggaagtgacgaggcctcatgccctgtgctgacatgcggtcccgcaagcttccagtgtaacagtagcacatgcatccctcagctgtgggcctgtgataatgaccccgattgtgaagacggctccgatgagtggcctcaacgatgtcgcgggctgtatgtgtttcagggcgactcctccccttgcagcgcgtttgagttccattgtctctcaggggagtgcatacacagttcttggagatgcgatggcggccccgactgtaaagacaaaagcgacgaggagaactgcgccgttgcaacttgcaggcctgatgaattccaatgtagtgacggcaattgtatacatggatccaggcagtgcgaccgggagtacgattgcaaagatatgtcagacgaagtgggctgcgtgaatgtgaccctgtgcgagggacccaataagtttaagtgccattccggagaatgcatcacactggacaaagtttgcaatatggcaagagactgtagagattggagcgacgagcccataaaggaatgcgggaccgccgcttgtcttgataacaatggtgggtgttcacatgtgtgcaacgctctgaagatcggggctgaatgcctttgccccgacggattccagttggtcgcacagcgacgctgcgaggacatcgatgaatgccaagatcccgatacttgctcacagctctgcgtgaatcttgagggcggctataaatgtcagtgcgaggagggattccagctggaccctcatacaaaagcatgcaaggctgtaggttctatcgcctacctctttttcacgaatcgccacgaggtgcgcaaaatgaccctggatcgctccgagtataccagccttattcctaatcttcgcaacgttgttgctctggatactgaagtggcctcaaacaggatttactggtccgaccttagtcagcggatgatctgcagcacccagctggatagggcacatggcgttagctcatatgacaccgtaatttccagggatattcaggctcccgacggcctggcagtggattggattcatagtaacatctattggactgattcagtgctcggcacggtgtccgtagcggatactaagggtgtcaaaaggaaaactctcttcagagagaatggcagtaagcctcgggcaatcgtggtggaccctgtgcatgggtttatgtactggacagattggggcacacccgcaaagatcaagaaaggcgggctcaatggcgtggatatctattccctggtgacagaaaatattcaatggccaaacggcatcactctcgacctcctgtctggacggctgtactgggtcgactctaagctgcactcaatcagttccatcgacgtcaacggcgggaatcggaagaccatcctggaagatgagaagaggcttgcccaccccttttctctggccgtctttgaggacaaagtcttctggacggacattatcaatgaggctatcttctccgcgaaccgcctcactggatctgacgtcaaccttctcgccgaaaacctcctgtctcctgaagatatggtgctgttccataacctcacacagcctcgaggggttaactggtgtgaaaggacaaccctgagtaatggagggtgtcaatacctctgcctccccgctccccaaatcaacccacattctcccaagttcacgtgtgcatgccccgacgggatgctcctggccagagacatgcgatcctgcctgactgaggctgaggccgctgttgcaactcaagagactagcaccgtgcgacttaaagtgagttccaccgccgtccgaacccaacacactaccactaggcccgtgcctgatacctcccgattgccaggcgctacccctgggctcacaacggtggaaatcgtgacaatgtcacaccaggcgcttggggacgtggcaggcagaggtaatgaaaaaaaaccatcaagcgtacgggcactgagtatcgtgctgcctattgttctcctcgtgttcctgtgtttgggtgtattcctgctctggaaaaactggcggctgaagaatatcaacagcattaatttcgataaccccgtgtatcaaaaaaccacggaggacgaagttcacatttgccacaatcaggacggatattcctatcctagccgccagatggtttctctggaagacgatgtcgct

SEQ ID NO: 16459 - DNA, 2580 bp, synthetic construct
  misc_feature 1..2580: note = source = /note="Description of Artificial Sequence: Synthetic coding sequence"
  source 1..2580: mol_type = other DNA
atgggcccgtggggatggaagttgagatggaccgtcgccctgctcctggcagcagcgggtaccgccgtgggggaccggtgtgagagaaacgaatttcaatgccaagacggaaaatgcattagctacaagtgggtttgcgatggatcagcggagtgccaggacggttcggacgagtcccaagaaacctgtctcagcgttacttgtaagtcgggtgatttttcgtgcgggggacgggtgaacagatgcattccccagttttggcgctgcgatggtcaggtggactgtgacaatgggtcggacgagcagggatgcccgccaaagacttgctcgcaagacgaattccgctgtcatgatggaaaatgtatcagccggcaatttgtgtgcgactctgatagagactgcttggacgggtcggatgaggcgtcctgccctgtcctcacctgtggacctgcatcgttccagtgcaattccagcacctgtatcccacagttgtgggcatgtgataacgaccctgactgcgaagatggcagcgatgaatggcctcaacggtgcagaggactgtacgtgttccagggcgactcgtcgccgtgttcggctttcgagttccactgccttagcggagagtgcattcattccagctggcggtgtgacggaggacccgattgtaaggataagtcggacgaagagaattgcgccgtggcaacctgccggccggacgaattccagtgctccgatggaaactgcatccatggatcgagacaatgtgatagggagtatgactgcaaggacatgagcgacgaagtcgggtgcgtgaatgtgaccctgtgcgagggaccgaacaagttcaaatgccactcaggagaatgtatcaccttggataaggtgtgtaatatggcccgtgattgccgcgactggtccgacgaacctatcaaagagtgtggaaccgctgcgtgccttgacaataacggtgggtgtagccatgtctgcaacgccctgaagatcggggcggagtgtctgtgcccagatggatttcagctggtggcgcaacgccggtgcgaagatatcgacgagtgtcaggaccctgacacttgctcgcagctctgtgtgaacctggaaggcggttacaagtgccagtgcgaagaaggattccagttggatccacacaccaaggcttgcaaagcggtgggctcaatcgcctacctgttcttcaccaaccgccatgaggtgcggaagatgaccctggaccgcagcgaatacacttccctgatcccgaatcttaggaacgtggttgccctcgatactgaggtggcaagcaacagaatctactggagcgatctgagccagcggatgatttgcagcactcaactggatcgcgcgcatggagtcagctcctacgatacggtcatttcgagagacatccaggcgccggatggactggcggtggactggatacactcgaacatctactggaccgacagcgtgctcggaactgtgtctgtcgccgacactaagggagtgaagcgcaagacccttttccgcgagaacggctccaagccacgcgccatcgtcgtggatccagtccatggatttatgtactggactgactggggaactcctgcgaagatcaagaagggaggattgaacggagtggacatctacagcttggtgactgagaatatccagtggccaaacggtattactctcgatctgctctcgggacgcctgtactgggtggattccaagctccattctatctcatccatcgatgtcaatgggggcaaccgcaaaacgatccttgaggatgagaaacggcttgctcatcccttctctctggccgtgttcgaggacaaggtcttttggaccgacatcattaacgaggccatcttttcggccaaccggctgacgggaagcgacgtgaatctgctggcagaaaatctgctgagcccagaagatatggtgctgttccacaatctcactcaaccgcgcggagtgaactggtgtgagcgcactactctgtccaacgggggatgtcaatacctctgtctgcctgcccctcagatcaatccgcattcgccgaagttcacttgcgcgtgccctgacgggatgttgctggcccgggacatgaggtcctgtctgaccgaagccgaagcggccgtggcgacgcaagaaacctccacggtgcgcctgaaagtgtcgtcgaccgccgtgagaacccaacacactactactcggccagtcccggatacctcacgcctgccgggggccacgcctgggctgactactgtggagatcgtgaccatgtcgcatcaggcactgggagacgtcgccggccgaggtaacgagaaaaaaccgagctcagtccgggccctgtccatcgtgctgccgatcgtgctgctcgtgtttctctgcctcggcgtgttcctgctgtggaagaattggcgtctcaaaaacatcaattcaatcaacttcgataaccccgtgtaccaaaagactacggaagatgaagtgcatatctgccataaccaggacggctactcttacccgtcgagacagatggtgtcgctggaggatgatgttgcc

SEQ ID NO: 16460 - DNA, 2580 bp, synthetic construct
  misc_feature 1..2580: note = source = /note="Description of Artificial Sequence: Synthetic coding sequence"
  source 1..2580: mol_type = other DNA
atgggtccgtggggctggaaactccgatggacggtggccttgttgctagcagctgcggggacagcggtcggagacaggtgcgagagaaatgaattccagtgccaggacggtaagtgcatttcttacaagtgggtatgtgatggtagcgccgagtgccaagatggctctgatgagagccaggagacctgcctgtctgtcacgtgcaaaagcggggacttcagctgcggcggccgcgtgaatcgatgtatccctcaattttggcgctgtgatggccaagtggactgtgacaacggctccgacgagcagggctgccctcctaagacctgcagccaggacgagttccgctgccacgacggtaagtgtattagccgccagtttgtgtgtgacagcgatagagactgtctggacggaagcgacgaagccagctgtcctgttctgacctgcggcccagcgtcgttccaatgcaatagtagcacctgcataccacagttgtgggcatgtgacaatgatcctgattgtgaggacggcagcgacgagtggccacagagatgtagaggactctacgtgttccaaggcgactcatctccatgcagtgccttcgaattccactgtctgagcggggaatgcatccactcatcttggcgctgcgacggtggcccggattgtaaggacaaatctgacgaggaaaattgcgcggttgcgacctgccgcccagatgaatttcaatgttctgatggtaattgcatccacggtagccgccaatgcgaccgtgagtatgactgcaaagatatgtcagacgaggtcgggtgcgttaacgtgaccctgtgcgaaggccctaacaaatttaagtgccacagcggcgaatgtataacactggacaaagtgtgtaacatggccagggactgcagggactggagcgacgagccgatcaaagaatgtggcactgcggcttgtctggataacaacggaggctgcagccatgtctgtaacgcgctcaagatcggcgccgaatgcctgtgtccagatggctttcaattagtggcacaacgcagatgtgaagatattgatgagtgccaggaccctgatacctgcagccaactgtgtgtgaacttggagggcgggtacaaatgccaatgcgaagaaggctttcagctggacccgcacacgaaagcgtgcaaggccgttggaagcattgcctacctattctttaccaaccggcacgaagtgcgcaagatgacgctcgatcggtctgaatacacctccctgattccgaatctgcggaacgtggtggccctcgataccgaggtcgcgtctaatcgcatctactggagcgatctcagccaacggatgatttgctcaacgcagctggatagggcgcatggcgtcagctcctacgataccgtgatatccagggacattcaagctcctgatggcttggctgtggactggatccactcaaatatttactggacggacagtgtactggggacggtctccgtcgcagataccaaaggtgtgaagcggaaaaccctgtttcgagaaaatggaagcaaaccgcgagccatcgtggtggatccggttcatggcttcatgtactggacggactggggtaccccggcgaaaattaagaaaggtggcctgaatggtgtggacatctatagccttgtgaccgagaacattcagtggcctaacggaattaccttggatctgctgtctggaaggttgtactgggtcgactctaagctgcatagcatttcctcaatagacgtgaatggcggtaatagaaaaactatcctggaggatgaaaaacgcctggctcaccctttctcactggcagtgttcgaagataaagtcttctggacggacattatcaacgaggcaatcttttctgcaaacagattgacgggatctgacgtcaacctgttggcggaaaacttgctgtctccggaggacatggtgctgtttcataacttaacgcagcctaggggagtcaactggtgtgagcgcaccaccctgagcaacggtggctgccagtacctgtgtctaccggcgcctcagattaatcctcactccccgaagttcacatgtgcatgccctgatggcatgctgttggcacgtgatatgagaagctgcctgaccgaggctgaagccgctgtcgcgacacaggagacctccacggttcgtctgaaggtgagcagcacggcagtacgcacacagcacactaccacgaggccggtgcctgacacctctcgcctgccgggtgcaaccccgggcctgacaacggtggaaattgtaaccatgtcacatcaggcactcggtgatgtggcgggtcgcggtaatgagaaaaaaccatcttctgtacgcgccctgagcattgtcctgcctatcgtcttgctggtgtttctctgcttgggggtgttcttgctgtggaaaaattggcgcctaaagaacatcaacagcatcaattttgacaacccagtctaccagaaaacgacggaggatgaagtgcatatctgtcacaatcaagatggttacagctacccttctcgtcagatggtgagtctggaagatgatgtggca

SEQ ID NO: 16461 - DNA, 2580 bp, synthetic construct
  misc_feature 1..2580: note = source = /note="Description of Artificial Sequence: Synthetic coding sequence"
  source 1..2580: mol_type = other DNA
atggggccttgggggtggaaactacgctggacagtggccctactcttagccgctgccggaactgccgtcggggatagatgcgaacgtaatgaattccaatgccaggatgggaaatgtatttcctataagtgggtctgcgatggatctgctgaatgccaggatgggtcagatgagtcgcaggaaacatgcttgtcggtgacatgcaaatctggggattttagttgcggaggaagagtgaatagatgtatcccccagttttggcgttgcgatgggcaggtcgattgcgataatgggtctgatgagcagggatgtcctcccaaaacatgttcacaagatgaatttcggtgccacgacgggaagtgtatcagtcgccagttcgtgtgcgattccgatagggattgtctagacgggtccgacgaggcctcatgtcccgtccttacatgtgggcccgctagtttccagtgcaattcttctacatgtataccccagctatgggcttgcgataacgatcctgattgcgaagacggatctgatgagtggccgcagaggtgtcgaggactgtatgtgttccagggggattcctctccctgttctgcgttcgagttccattgtctctcaggggagtgtatccatagtagttggaggtgcgacggagggccagattgtaaagataaatcagatgaagaaaactgcgccgtagccacatgtcggccagatgaattccagtgttccgatgggaattgcatacatgggtcccgacagtgtgatcgggagtacgattgtaaagatatgtcagatgaagtggggtgcgtgaatgtaacactgtgtgaaggaccaaataaatttaaatgtcactcaggagaatgtataactcttgataaagtatgcaatatggctagggactgcagagactggagtgatgagcccataaaagaatgcggaactgcggcttgtctggataacaatggaggatgctcccacgtatgcaacgccttaaaaataggagccgaatgtctttgtcccgatggattccaattggtcgctcagcgacgctgcgaagatatcgatgagtgtcaagatcccgatacttgctctcagctctgtgtcaacctggaaggagggtataaatgtcagtgcgaagagggatttcagctagatccacacacaaaagcatgtaaggctgtgggatctatagcttatctgttttttactaaccgacatgaggttcgaaaaatgacattagatagatcagaatatacaagtctaatacccaatctaagaaacgtcgtagctcttgatactgaagttgcgtccaatcggatatattggtccgatctgtcccagagaatgatctgctccactcagttggatcgggcccacggggtctcctcttatgatacagtgatatcccgagatatccaggctcctgatgggctagctgttgattggattcattctaacatctattggacagattctgtactgggaactgtctctgttgctgatacaaaaggagtcaaacgcaaaactttatttagagaaaatggatcaaaaccgcgtgcaatcgtggtggatcctgttcacgggtttatgtattggacagattggggaacacccgccaaaatcaaaaagggggggctgaatggagtggatatatattccctagtgactgaaaatattcagtggcctaatggaattacactagatcttctgtctgggcggctgtattgggtggatagtaaactgcattctataagttctatagatgttaacggagggaataggaaaacgatcctcgaagatgaaaaacgacttgcacacccattttcattggcagtattcgaagacaaagtgttctggacagatatcataaacgaagcgatattttccgctaatcggctgacggggtctgatgtgaacctcctggcagaaaatttgctctctcccgaggatatggtgctctttcataacttaacacagcccagaggggtgaactggtgtgaacggactacactctctaacggggggtgccagtacctatgcctccccgcaccacagatcaatcctcattctcccaagtttacatgtgcatgcccagatgggatgctccttgcaagagacatgcggtcatgtctgactgaagctgaggcagccgtcgccacacaggaaacatctactgtaaggttaaaagtgtcttccacagcagtgcgcacacagcatacaactacacgcccggtgcccgatacaagtaggctacccggggccactcccggactcacaacagtcgaaatagtcactatgtcacatcaggctttgggagatgtggctggaagagggaacgaaaaaaaaccatcctccgtgagagctctctcgatagtactgcccattgtgctcctggtatttctatgcctgggggtcttccttctgtggaaaaactggcgcctcaagaatatcaattccatcaactttgataatcccgtctaccagaaaacaacagaagatgaagtccatatctgccataatcaggatgggtattcctacccctcccggcagatggtctcgttagaagatgatgtggcc

SEQ ID NO: 16462 - DNA, 2580 bp, synthetic construct
  misc_feature 1..2580: note = source = /note="Description of Artificial Sequence: Synthetic coding sequence"
  source 1..2580: mol_type = other DNA
atgggtccttggggatggaaacttcgctggactgtggcactgcttctggctgcagcaggtaccgctgtgggcgatagatgcgagagaaacgagtttcaatgtcaagacggaaagtgtatttcatacaagtgggtctgtgacggcagcgcagagtgtcaggacggcagcgatgagagccaagaaacctgcctgagcgtgacttgtaagagcggggatttttcatgcggtggaagagtgaatcgctgtatccctcagttctggagatgcgatggacaggtggactgtgataatggttcggacgagcaggggtgcccacccaagacctgttcccaggatgaattccgatgtcacgacggtaagtgcatctcacgccagtttgtctgtgattccgatagggactgtcttgatggcagtgacgaggcatcgtgccctgtgttgacctgtggccccgcctcctttcaatgtaactcttcaacctgtattcctcaactgtgggcctgtgacaatgacccagactgcgaagatgggtcggacgaatggccacaacgatgtcgtgggctgtacgtttttcaaggtgactcgagcccatgcagcgcgttcgaattccattgtttgtctggcgaatgtattcacagctcctggcgctgcgatggaggccccgattgcaaagataagtcggacgaagaaaactgtgccgtcgccacctgtaggcccgatgaatttcaatgctctgatgggaattgtattcacggttcccgacagtgcgaccgagaatatgattgtaaagacatgtccgatgaagtgggatgtgtgaatgtgaccctttgcgagggacctaacaagttcaagtgccattcgggagagtgtatcacgcttgataaagtgtgcaacatggcacgcgattgtagagattggagcgatgaaccaatcaaagaatgcgggactgcagcgtgccttgacaacaacggcggatgctcacatgtgtgtaatgccctcaagattggagctgaatgcctgtgtccagacggtttccaacttgtagcgcagcgccgctgtgaagatatcgatgagtgccaggacccagatacgtgctcccagctctgtgttaacctggaaggaggttacaagtgtcagtgtgaagaaggtttccaactggatccacacactaaagcctgtaaggccgtgggcagcattgcatacttgttcttcaccaacaggcacgaggtgcggaagatgaccctggatcggtctgagtatacgtccctcattccaaaccttagaaacgtggtggccctggataccgaagtcgcaagcaatcgaatatactggtccgatttgtcgcaaagaatgatttgttcgacccaactcgacagagcacatggggtgtccagctacgacaccgtcatctcaagggatattcaggcacccgatggtctggcggttgactggatacattcgaatatctactggactgattcggtgctgggaactgtctccgttgctgacactaaaggggtgaagaggaaaactctttttcgagaaaacggatcaaagcctagagcaattgtggtcgatcctgtccatggattcatgtactggaccgattggggtactcccgcaaagattaagaagggtgggctgaacggagtggacatctactccctggtgactgaaaacattcagtggccgaacgggattacgctggatctcctgtctggaaggctttactgggtcgattcgaagctgcactccattagctccattgatgtcaatggcggtaaccgcaagacgatccttgaagatgagaagcggcttgcgcatccgtttagtctcgcagtctttgaagataaggtattttggaccgatatcattaacgaagcgatattcagcgcaaatcggctgactggatccgacgtcaatttgcttgcagagaatctgctctcgcctgaggatatggtgctgtttcataaccttacccagcctagaggcgtaaattggtgtgaacggaccaccctgagtaatggggggtgtcaatacctctgtctgcctgccccacagataaatcctcatagccctaagtttacctgtgcgtgtcccgatggtatgctcctggcacgcgacatgagatcatgtctgaccgaagccgaggcagcagtcgctactcaagagacgagcaccgtgagactgaaggtttcgtcgactgcagtgcggacccaacacactacgaccaggcccgtgccggatacgtcgcgtctccccggagcaacccctggacttaccactgtggaaatagtgactatgtcccatcaggcccttggagatgtggccggtcgtggcaacgagaagaaaccatcgtcggtgagagccctgtcgatcgtgcttcctatcgtgctgctggtgtttctctgcttgggcgtttttctgctctggaaaaactggcggctcaagaacattaactcaattaactttgataatccggtgtaccaaaaaacgactgaagatgaagtgcatatatgccataaccaagatgggtactcctaccctagccggcaaatggtatctcttgaggacgatgtggca

SEQ ID NO: 16463 - DNA, 2580 bp, synthetic construct
  misc_feature 1..2580: note = source = /note="Description of Artificial Sequence: Synthetic coding sequence"
  source 1..2580: mol_type = other DNA
atgggaccttgggggtggaagttgagatggactgtcgcactgctgctcgccgcggcaggcactgccgtcggagatcggtgcgaacgaaatgagtttcagtgtcaggatgggaaatgtatctcatacaagtgggtttgtgatggcagcgcagaatgtcaagatggttccgatgaatcccaagaaacctgcttgtccgtcacgtgcaaatccggtgacttcagctgtggggggcgagtcaatcggtgcattccacagttttggcgttgtgatgggcaagtcgactgcgataacggttcggatgaacaggggtgtccacccaagacctgttcgcaagatgagtttcgctgtcatgatggaaagtgcatatcgaggcagtttgtctgtgattcggatcgggattgcttggatggatcggacgaagcaagctgtccagtgctcacctgcggtccagcatcctttcaatgtaactcatcgacttgtattccccagctctgggcctgtgataatgaccccgattgtgaggacggatccgatgaatggcctcagagatgtcgcggcctctacgtgtttcaaggtgacagctcaccttgctcagcctttgaattccattgcctgtcgggggagtgtatacatagctcgtggcgctgtgatgggggaccggattgtaaagataagtcagatgaagaaaattgtgcggttgcaacgtgtaggccagatgagttccaatgtagcgatgggaactgtattcatggatcaagacagtgcgatagagagtacgactgtaaagatatgagcgatgaagtgggctgtgtgaatgtgactctctgtgaaggcccaaacaagttcaaatgtcattcgggagagtgcattacccttgacaaagtctgcaatatggcaagagattgtcgagactggtccgatgaaccgattaaagaatgtggcactgcagcatgtttggacaacaacggtggatgcagccatgtgtgtaacgcacttaagattggggcagaatgcctctgccccgacggatttcagcttgtcgcgcaacgtcgctgtgaggacatcgacgaatgtcaagacccagacacctgttctcagctctgcgtgaatctggagggcggatacaagtgtcagtgcgaagagggttttcaacttgatccgcacactaaggcttgtaaggcagtcggttccatcgcctacctcttctttaccaacagacacgaagtgcggaagatgacgctggaccgctcagagtacactagcctcattccaaacctgcgcaacgtcgtggcgctggacactgaagtggcatcaaatagaatttactggagcgatctgtcccagaggatgatctgctccactcaattggatagggcacacggagtctccagctacgacacggttattagccgcgacatccaagcacctgatggacttgccgtggattggatacattctaatatctactggaccgattcagtgcttggcactgtgtccgtggccgacactaagggtgtgaagcgcaagaccctgttccgggaaaacggctcgaaaccccgggctattgttgtggaccccgttcatggattcatgtactggactgattgggggaccccagcaaagattaagaagggaggactcaatggagtggacatttactcgctggtcaccgagaatatccaatggccgaacggtatcaccctggatctcctgtcgggtaggctctattgggtggattctaagctccactccatttcaagcattgatgtcaacggcggaaacagaaagaccatattggaagatgagaaaaggcttgcccaccctttttccctggcagtgtttgaagataaggtgttctggactgacatcattaacgaggcaattttcagcgcaaacaggttgactggatccgacgtgaacctgctggccgagaacctgctttcccccgaggatatggttctgtttcataatctgacccaaccacgaggagtcaactggtgcgaaaggactaccctgtcgaatgggggatgccaatatctttgtttgcccgcaccccaaatcaatccgcacagccccaagtttacctgtgcttgtcctgacggcatgcttcttgctcgtgacatgcgctcctgtcttaccgaagcagaggcggccgtcgccacccaggagacttcaaccgtgcggctgaaagtgagctcgaccgcggtcagaacccagcacaccaccacgaggcctgtgcccgatacttcacgtctccccggagcgactccggggctgaccaccgtggaaattgtgaccatgagccatcaggcgctcggagacgtggccggacgaggtaacgaaaagaagccctcatcggtgcgggcgctttccattgtgcttccaatagtgcttctggtctttctttgtctcggagtgtttttgctctggaaaaactggagactgaagaacatcaattcgataaactttgataacccagtgtaccaaaaaaccactgaggatgaggtccatatctgccataaccaagacggatactcgtacccctcgcggcagatggtgtcccttgaagatgacgttgct

SEQ ID NO: 16464 - DNA, 2580 bp, synthetic construct
  misc_feature 1..2580: note = source = /note="Description of Artificial Sequence: Synthetic coding sequence"
  source 1..2580: mol_type = other DNA
atgggcccctggggctggaagctgcgttggactgttgcgttgctcctcgccgctgctgggaccgccgttggggaccgatgcgaaagaaacgagttccaatgccaagacggtaagtgcatctcttataagtgggtctgtgatggctctgccgagtgtcaagacggctcagatgagagccaagagacatgcctttcggtgacgtgtaagtcgggcgatttcagttgtggcggtagagttaatcggtgcatcccccagttttggcgctgtgacggccaggtcgattgtgacaacggctccgacgaacagggctgccctcctaaaacgtgttctcaagatgagtttcgttgccatgatgggaaatgcatctcccgacaatttgtgtgcgattccgaccgagactgtttggacgggagcgacgaagcgagctgccctgtgctaacttgtggaccagcatcttttcagtgtaattcctcgacttgcatccctcagctgtgggcctgtgataatgaccccgactgcgaagacgggtctgatgaatggccgcaacggtgccgaggtttatatgttttccagggagattctagtccgtgttccgcattcgaattccattgtctctctggtgagtgcattcattcatcgtggcgttgtgacggagggcccgactgcaaggataagtctgacgaggaaaactgtgccgtggcgacctgcaggcccgacgagttccaatgttcggacggcaattgtatccatgggtctcgacaatgcgatagggaatacgattgtaaagacatgagtgatgaggtcggatgtgtcaacgtcaccttgtgcgaggggccgaataagtttaagtgtcacagtggcgaatgtataacacttgacaaagtttgcaacatggcgcgtgactgtagagattggtctgacgagccaatcaaggaatgcggcacagcggcatgcttggacaacaatggagggtgctcccatgtttgtaatgcccttaagattggcgctgaatgcctgtgtcctgacggattccaactcgtagcgcaacggagatgtgaagatatcgacgagtgtcaagatccggacacttgtagccaattatgtgtgaatttggaggggggttacaagtgtcaatgcgaggagggtttccaactcgacccacacactaaagcttgtaaagctgttggaagtatagcctacttgtttttcaccaatcgacatgaagtgaggaagatgactcttgaccgcagtgagtacacgtcactaattccgaatcttcgaaacgttgtcgcactcgacaccgaagtggcgtctaaccgtatctactggagtgacctctcccaacgcatgatctgtagcacgcagttagaccgggctcacggcgtatcaagctatgatacagtgattagcagagatatccaagcgcccgatggcctcgctgtcgactggattcattcaaatatctattggacagacagcgtgctgggtaccgttagtgtagccgataccaagggcgtgaaacgcaagactctcttcagagagaatggcagcaaaccacgcgcaattgtggtggatcccgtccacggcttcatgtattggacagactgggggactccggccaaaatcaagaagggaggactgaacggtgttgacatctactcgttggtaacggaaaatattcaatggccaaacggtataacgctcgatctcctgagcggtcgtctttattgggtcgacagtaaactgcattctatttcctctatcgacgtgaatggcggtaacaggaaaaccattctcgaagacgagaagcgccttgcccatccatttagtctggcagtctttgaagataaggttttttggacggatatcattaatgaagcgattttttctgcgaaccgcttaactggatccgatgtcaacctgctggcggaaaaccttctcagtcccgaggatatggtcttatttcacaatctgacacaaccccgtggagtcaactggtgtgagcggacgaccctctctaatggcggttgtcagtatctttgtctgcctgccccacagataaatccacactcaccgaaattcacctgcgcttgccctgatgggatgttgttggcacgtgatatgcgcagctgcctgaccgaggcggaagcagcggtggctacccaggagacctcgactgtccggctcaaggttagttcaactgcggtgcgaactcagcacacgaccaccaggcctgtgcccgatacatcacggcttccaggagcgacgccaggactcactacagttgagatcgtgacaatgtcacaccaggcgttaggggatgttgccggacgtggcaatgaaaagaagccctcgtcagttcgagcactgtctatcgtcctccccattgttctccttgtgttcctgtgtttgggggttttcctgttatggaagaattggcgtctcaagaacatcaatagtattaacttcgataaccccgtttatcagaagactacagaagatgaagtgcatatctgtcacaatcaggacggttattcatatcccagccgtcaaatggttagtctagaggacgatgttgcc

SEQ ID NO: 16465 - DNA, 2580 bp, synthetic construct
  misc_feature 1..2580: note = source = /note="Description of Artificial Sequence: Synthetic coding sequence"
  source 1..2580: mol_type = other DNA
atgggcccttggggttggaaactccgctggacagtggctctgctcctcgctgcagctggcacagcggtgggggaccgatgtgagcggaacgagtttcagtgccaggacggaaagtgcatatcctataaatgggtttgtgacggatcagctgaatgtcaggacggatctgacgagtctcaggaaacttgccttagtgtaacgtgtaagtccggggacttcagttgtggcggccgagtgaataggtgtataccccagttttggcgatgtgatggccaggtagattgcgataatggctctgatgagcaaggctgcccgcctaaaacctgcagccaggatgagttccggtgccacgacggaaagtgcatttctcgacaattcgtgtgcgacagtgatagagattgtttagatggttccgatgaggcttcgtgccctgtgctgacatgcgggccagcctcatttcaatgtaactcaagtacctgtatccctcagctgtgggcatgcgacaatgacccagactgtgaggatggatctgacgagtggccccagcgatgtaggggactgtatgtgttccaaggggactcctcgccatgttccgccttcgagttccactgtctctctggcgaatgcatccattccagctggcgctgcgatggcgggcctgactgcaaagacaagagtgacgaggagaactgcgcagtcgctacctgtcgtccagatgagttccagtgcagtgatggcaattgtatccacgggtctcggcagtgtgatagagagtacgactgtaaggatatgagcgatgaggtcggctgcgtgaatgtgaccctgtgcgagggtccaaacaagtttaagtgccactcaggcgaatgcataacgttggacaaggtgtgcaatatggcaagggactgtagagattggtctgacgaacctattaaggagtgtggtacagctgcatgccttgataacaacgggggatgctcacacgtttgcaacgccctgaaaattggcgcggagtgtctttgtcccgatgggttccagttagttgcgcaaaggagatgcgaggacattgacgaatgccaggatccagacacctgtagtcagctgtgcgtgaacctcgaaggcggatataaatgccagtgcgaggagggcttccaactggacccccacacaaaggcttgtaaggcagtgggtagtattgcctatctattttttactaacaggcatgaagttcggaaaatgaccctggaccggtctgagtacacgagcctcatacccaatcttaggaatgtcgtggcacttgatacagaggtggcaagcaatcgcatctattggagtgatttgagccagagaatgatctgttccactcagctcgatagagcccatggcgttagtagttacgataccgtgattagccgcgacatacaggcacctgatgggttggcggttgattggattcattcaaatatctattggaccgactccgttctgggaacagtctccgtggccgatacaaagggagtcaaaagaaaaaccctttttcgagagaacggatccaaaccaagagcaatcgtggtggaccccgtgcacggcttcatgtactggacagactggggcacccccgcaaagattaagaaggggggcctgaatggagtggacatctattccctggtgacggagaatatacagtggcccaatggcattactctggaccttctgtccggaagactatactgggtggatagcaaattacattccataagttcaatcgatgtcaacggtggcaacagaaagaccattctggaagatgagaaaagactcgcacaccccttttcactggcggtttttgaagataaggtgttttggactgacataatcaacgaagccatattttcagctaacagactgactggatctgacgtcaacttattagcggagaacttactttctccagaggacatggttttattccacaatctgacccagcctaggggcgtcaattggtgtgaacgaactactctgtctaacggcggctgccaatacctctgcctgcctgcacctcagataaatccgcacagccctaaattcacatgtgcctgccccgatggaatgctgctggcccgggacatgcgatcctgcctcaccgaggcagaggccgccgtggcaacccaggagacctcaacggttcgcctcaaagtaagctctaccgctgtgaggacccaacacactacaaccagaccagtccccgacacctctagactaccaggcgccacccctggtctgaccaccgttgagatagtgactatgtctcaccaggcactgggcgatgtggcgggacgtgggaacgagaagaaaccctcttccgtgagagcactttcgatcgtgctccccatcgtccttttggtgttcctgtgtctcggggtgtttttgctgtggaagaactggcgattaaagaatatcaacagtatcaacttcgataatcctgtgtaccagaagaccactgaagacgaggtgcatatctgccacaaccaggatggttatagttatccttcccgacaaatggtgtcactcgaggacgatgtggct

SEQ ID NO: 16466 - DNA, 2580 bp, synthetic construct
  misc_feature 1..2580: note = source = /note="Description of Artificial Sequence: Synthetic coding sequence"
  source 1..2580: mol_type = other DNA
atgggaccttggggatggaagttgcggtggacggtggcacttctcctcgcagcagcagggactgcagtgggtgatcgatgcgaacggaacgagtttcaatgtcaagatgggaaatgtatctcttacaagtgggtgtgtgatggtagcgcagagtgtcaagacggctctgatgaatcgcaagaaacctgtctgtccgtgacctgtaaatccggggatttttcatgtggggggcgggtgaacaggtgcattccccagttttggagatgcgacggtcaggtggattgcgataacggcagtgacgagcaaggatgccctccaaagacgtgctcgcaagacgaatttcggtgtcatgacggtaaatgtatttcgagacaatttgtgtgcgatagcgaccgcgattgtctggatggttcggacgaagcgtcctgtcctgtgctgacttgcggacctgcgagcttccaatgtaattcgtcaacttgcattccacaactgtgggcttgtgataacgaccctgattgcgaagatggctcagacgaatggccgcagagatgtcgcggactttacgtgttccagggtgattcgtccccttgcagcgcattcgaattccattgtctgagcggagagtgcatccattcctcctggcgatgcgatggaggtccagattgtaaggataaatccgacgaagaaaactgtgccgtcgcaacttgtcgacctgatgagtttcaatgctcagacggaaattgtattcacggttcccgccaatgtgatcgcgaatacgattgcaaagatatgtcggatgaagtcggctgtgtgaacgtcaccctgtgtgaaggaccgaacaaattcaaatgccattcgggggaatgcattaccctggataaggtctgcaacatggcaagagactgccgcgattggtcggacgaacccattaaagagtgcgggaccgcagcctgtttggataacaacggtgggtgcagccacgtctgtaacgccctgaaaatcggggcggaatgcctgtgtccagacggattccaactggtcgcacaaagacgttgcgaggacatcgatgaatgtcaagatcccgatacctgctcccagctgtgtgtgaacctggagggtggatacaagtgtcagtgtgaagaaggattccaacttgatccacacactaaggcatgtaaggcagtgggttccattgcctaccttttctttacgaacagacatgaagtccgcaaaatgactctggacagatcggaatacacttcattgattcctaaccttcgaaatgtcgtggcactggatactgaggtcgcatcgaaccgtatttactggtcggatctctcgcaacgaatgatatgttccactcaactggaccgcgcgcatggagtgtcgtcctacgatacggtcatttcgagagacatccaggcgccagacggactcgcagtggattggattcactcgaacatttactggaccgacagcgtccttggtaccgtgtcggtggcagacaccaaaggtgtgaagaggaaaactctttttcgggaaaatggatcgaaaccacgagcaatcgtggtggatccggtgcacggctttatgtactggaccgattggggaacgcctgctaaaatcaagaaaggaggcctgaatggtgtcgacatttactcccttgttaccgagaatatacaatggccaaacggtataacccttgaccttctgagcggacgcctgtactgggtcgactcaaagctgcattcaatttcgtcaatcgacgtaaacgggggcaatcggaaaactattcttgaagatgaaaagaggctggcgcatcccttctccctggcagtgtttgaggacaaggtgttctggactgacataatcaacgaagccattttctcagcaaaccggctgacgggtagcgatgtcaaccttctcgccgaaaacctgctctcacctgaggacatggtcctgttccataatctcacccaacctagaggcgtgaattggtgtgagagaactactctctccaatggggggtgtcagtacctttgcctgccggctccacagataaacccccattcccctaagttcacttgcgcctgccctgacggtatgctcctggcaagagacatgcgctcgtgtctgactgaagcagaagcagccgtggcaacccaggagactagcactgtccggcttaaagtctcgtccaccgctgtgaggacccaacataccactaccagaccggtgcccgacacttcccgcctgcctggagcaactccaggactgaccacggtggagatagttaccatgagccatcaagcactcggtgatgtggcagggagagggaatgaaaagaagccatcatcagtccgcgccctgtccatcgtgctcccaattgtgctgcttgtgtttctctgtctcggcgtttttctcctttggaagaactggagacttaagaacatcaattcaatcaattttgacaacccggtgtaccaaaagactactgaggacgaagtgcatatttgtcacaaccaggatggctactcctacccttcacggcagatggtgtccctcgaggatgacgtcgca

SEQ ID NO: 16467 - DNA, 2580 bp, synthetic construct
  misc_feature 1..2580: note = source = /note="Description of Artificial Sequence: Synthetic coding sequence"
  source 1..2580: mol_type = other DNA
atggggccgtggggatggaaattgcgttggaccgtagccctgttgttagcagcggcgggtactgcagtcggggatagatgtgaaagaaatgagtttcagtgtcaagatggaaaatgtatttcctataagtgggtatgtgatggctctgccgaatgccaggacggatcagatgaaagtcaggagacatgtcttagtgtaacatgcaaatcaggagactttagttgcggaggacgcgttaatagatgtataccacaattttggcgttgcgatggacaggtagattgtgataatggctcagatgagcaagggtgcccacctaaaacatgttctcaagatgaattccgatgccatgatgggaaatgcattagtcgtcaattcgtatgcgattcggacagagattgtttggatggcagtgatgaagcatcatgcccagttcttacttgcggacccgctagttttcagtgtaatagtagtacctgcataccgcaattgtgggcctgcgataacgatccagattgtgaggacggatctgatgaatggccacaacggtgtagaggactatatgtttttcaaggggactcatcaccgtgctctgctttcgagttccactgtttgtccggggaatgcatacatagtagttggagatgtgatggaggtccagactgcaaagataaatcagacgaagagaattgcgcagttgcaacatgccgaccagatgaatttcaatgctcagacgggaattgcatccacggatcacgacagtgcgaccgagaatacgattgcaaggatatgtctgatgaagtgggttgcgtgaatgttactttgtgtgaaggaccaaacaaatttaaatgccactctggagaatgcatcacactagataaagtttgtaatatggctcgggattgtcgtgattggtcagacgaaccgataaaagagtgcggcacagctgcatgcctggataacaatggaggttgttctcacgtgtgcaatgcattgaagatcggagctgaatgtctttgccccgatggattccaactggttgcccaaagacgatgtgaggatattgatgaatgccaagatcccgatacttgctctcaactatgtgttaatttggaaggaggctataaatgccaatgtgaggagggatttcagttggatccacatacaaaggcatgcaaggcagtcggatccattgcttacctgttttttacgaacagacatgaagtcagaaaaatgacacttgatcgctcggaatatacaagtttgatcccaaacctccgaaacgttgttgctcttgatacagaagttgctagcaaccgaatctactggtcggatcttagtcagcggatgatctgctctacacagctggaccgtgcacacggagtatcgtcgtatgatacagttatttctcgagacattcaagctcctgatggattagccgtcgattggatacactctaacatttattggactgattccgttttggggactgtgtctgtagctgatacaaagggagttaaaagaaagaccttgtttagagagaatggttctaaaccccgagcaatagtcgtcgatcctgtgcacggttttatgtattggacggattggggaaccccagcaaaaatcaagaagggaggtctcaatggcgtagatatttactctttggttacggaaaatattcaatggccaaatggaatcacacttgatcttttatcgggaagattgtactgggtggatagtaaacttcacagtatctcgtcaattgatgtcaacggcggaaacagaaagacgatcttggaagatgagaaacgattggcgcacccattttctctggcggtgttcgaggacaaggtattttggactgatatcattaatgaagctatcttctcagcgaatcgacttacgggtagcgatgtcaatttgttggcagagaacctcctttcacctgaagatatggttttatttcacaatcttacgcaaccgcggggagttaattggtgcgaacgaacgactttatcaaatgggggttgtcaatatctttgcctccctgcgccgcagattaatccacattctcctaaattcacctgcgcttgtccagacggaatgctccttgcgcgcgatatgcgatcctgcctcacagaagccgaggctgcagttgcaacacaagaaacttctacagttagactcaaggtatcatcgaccgcagtacgaactcagcacacaacaacacgtccagtgccagacacaagcagactacccggggccaccccaggacttaccacagtagaaattgttactatgagtcatcaagccctgggagacgtggctggccgaggaaatgaaaaaaagccttcttcggttcgagctttgtccatcgttctgccaattgtccttttggtcttcttgtgccttggcgtgtttctgttgtggaagaactggaggttgaagaatattaatagcattaatttcgataatccagtttatcaaaaaacaacggaggacgaagtgcatatctgtcataatcaggatggatattcgtatccttccagacagatggtgagtctcgaagacgatgtggct

SEQ ID NO: 16468 - DNA, 2580 bp, synthetic construct
  misc_feature 1..2580: note = source = /note="Description of Artificial Sequence: Synthetic coding sequence"
  source 1..2580: mol_type = other DNA
atgggaccatggggctggaaacttcgttggactgtggcactgctgctggcagcagcgggcactgcagtcggcgaccggtgtgaacgtaacgaattccagtgtcaagatgggaagtgtatttcgtacaagtgggtctgtgacggttcggcagagtgccaagatggttccgacgaatcacaagaaacttgtctgagcgtgacctgtaagagcggcgacttcagctgcggagggagggtgaatcggtgtattccccagttttggagatgcgatgggcaggtcgattgtgataatggttcagacgaacagggatgtccaccaaagacttgtagccaggacgaattcagatgtcatgatggtaagtgcatttcccggcagtttgtgtgtgatagcgatagagactgtttggacggaagcgacgaagcctcgtgtccagtgcttacttgcggtcctgcctcatttcagtgcaattctagcacctgcatcccacaactgtgggcctgtgataacgatcccgactgtgaggacggatcggatgaatggccacagcggtgcagaggtctgtacgtgtttcagggagattcgagcccttgttccgcgtttgagtttcactgtctctcgggagaatgcatccactcctcgtggcgctgcgatggtggacccgattgcaaggacaagtcggatgaggaaaattgtgcagtggctacctgcagaccagacgaatttcaatgtagcgatggaaactgtatccacggttcaagacagtgcgaccgcgagtatgactgcaaggatatgtccgatgaggtcgggtgcgtgaacgtgactctttgcgagggtcctaacaaattcaagtgccattcaggtgaatgcatcacgctggacaaagtgtgtaacatggcgcgcgactgtagggactggagcgatgaaccgattaaagaatgtggaactgcagcatgtctggacaataacgggggatgttcgcatgtgtgcaacgcactcaagataggtgcagagtgtctgtgtccagacggatttcagttggtcgcacagcgccgatgcgaagatattgacgaatgccaagaccctgacacctgttcccagctttgcgtcaatttggaaggggggtataagtgccaatgcgaagagggattccaacttgatcctcataccaaggcctgtaaggcagtcggatccatcgcatacctgttctttaccaacagacacgaagtgaggaagatgaccctggatcgttccgagtacacgagcctgatccctaacctgcgcaacgtcgtggcccttgatactgaagtggcatcgaatagaatttactggtcagatctgtcgcagcggatgatttgtagcacccaacttgatagggcacatggagtgtcgtcgtacgatactgtgatatctcgcgatatccaagcaccagatggattggccgtcgattggatacattcaaacatttactggactgactcggttctggggaccgtttcggtggctgacaccaagggagttaagcggaaaaccctgttcagggaaaacggatccaaacccagagcaatagtggtggaccccgtgcacggatttatgtactggaccgattgggggaccccagccaagataaagaagggaggactcaacggagtggacatatactcgctcgtgactgagaatattcagtggccaaacggaattactctggacctcctctcgggacgtctctactgggtggattcgaaacttcattccatttcgtcgatcgatgtcaatggcgggaataggaaaactattctcgaagatgaaaagcggctggcacatccatttagcttggccgtctttgaagataaggtgttctggactgacattatcaatgaagcaattttctcggcaaacagactgaccggctccgatgtgaatctgcttgctgaaaatctgttgtcccccgaagatatggtcctttttcataacctgactcagcctaggggcgtgaactggtgtgaaagaactaccctctcgaacggaggatgtcagtacctttgtttgcctgcgccccaaatcaatccccactcaccgaagtttacttgtgcttgtcccgatggcatgttgctcgcacgtgatatgcgcagctgccttactgaggcggaagcagccgtggcaacccaagagacttccactgtcagactgaaagtgtcctcaaccgctgtgcgtactcagcacactaccactcggcccgtgcccgacacctcaaggctgcctggcgccaccccgggtctgactactgtggaaatcgtgaccatgtcgcaccaagccctgggtgatgtggccggacggggaaacgagaagaagccctcatccgtgcgtgcacttagcatcgttcttcctatagtcttgcttgtgtttctgtgtcttggagttttccttttgtggaagaactggcgcttgaagaatatcaactcgatcaatttcgataacccagtctaccaaaagaccaccgaggatgaggtgcatatatgtcataatcaagatggatacagctatccttcacggcagatggtgtcccttgaggatgatgtggca

SEQ ID NO: 16469 - DNA, 2580 bp, synthetic construct
  misc_feature 1..2580: note = source = /note="Description of Artificial Sequence: Synthetic coding sequence"
  source 1..2580: mol_type = other DNA
atgggaccatggggttggaagctgcgatggactgttgccctgctgctggccgctgctgggacagcagtaggcgataggtgtgaaaggaatgagtttcagtgccaagacggaaaatgtatttcatacaaatgggtgtgcgatggcagtgccgaatgtcaggatgggagcgatgaatctcaagagacatgcctgtctgtgacttgcaagagtggtgacttctcatgtggtggccgcgtaaaccgctgcataccacagttttggcggtgcgatggccaggtggactgtgacaatgggtcagatgaacagggctgtcctcccaaaacgtgtagtcaggacgagtttagatgtcacgatggcaagtgcattagccggcagtttgtatgtgactcagatcgcgattgcctcgacggttctgacgaggcctcttgccctgtgctgacatgtggaccagcctcattccaatgcaacagcagtacgtgcatcccacagctgtgggcttgtgacaatgacccagactgtgaagatggttcagatgagtggccacaacggtgcaggggtttatatgtcttccagggagattcgtccccctgctcggcctttgagtttcactgcctgagtggggagtgcatccacagtagctggagatgtgacggcgggcctgattgcaaagacaagagtgatgaagagaactgtgctgtagctacatgtaggcctgatgagtttcagtgcagcgatggaaattgcatacacgggtcccgacagtgcgacagggagtatgactgcaaagacatgtccgacgaagtggggtgtgtgaatgttacgctctgtgagggccctaataaattcaaatgtcatagtggcgagtgcatcacactagacaaagtttgtaatatggcacgagactgcagagactggtcagacgagcctataaaggagtgcgggactgcggcttgcctggataataacggcggttgctcccatgtttgcaacgcactgaagataggcgcggaatgtctttgccctgatgggtttcagctggtcgcccaacgtagatgcgaggatatcgacgaatgtcaagatcccgacacatgtagccagctgtgtgtgaacctggagggaggatataaatgccagtgtgaagagggcttccagctggatccccacactaaagcctgcaaggccgtggggtccatcgcctacctgtttttcacgaatagacacgaggtgaggaagatgaccctggatagaagcgagtatacaagcctaattcctaatcttcggaatgtggtcgccctagatactgaagtggcctctaaccggatctattggagcgacctaagtcaacgcatgatctgtagcactcaactggacagggcccacggcgtgtcatcatatgacacagtgatttcacgagacattcaggcccccgacggactagccgtggattggatacactcaaacatttattggacagactccgtcctagggacagtttcagtggctgataccaaaggcgttaagaggaaaacacttttccgcgagaatgggtcgaagcctagggcaatcgtcgtagaccctgtccatgggttcatgtactggaccgattggggaacccccgctaaaatcaagaaggggggactcaatggcgtggatatttatagcctcgttacagaaaatattcagtggccaaacggtatcaccctcgatctgctgtctgggcggctctattgggtcgactccaagctgcactctatctcatcaatcgatgtcaacggcggaaaccgcaagaccattttggaggacgagaaaaggcttgctcatcctttcagcctggctgtgtttgaggacaaggtcttctggaccgatatcattaacgaagcaatcttcagcgctaaccggctgaccggttctgatgtaaaccttctggctgaaaatttactcagtcccgaggacatggtgctctttcataacctgacacagcctcggggcgtcaactggtgtgagcggacaacgctctcgaatgggggttgtcagtatctgtgtctgccagccccacagattaaccctcactctccaaaattcacctgtgcatgcccagacggaatgctcttggctcgcgatatgagaagttgcctgactgaggcggaggcagccgtggctactcaggaaacatctacagtgcggttgaaggtgtctagtacggctgtgcggacccagcacacaactactagacccgtgcctgatacgagccgcctgccaggagctacccccggactcacgaccgtcgagatagttactatgtcccatcaggccctgggcgacgtggcaggccggggaaatgagaaaaaaccctcctccgtccgcgctctgtcgattgttctgccaatcgtgcttttagtgttcctgtgtctgggcgtcttcctcctgtggaagaactggcggttaaagaatattaacagcattaacttcgacaatcccgtctatcagaagaccacagaggacgaagtgcatatttgccacaaccaggacggttacagttacccctctagacagatggtatccttggaagatgacgtcgcc

SEQ ID NO: 16470 - DNA, 2580 bp, synthetic construct
  misc_feature 1..2580: note = source = /note="Description of Artificial Sequence: Synthetic coding sequence"
  source 1..2580: mol_type = other DNA
atgggaccgtggggatggaagctgcgctggaccgtggccttgctgctggcagccgcgggtacggcagtgggggaccgctgtgaaagaaatgaattccagtgtcaggacggaaaatgcatttcctacaagtgggtgtgcgacggcagcgccgaatgtcaagatggctccgatgaatcgcaagagacttgccttagcgtcacctgtaagtcaggagatttctcttgcggggggcgcgtgaaccggtgcatcccacaattctggcggtgcgatggacaggtggattgcgataacggatccgatgaacagggatgtccgccgaaaacctgctcgcaggacgaattcagatgccacgacggcaagtgcatctcacgccagttcgtgtgcgactcagaccgcgactgcctggatggctcggatgaggcttcatgcccagtgctgacttgcggacctgcttcattccagtgcaactccagcacctgcatcccccaactctgggcctgtgacaatgaccctgactgcgaagatggatccgacgagtggccacaacggtgccgggggctgtacgtttttcagggagattcgtcgccgtgctcggccttcgagtttcactgcctctccggagaatgcatccacagcagctggaggtgcgatggtggcccggactgcaaggacaaatcggacgaagagaattgcgcggttgcaacttgccggccggatgagttccaatgcagcgatggaaactgcatccatggatccagacagtgcgaccgggagtacgattgcaaagatatgtcggacgaagtgggatgcgtgaatgtgaccctctgtgaaggacctaacaagtttaagtgtcactcgggagagtgcatcaccctcgataaagtctgcaacatggctcgggactgcagagactggtcggatgaaccgatcaaagaatgcggcaccgccgcctgcttggacaataacggaggatgcagccacgtgtgcaacgcactgaagattggcgcagaatgtctgtgtcccgacggattccagctggtggcgcagcgcaggtgcgaggacatcgatgagtgccaagatccggatacttgcagccaactgtgcgtgaacctggagggtggatacaaatgccagtgtgaggaggggttccaactggatccgcacaccaaagcatgcaaggcggtgggatcgatcgcttacctgttcttcactaaccggcacgaagtgcgcaagatgaccctcgataggagcgaatacacctccctgatcccaaacctccgcaatgtggtggcgttggatactgaagttgcttcaaatagaatctactggtcggatctctcgcagcgcatgatctgctccacgcagctggacagagcccacggagtttcctcatacgataccgtgatctccagagacatccaagctccggacggacttgcggtggactggattcactccaacatctactggactgattcagtgctggggactgtgagcgtggctgatactaaaggcgtgaaacggaaaacgctcttcagagagaatggatcaaagccccgcgctattgtggtcgacccggtgcatggattcatgtactggaccgattggggaacgccggcaaaaatcaagaaaggtgggttgaacggcgtggacatctactccttggtcaccgaaaacatccagtggccgaatggaatcactctggatctgctctccggtcggctgtactgggttgactcaaagctgcattcaatctcctctatcgatgtgaacggaggaaatagaaagacgatcttggaggacgagaagagactcgcacatccattctcgttggctgtgttcgaagataaggttttctggactgatatcatcaacgaggccatctttagcgccaataggcttactggctcggatgtgaacctcctggcagagaacctgctgagcccggaggacatggtgctgttccacaacctcacccaaccacgcggagttaactggtgcgaacgcaccaccctctcgaacggcggatgccagtacctctgccttccagccccgcagattaatccccattcgccgaagtttacctgcgcctgccctgacgggatgttgctggcacgggatatgcgatcgtgtttgaccgaggctgaggcggccgtcgcgactcaggagacttcgaccgtccggctcaaggtgagctcaaccgcagtgcgcacgcaacatactaccacgcgccctgtcccggacacctcgcgtctcccgggcgctaccccgggattgaccaccgtcgaaattgtgacgatgagccatcaagccctgggtgatgtggccggacgcggaaacgaaaagaagccttcgtcagtccgagcactttccatcgtgcttcctattgtgctgctggtattcctctgcctgggtgttttcctgctctggaaaaactggcgcttgaaaaacatcaattccatcaactttgacaacccagtctaccaaaagaccactgaggatgaggtgcatatctgtcataaccaggacgggtacagctacccatcgcgccagatggtgtccctggaggatgatgtggca

SEQ ID NO: 16471 - DNA, 2580 bp, synthetic construct
  misc_feature 1..2580: note = source = /note="Description of Artificial Sequence: Synthetic coding sequence"
  source 1..2580: mol_type = other DNA
atggggccgtggggttggaagttgcggtggaccgtcgccctgctgctggcagcggctggtaccgccgtgggcgaccgctgcgagcggaatgagtttcaatgtcaggatggaaaatgcatcagctacaaatgggtgtgtgatggatcagctgaatgccaagacggaagtgacgagtcgcaggagacttgcctgtcagtgacctgcaaatccggagatttctcgtgcgggggccgggtgaatcgctgcatcccgcagttctggcggtgtgatggtcaagtggattgcgacaacggctcggacgaacagggatgtccaccgaaaacttgttcacaggacgaattccgctgccatgatggaaagtgtatctcacggcagttcgtctgcgattccgacagggactgccttgacggaagcgacgaagcctcctgtccggtgcttacttgcggcccggcctcgtttcagtgcaactcgagcacgtgtatcccacaactttgggcctgcgacaatgacccggattgcgaggacggctcagacgaatggccccagcggtgtagagggttgtacgtgttccagggcgactcatccccctgctcggcatttgaattccattgtctctccggcgagtgcattcattcatcctggaggtgcgacggaggtccggactgcaaggacaagagcgacgaagagaattgcgccgtggccacttgcagaccagatgaattccaatgttcagacggcaattgtatccacggatcacgccagtgcgacagggaatacgactgtaaagacatgtcggatgaagtcggatgcgtgaacgtgaccctctgcgagggaccgaacaagttcaagtgtcactccggagagtgtataacgctggacaaggtgtgcaacatggcccgggattgccgcgattggtcggatgaaccgatcaaggagtgtggaaccgcggcctgcctggacaacaacggaggatgctcacatgtgtgtaatgccctcaaaatcggagcggagtgcctgtgcccggatgggttccagttggtggcccagcggcgctgtgaagatatcgacgagtgccaagacccggacacctgctctcagctctgcgtcaatttggagggcggatacaagtgccagtgcgaagagggattccagctggacccgcacactaaggcttgcaaagccgtcggatcaatcgcatacctcttcttcaccaaccgccacgaagtgcggaagatgactcttgaccgatcggaatacacttcgctgatcccaaacctgcggaacgtggtggcccttgacactgaagtcgcctctaatcggatctactggtccgatctgagccaaaggatgatctgctctacccaactggaccgggctcatggagtttcgtcgtacgacactgtgatcagccgcgacatccaggcgccggacggactcgccgtggattggatccattcgaacatctattggaccgattccgtcctggggactgtcagcgttgctgacactaagggcgttaagagaaaaaccttgtttagagaaaatggctccaagcctcgggccatcgtggtcgatccggtgcacggattcatgtattggaccgactggggtactccggcgaaaatcaagaaaggcggactcaacggagtggacatctacagcttggtgaccgaaaacatccagtggcccaacggaatcacgcttgacctgctgagcgggcgcttgtattgggtcgacagcaagctgcatagcatctcatccatcgacgttaacggaggcaatcgaaagactatcctcgaggacgagaagagattggcgcatccattcagcctggccgttttcgaagataaggtgttctggactgatatcatcaacgaagcaatcttttcggcgaaccggctgaccggctcagatgtgaaccttctcgccgaaaatctcctctcgcctgaagatatggtgctgttccacaacctgactcaaccgcgcggcgtcaactggtgcgaacggaccaccctctcaaacggcggctgccaatacctgtgcctgccggcaccgcagatcaatccgcactccccgaagtttacgtgtgcctgtcccgacgggatgctcctggcacgcgatatgcgctcctgccttaccgaagccgaggccgcggtggcgacccaagaaacctccactgtccggctgaaggtgagctccaccgccgtgcggacccagcacactaccacccgcccggtgcccgatacttcaagactgccgggcgccaccccggggctgaccactgtcgaaatcgtcacgatgtcccatcaagcgctgggagatgtcgctggacggggaaatgagaagaagccgtcgtcggtcagagccctgtcgatcgtgctgccgatcgtgctcctcgtctttctttgcctcggagtctttcttctctggaagaactggcgccttaagaacatcaattccatcaacttcgataacccggtgtaccaaaagaccactgaagatgaagtgcacatctgccacaatcaggacggatacagctacccttcccgtcaaatggtttccttggaggacgacgtggca

SEQ ID NO: 16472 - DNA, 2580 bp, synthetic construct
  misc_feature 1..2580: note = source = /note="Description of Artificial Sequence: Synthetic coding sequence"
  source 1..2580: mol_type = other DNA
atgggaccttggggatggaagctgaggtggacggtggcgctgttgctggcggcagcaggtaccgcagtgggagataggtgcgagcgaaacgagtttcaatgccaggacggtaagtgcatttcctacaagtgggtgtgtgatggatcagccgaatgtcaagacggatcggacgagtctcaagaaacctgcctgagtgttacttgtaaatccggagacttcagctgtggtggtcgcgtgaaccgctgcattcctcagttttggcgctgtgatgggcaggtggattgtgataatgggtcggacgaacaaggttgcccacctaagacttgctcgcaagatgaatttagatgccatgacggtaagtgtatttccagacagttcgtgtgcgacagcgatcgagactgccttgacggctcggatgaagcctcgtgcccagtgctgacttgtggtcctgcctccttccagtgtaactcatcgacctgtatccctcaactgtgggcatgtgataacgatccagattgtgaagatggatctgatgaatggccacagcggtgtagaggactgtacgtttttcaaggtgattcgagcccctgttcagcatttgagttccattgtcttagcggtgagtgtattcattcgagctggcgttgcgatggaggcccagattgcaaagataagtccgacgaagagaattgcgcagtcgcaacttgtcgcccggacgaattccaatgttcagacggtaactgtattcacggctcaagacaatgtgatagagagtacgattgcaaggatatgtcggatgaggtgggctgtgtgaacgtgactctgtgcgaaggcccgaacaagttcaaatgtcacagcggcgaatgcattacgctggataaggtgtgcaacatggcacgggattgtcgcgattggtccgatgaacccatcaaggaatgcgggacggcagcttgtcttgataacaacggaggctgcagccacgtgtgtaatgcgctgaaaattggagcagaatgtctgtgtccagatggatttcagctggtcgctcaacgacgctgtgaagatatcgatgaatgtcaagatccagacacctgtagtcaactgtgtgttaatctggagggcggctacaagtgtcagtgcgaagaaggatttcagctcgaccctcatactaaggcatgcaaggcggtgggttccatcgcatacctcttctttactaaccggcatgaagtgcgcaagatgactctggacagaagcgaatacacctccctgattccaaatctgaggaacgtcgtggcactggatactgaagtggcatccaatcggatttactggtctgatctgtctcaacgaatgatctgctccacgcagctcgacagagcacatggggtttcttcctatgatacggtgatttcgagggatatccaagctcctgatgggctggctgtcgattggatacattcaaacatctactggaccgatagcgttctcgggactgtgagcgtggcagataccaagggtgtgaaacgcaaaacgctcttcagggagaatggctcgaaaccaagagccattgtcgtcgatcctgtgcatggattcatgtactggacggactggggtactcccgctaaaatcaaaaagggcggactgaatggagtggacatctactcgcttgtcaccgagaatatccagtggccaaatgggattacccttgaccttctttccggtcgcctctactgggtggatagcaagctgcattcaatctcgtccatagatgtgaacggtggcaaccgtaagacgattcttgaggacgagaagcggctggcgcaccctttctcacttgcagtgttcgaggataaagtgttttggaccgacataatcaacgaggccatcttttccgcgaatcggttgactggtagcgacgtgaatctcctcgccgaaaacctgctttcgccggaggacatggtcttgtttcataacctgactcaacctcggggagtgaattggtgtgaacgcactactctttccaacgggggatgccaatacctctgtttgccagccccacagataaacccgcattcgccgaagtttacttgcgcttgtcccgatggtatgctgctggcgagagatatgaggtcgtgtctcacggaagcagaagcagcagtcgcaacccaggaaacctcaaccgtgaggctgaaggtgagcagcacggcagtgagaacccagcataccacgactaggcctgtgcctgacacgtcgaggctgccaggtgccaccccaggtttgaccactgttgaaatagttacgatgtcccaccaagccttgggggatgttgccggccgcggtaacgagaagaagccctcatccgtgcgggcactttccatagtactccctattgtgctgttggtctttctgtgtctcggtgtttttcttctctggaaaaactggcgtcttaagaacattaactcgatcaacttcgataatcctgtgtatcaaaagaccaccgaagatgaagtgcacatttgtcacaatcaggatggctacagctacccttcgcggcaaatggtcagcctcgaggacgatgtcgca

SEQ ID NO: 16473 - DNA, 2580 bp, synthetic construct
  misc_feature 1..2580: note = source = /note="Description of Artificial Sequence: Synthetic coding sequence"
  source 1..2580: mol_type = other DNA
atgggaccctggggatggaaattgcgttggacagtggcactcctcctcgcagctgctggtacagccgtgggggaccgttgcgagcgtaacgaatttcagtgccaagatggaaagtgcatttcctataaatgggtgtgcgatggcagcgccgagtgtcaggacggctcagatgagagccaggagacctgcctgagtgttacctgcaagagcggagattttagttgcggaggacgcgttaataggtgcattccgcaattctggcggtgcgacggacaggtcgactgtgacaacggatctgatgagcagggatgcccacccaaaacctgtagccaggacgaatttcgctgtcacgatggaaagtgtatctctcgacagtttgtttgtgattcagatagggactgcctggatggtagcgatgaagccagttgtccggtgctcacttgcgggcccgcaagcttccagtgcaatagctcaacctgtattccacagttgtgggcttgtgacaatgacccagattgtgaagacggctccgatgagtggcctcagaggtgccgtgggctgtacgtcttccagggagatagcagcccatgtagtgcattcgagtttcattgcctttccggcgagtgcatccattcctcttggaggtgcgatgggggcccagactgcaaagataagtcagatgaagagaactgcgctgtcgccacttgcaggccagatgaatttcagtgttcagacggcaattgcatccatggatctcggcaatgcgacagggagtatgattgtaaagatatgtcagacgaagtgggatgcgtaaatgtcactctatgtgaaggacctaataaattcaagtgtcacagcggggaatgtataaccctagacaaagtgtgcaacatggcaagggactgccgggattggtctgacgagcctataaaggaatgcggcaccgcagcatgtctcgacaacaatggcggatgttcacatgtgtgcaatgcgttgaagatcggggcggagtgcctgtgcccagacggattccagttagtggcccagcgccgctgcgaggacatcgatgagtgtcaggatcctgacacctgctcccagctgtgcgtcaatctcgaaggaggctataagtgccagtgtgaggagggattccagctggatccccatacaaaggcttgcaaagcagtgggatccatcgcgtacttgttcttcactaatcgccatgaagttcgcaagatgactcttgaccggtcagagtatacgagtctcatccctaatctcaggaacgttgtcgcactggatacagaggtggcttctaacagaatatattggtcggacctgtctcagaggatgatctgcagtacgcagttagacagggcccacggagtgtcaagctacgataccgttatcagcagagacatccaggctcctgatggcctggcagttgactggattcacagcaacatctattggactgatagtgtcctgggaaccgtcagcgtggccgacaccaagggcgtgaaaaggaagactctgtttagagagaatggctcaaagccccgcgcaatcgttgtggacccagtgcatggcttcatgtactggactgattggggaactcctgcaaaaatcaaaaaaggaggactgaatggcgttgatatttacagcctcgtcaccgaaaatatccagtggcctaatggcatcactctagacctactgagtggccgcctttactgggttgacagcaaattgcactccatcagcagcatcgacgtgaatggtggaaacagaaagaccatcctagaagacgaaaagcgtctggcccatccctttagcctggctgtatttgaagataaggtgttttggacagacatcatcaacgaagccattttctcagcgaatcgcctcacgggctcggatgttaacctgctcgcagagaatttactgtcccccgaagacatggtgttatttcacaacctaacacagcctaggggtgttaattggtgcgaacgtacaaccttgagtaacggtggatgccaatacctgtgtcttccagcacctcaaatcaaccctcatagcccaaaatttacctgcgcctgccccgacggaatgctccttgcccgtgacatgcgctcatgcttgactgaggccgaagccgctgttgccacccaagagactagcacagttaggctgaaggtgtcttccactgccgtcagaactcagcatacaaccactcggcccgttccagacaccagtaggcttcctggagctactccaggcctcactaccgtggaaatagtaactatgagccatcaagccctgggcgatgtggctggaaggggtaacgaaaagaaaccatctagtgttcgagccctcagcattgttttgccgatagtacttctggtgtttctctgcctgggcgtttttctgctttggaaaaattggagattgaaaaacatcaacagtatcaacttcgacaatccggtttaccaaaagaccaccgaagatgaagtgcatatttgccacaatcaagatggttattcttatccaagcagacagatggttagcctggaggatgacgttgca

SEQ ID NO: 16474 - DNA, 2580 bp, synthetic construct
  misc_feature 1..2580: note = source = /note="Description of Artificial Sequence: Synthetic coding sequence"
  source 1..2580: mol_type = other DNA
atgggaccgtggggttggaagctgaggtggactgtggctctcctcctggccgcagctggaaccgcggtgggagacagatgcgagaggaacgagttccagtgccaggacgggaagtgcatctcttacaagtgggtgtgcgatgggtccgcagaatgccaagatggctccgatgagagccaagaaacctgcctgtcggtgacctgcaaatccggcgacttctcatgcggcggacgggtgaaccgctgtatcccacagttctggcggtgcgacggtcaagtggactgcgataatggctcggatgaacaaggatgtccgccaaagacttgcagccaggacgagttcagatgtcacgacgggaagtgtatctcccgccaattcgtgtgcgattcagacagagactgcctggacgggagcgacgaagcctcgtgtccggtgctcacctgtggaccggcctcattccagtgcaactcctcgacctgtatcccgcagctgtgggcttgcgataacgacccagattgtgaggatggttcggatgagtggccgcaacggtgccggggcctgtacgtctttcagggagactcatcaccatgctcagcattcgagttccactgcctgtccggtgaatgtattcactcatcatggaggtgcgacggaggcccggactgcaaggacaagtcggatgaagagaactgcgccgtcgcaacgtgccggcctgacgaattccaatgctcagatggaaattgcatccatggaagccgtcagtgcgacagggaatatgactgcaaggatatgtcggatgaggtcggatgcgtgaacgtgactctgtgtgaggggccaaataagttcaagtgccactccggggagtgtatcactcttgacaaagtctgtaacatggcccgggactgccgggattggagcgacgaaccgatcaaagaatgtggaactgctgcctgtctggacaacaatggcgggtgctcgcacgtctgcaatgcacttaagattggggcggaatgcctctgcccggacggattccagctggtggctcagcgccggtgtgaggacatcgacgaatgccaggatccggacacctgctcccagctgtgcgtcaatctggagggaggatacaagtgccagtgtgaagagggtttccaactggacccgcatactaaggcgtgcaaggccgtcggttccatcgcttacctcttcttcaccaatcgccacgaagtgagaaagatgactctcgaccggagcgaatacacttcgctcatcccgaacctccggaacgtggtcgccctggacactgaagtggcgtcaaaccgaatctactggtctgatctgtcccaacggatgatctgctcgactcaactggaccgcgcgcacggcgtcagcagctacgatactgttataagccgcgatatccaggccccggatggcctggctgtcgactggatccactccaacatctactggacggattcagtgctgggaactgtgtcggtggctgacactaagggcgtgaagcggaaaacgctctttcgcgagaatggcagcaagccgcgcgcaatcgtggttgacccagttcatggcttcatgtactggactgactggggaactccggctaagatcaagaagggaggcctcaacggggtcgacatctatagcctggtgacggaaaacatccagtggccaaacggaatcactctggacctcctgtcgggcagattgtattgggtggactcgaaacttcattcaatctccagcatcgatgtcaacggtggaaatagaaagactatcctggaagatgagaagcgcctggcgcatccattctcattggccgtgttcgaggataaggtcttttggaccgacattatcaatgaagcgatcttctcagccaaccgcctgaccggatcagatgtcaatttgctcgccgagaacctcctgtcgccggaggacatggtgctgttccataatctcactcaacctcgcggcgtgaactggtgcgaacggacgactctgagcaacggaggatgccagtacttgtgtctccctgcccctcagattaatccgcacagcccgaagttcacctgcgcatgtccggatggaatgctcctggctcgggatatgcgctcctgtctgaccgaagccgaagctgccgtggccacccaggagacttctacggtgagactcaaggtgtcgtcgaccgccgtccgcactcagcataccacgaccaggcccgtgcccgacactagccgcctgccaggagctacccctggtctgactactgtggagatcgttactatgtctcaccaggcgttgggagacgtcgcgggacggggcaacgaaaagaagccttcctcagtgcgagcactttcaatcgtgttgcctatcgtgctgctggttttcctgtgcctgggggtgttcctgctgtggaagaattggcggttgaagaacataaactctatcaacttcgacaaccccgtgtaccagaaaaccaccgaagatgaggtgcatatctgccataatcaggatggctactcgtacccctcccgccagatggtgtcgctggaagatgacgttgct

SEQ ID NO: 16475 - DNA, 2580 bp, synthetic construct
  misc_feature 1..2580: note = source = /note="Description of Artificial Sequence: Synthetic coding sequence"
  source 1..2580: mol_type = other DNA
atgggaccatggggctggaaactgcggtggactgtcgcacttcttctggccgcagcaggaaccgccgttggagatcgttgcgaacgcaatgagttccagtgtcaagacggcaaatgtatatcatacaagtgggtgtgtgatggttcagcagagtgccaggacgggagcgatgagtcacaggaaacatgcttgtctgttacgtgcaaaagtggggatttttcctgcggcgggagagtcaaccgctgcatccctcagttttggcgctgtgatgggcaagtagattgcgacaacgggagtgatgaacaggggtgcccacctaagacctgttctcaggacgagtttcggtgtcacgacggcaaatgtatatctcgccagtttgtttgtgacagcgaccgggattgcctggacgggtcggacgaggcctcatgtcccgtgctgacctgcggtcccgcctccttccagtgtaacagcagtacatgcattcctcaactctgggcgtgtgacaacgaccctgattgtgaagatggaagtgatgagtggcctcagcggtgtagaggcctctatgtgtttcagggggatagcagcccctgtagcgctttcgaatttcactgcctttctggcgagtgtattcacagtagctggcggtgtgacggggggcctgattgcaaggacaagtctgacgaagagaattgcgctgttgccacgtgccgcccagacgaatttcagtgtagtgacggaaattgcattcacggttcaaggcagtgcgatcgtgagtatgactgtaaagatatgtccgatgaggtggggtgcgtaaatgtcacactgtgcgaaggcccaaacaaattcaaatgccatagcggcgaatgcatcacattggacaaagtctgcaatatggccagggattgtagagactggtcggatgagccaatcaaggaatgcggaaccgctgcgtgcctggataacaatgggggctgttcgcacgtttgcaacgcattgaaaatcggagcggaatgtctgtgcccagatgggttccagctagtggcacagcgtaggtgtgaggacatcgacgagtgtcaggaccccgacacctgtagccagttgtgtgtgaacctcgagggtggatacaaatgccaatgcgaggagggcttccaactggatccccacacaaaggcttgtaaagctgtgggcagcatcgcctacctgtttttcacaaatcggcatgaggtgaggaagatgacccttgatagatctgagtacactagcttgattccaaatctaaggaacgtcgtagcattggacacagaggtagcgagcaaccgcatttactggtctgacctgagccagcgcatgatttgctcgacgcagctggatagggcgcatggggtctcctcatacgatacagtgatttctagagacatccaagctcctgatggcctggccgtggattggattcattctaacatttactggacagactctgtgctgggcacggtgtcagtggccgatactaagggtgtcaagcggaagactctcttccgcgagaacggaagtaagccgagggccatcgtggtcgaccctgtccacggttttatgtactggacagactggggaactccagctaagatcaagaagggcgggctcaacggggtcgacatctattcactggtgacagagaatattcagtggcccaatgggatcactctggatctgctaagtggccgattgtactgggtcgactctaagctgcatagtatcagcagcattgatgtgaacggtggaaacagaaagacaattctggaagatgagaaaagactcgcacatccattctctctggccgtgtttgaagacaaggtgttctggacggatattatcaacgaagccattttttccgcgaaccgactgacaggctcggatgtaaatctactagccgagaatctgctgtcccccgaagacatggttttgtttcacaatctgactcagcccagaggtgtaaactggtgtgagaggaccacgctgagcaatgggggttgccaatatctgtgccttcccgctccgcagattaatccccactccccaaagtttacctgcgcctgcccagacggcatgctactggcccgtgacatgaggagctgccttacagaagcagaggccgctgtggcgacccaggagacctccaccgtccgcctgaaggtcagttctaccgccgtccgcacgcagcatacaaccacgagacccgtgcctgacacatctaggctcccaggggccacccccggtctaactaccgtcgaaattgtaaccatgtcccatcaagccctgggcgacgtggccggtagggggaacgaaaaaaagccatcatccgtgagagccctgtctatcgttttgccgatcgtcttactggtctttctgtgtttgggagtcttcctcctgtggaagaactggcgactaaagaacatcaactcaattaatttcgataatcccgtttaccaaaagaccactgaggatgaagtgcacatctgtcacaaccaggacgggtactcatatcccagtaggcagatggtctcactggaagatgatgtcgcg

SEQ ID NO: 16476 - DNA, 2580 bp, synthetic construct
  misc_feature 1..2580: note = source = /note="Description of Artificial Sequence: Synthetic coding sequence"
  source 1..2580: mol_type = other DNA
atgggaccatggggttggaagctgcgctggaccgtggcgctcctgctcgcggctgccggaacggcagtgggagacagatgcgaacgaaatgagttccagtgccaagacggaaaatgtatttcttacaaatgggtgtgcgatggatcggccgagtgccaggatggaagcgacgagtcacaagagacttgcctttcggtgacgtgtaagtccggtgacttttcatgtggtggacgggtgaacagatgtatcccacaattttggagatgtgatggacaggtcgactgtgacaacggatcagacgagcagggatgcccacccaagacttgttcgcaggacgaattcagatgccacgacggcaaatgcatctcacgccagtttgtttgcgactccgaccgggactgtctcgacggaagtgacgaggcctcctgcccggtcctgacctgcggtcccgcgagcttccaatgcaacagctccacttgcatcccacagctctgggcctgcgacaatgacccggattgcgaggatgggtcggacgagtggccgcagcgctgtcggggactgtacgtctttcagggtgactccagcccgtgctcagcattcgaattccactgcttgtcgggagaatgcatccactcatcctggcggtgcgacggcggccctgattgcaaggacaaatccgatgaagaaaactgcgctgtcgcgacgtgccgccctgacgaattccagtgctcggacggtaattgcatccatggaagtcgacagtgtgacagggaatacgactgtaaggatatgtcagacgaggtgggttgcgtcaacgtgactctttgcgaaggaccgaataagttcaagtgccattccggcgaatgtatcacccttgataaggtgtgcaacatggcgagagactgtagggattggtcagacgaaccgattaaagagtgcggcactgctgcctgtctcgacaacaacggcggatgttcacacgtgtgcaacgcgctgaagattggagccgaatgcctgtgccctgacggttttcaacttgtggcccagagacggtgtgaggatatcgatgagtgtcaggacccggatacctgttctcaactctgcgtgaacctggaaggaggctacaagtgccaatgcgaagagggcttccaactggatccacacactaaggcctgcaaagcagtaggctcgatcgcctacctcttcttcaccaaccgccacgaggtccgaaagatgactctggaccggtcggaatatacgtcactgatcccgaatctgcggaacgtggttgccctggacaccgaggtcgcctccaatcgcatctactggtcggatctttcccaacgcatgatttgctcaactcagctcgaccgcgcccatggcgtgtcgtcctatgatactgtgatttcgagggatatccaggctcccgacgggctcgcagtggactggatccactctaatatctactggaccgactccgtgctgggaactgtcagtgtcgccgacaccaaaggagtgaagaggaaaactctgttccgggagaatgggtcgaagccgcgcgccattgtggttgacccagtgcacggcttcatgtactggactgactgggggactccggcgaagatcaagaagggaggccttaacggagttgacatttactccctcgtgaccgaaaacatacagtggcctaacggaatcaccctcgatctgttgtcggggagactgtactgggttgactcgaaactgcattcgatctcatccatcgacgtgaatggcggcaaccgcaagaccatcctggaagatgagaaacggctggcgcatccattttcgctggcagtgtttgaggataaggtcttttggaccgacatcattaatgaagccatcttctcggccaatcggctgaccggatccgacgtcaacctgctggccgaaaacctgctgagcccagaagatatggtgctcttccacaatctgactcaaccacgcggtgtcaattggtgcgagagaactactctcagcaacggtggctgccaatacctttgcctgccagctccgcagatcaacccgcattcgccaaagtttacgtgcgcttgcccggatgggatgctgctggctcgcgacatgaggtcctgcctgaccgaagcggaggccgccgtggccacccaggaaacttccaccgtgagactgaaggttagttctacggccgtgcggacccagcacaccactacccgccccgttccggatacgtccaggctgccgggtgcaactcctggactcacgaccgtcgaaatcgtcaccatgtcgcatcaagcactcggagacgtggcaggaagagggaatgagaagaagccatcctcagtgcgcgccctgtcaatcgtgctgccgatcgtgctcctcgtgtttctttgtctcggtgttttcttgctgtggaaaaactggcgactgaaaaacatcaactccattaacttcgacaatccggtgtaccaaaagaccaccgaagatgaggtccacatctgccacaaccaggatgggtactcatacccgtcgcgccaaatggtgtcgcttgaggacgacgtggcc

SEQ ID NO: 16477 - DNA, 2580 bp, synthetic construct
  misc_feature 1..2580: note = source = /note="Description of Artificial Sequence: Synthetic coding sequence"
  source 1..2580: mol_type = other DNA
atgggcccctggggatggaaattgcgctggaccgtggccctattgctggctgccgccggaacagctgtaggggacaggtgcgagaggaatgaatttcaatgccaggatggtaaatgtatcagttacaagtgggtttgcgacggttctgccgaatgccaagacggcagtgacgaatcacaggagacttgtttgtccgtcacgtgtaagagcggtgacttttcctgcggcggccgagtgaacaggtgtatcccccagttttggcggtgcgatgggcaggtggattgtgacaacggaagtgatgagcagggatgcccgccaaaaacctgttcccaggatgagtttcgctgccatgatgggaagtgcatttccaggcagtttgtgtgcgattccgaccgtgattgcttagatggcagcgatgaggctagctgcccggtgctgacatgcggacctgcgtcttttcagtgtaatagctctacatgcatcccccagctctgggcgtgcgataacgaccctgactgcgaggacggatctgacgaatggcctcagagatgtcggggattgtatgtgttccagggtgacagctcaccctgtagtgcctttgagtttcattgcctgtctggagaatgtatacactcatcatggaggtgtgatgggggccccgactgtaaggataaatccgacgaggaaaactgcgctgtcgccacttgtaggcctgatgagttccagtgttcagacgggaactgtattcacggatcacgccagtgcgatcgggaatatgactgcaaagacatgagcgatgaggtggggtgtgtgaacgtcacgctgtgcgagggccctaacaagtttaagtgccactccggcgagtgtattacattggacaaagtgtgtaatatggcccgcgactgccgggactggtctgacgagcccatcaaagaatgcggtactgctgcgtgcttggacaacaacggcgggtgttcccacgtttgcaatgccctgaaaattggcgccgaatgcctctgtcccgacggctttcagctcgttgcgcagcggaggtgtgaggatatagacgagtgccaggaccctgacacctgttcacagctgtgtgtgaatttggaggggggctacaaatgtcagtgtgaggaaggatttcaattagaccctcacacaaaagcatgcaaagctgtgggaagcatcgcatatttattctttacaaatcgccatgaagtgcgcaaaatgactttggaccgtagcgagtacacatccctgattccgaatctgcgaaacgtggtggccctagataccgaggtagcaagcaaccgaatctattggagcgatctatctcagagaatgatctgttctactcagctcgatcgggcacatggcgtctcgtcatatgacacagtcatctccagagacatacaggccccagatggcttggcagtggattggatacattcgaacatctactggactgatagcgtgttggggacagtgtccgtcgctgataccaaaggggtcaagcggaagaccctgtttcgtgagaacggtagcaaaccgagggctatcgtcgtggacccagtgcatggctttatgtattggaccgactggggaacccctgcaaagattaaaaagggaggcctgaatggtgtcgatatttattcactggttacagaaaatatacagtggccaaacggcataacattggatcttctgtcagggcgactgtactgggtggacagtaagctccatagtatctccagtatagatgtgaatggtgggaaccgaaagactatccttgaggacgagaaacggctggcccatcctttttccctggctgtcttcgaagacaaagtattctggaccgacattataaacgaggccatctttagcgccaatcgacttaccggctccgacgttaatctgttggcggagaacctgctcagccctgaggatatggtgttatttcataatttgacgcagccccgtggcgtgaactggtgtgagcgcacaaccctgtcaaatggcggctgtcagtacctctgccttcctgcacctcaaataaacccacattctcccaaatttacttgcgcttgcccagacgggatgttgttggctcgggacatgcgatcttgtctgacagaggcagaagccgcggtagctactcaggagaccagtacagttaggctgaaagtatcctctactgcggtccgcactcagcatacgacaacccggcctgtacccgacacgagccgcctgccgggagctacgcccggactgactacggtagaaatcgtgactatgagtcatcaggcgttgggcgatgtcgccggacgagggaacgaaaaaaagccatcttcagtgcgggcactaagtatagtgttaccgatcgtgctgctcgtttttctttgtctgggagtttttcttctgtggaaaaattggcgtctgaaaaacatcaactctataaatttcgacaaccctgtgtatcagaagactacagaggatgaagtgcatatctgtcacaaccaagatggctactcctatccgagccgtcagatggtcagccttgaggatgacgtcgca

SEQ ID NO: 16478 - DNA, 2580 bp, synthetic construct
  misc_feature 1..2580: note = source = /note="Description of Artificial Sequence: Synthetic coding sequence"
  source 1..2580: mol_type = other DNA
atgggaccctgggggtggaagcttcgttggacagtcgccctgctgctggcagctgctgggacagctgtcggcgacagatgcgaacggaacgagtttcagtgccaagacggcaagtgcatatcctataaatgggtctgtgatggcagtgccgagtgccaggacggatccgatgagagtcaggaaacgtgcctgtccgtcacctgcaaaagcggggattttagctgtgggggaagagtgaataggtgcatcccccaattctggaggtgcgacggacaggttgattgcgacaacgggagcgatgaacagggatgcccgccgaagacttgcagccaggatgaattccggtgccatgacggtaagtgtatctcaaggcagtttgtctgtgattcagatagggactgtctcgatggttcagacgaagcatcctgcccagtcctgacatgcgggcctgccagtttccagtgcaattccagcacttgcatcccccagctttgggcctgtgacaatgatccagattgcgaggatgggagtgatgagtggccccaaagatgtaggggcctgtacgtctttcaaggcgattcaagtccttgttctgcattcgagtttcattgtttgagtggagagtgcattcactcctcttggcggtgtgacggaggccccgattgtaaagacaaaagcgacgaggaaaactgtgctgtcgccacatgcaggcccgacgagtttcagtgtagcgatggaaactgtatccatgggagccgccagtgcgacagggagtatgactgtaaggacatgagcgatgaggttgggtgcgtgaacgtgaccctttgcgagggcccgaataagttcaaatgtcactccggtgaatgcatcaccttagataaagtgtgcaacatggctcgcgactgtcgggattggtctgacgagcctattaaggagtgcggcacggccgcttgcctggataacaatggcggatgttcacatgtatgtaatgctttaaaaatcggtgcggaatgtttgtgtcccgatggattccagcttgtagcccagcgaaggtgcgaagacatagacgagtgccaggatcccgatacttgctcacagttgtgcgttaacctcgagggcggctataagtgtcagtgtgaggaaggcttccaacttgacccccacaccaaggcatgtaaggccgtcggtagcatcgcttacttgttctttaccaatcgccacgaggtcagaaagatgacgctcgaccggtcagaatacacatccctgattcccaaccttcggaacgtggtggccctggacactgaagtggcatccaatcggatctactggtctgatctcagtcagcgcatgatctgtagtacacagcttgatcgggcccatggagtcagttcttacgatacagtaatatccagggacattcaggcccctgacgggttggccgtggattggatccactccaatatctattggacagactcagttttaggaacagtgagcgtggcggacacaaagggcgtcaagcgtaagacgctttttcgcgagaacggttctaaacctagggccatcgtcgtcgatcctgtgcatggcttcatgtattggacagattggggaactcccgccaaaattaaaaagggcgggctgaatggcgtagacatctatagtctggttacggagaacatccagtggcctaatgggattacgctcgatttgctatccggcagactgtattgggttgatagtaagttacatagcatatctagtatagatgtgaacggaggaaatcgaaagactatcctggaggatgaaaagaggttggctcacccattcagcctggccgtttttgaagataaggtcttttggaccgacattatcaacgaagctattttttccgccaataggctgacaggtagcgacgtcaacctgctcgccgaaaatttgctgtcacctgaggacatggtcttgttccacaacctcacacagccccgtggcgttaattggtgtgagcgcaccacactctccaatgggggctgtcaatacctctgtctgcccgcccctcagatcaatccccactcacccaagtttacctgcgcctgccctgacgggatgttactggccagagatatgcgatcatgcctgaccgaggcggaagcagccgttgccacccaagaaacttccaccgtgcggctcaaggtaagttcaacagctgtgcgcacccaacacacaaccactcgaccagtacccgacacctcgaggttaccaggtgctactccggggctcaccaccgtagagattgtgactatgagccaccaggcgctcggggacgtggccgggcgggggaatgaaaaaaaaccaagtagcgtacgtgctctttcaatcgtcttgccgattgtcctgctggtctttttgtgtttgggagtgttccttctgtggaagaactggcgcctgaaaaatatcaattccattaactttgataatccagtctaccagaagacaacagaagatgaggtccatatttgtcacaaccaggatgggtactcctacccgagcagacagatggtcagtcttgaggacgacgtggcc

SEQ ID NO: 16479 - DNA, 3033 bp, synthetic construct
  misc_feature 1..3033: note = source = /note="Description of Artificial Sequence: Synthetic coding sequence"
  source 1..3033: mol_type = other DNA
atgggtgcttatgctcgagccagtggggtgtgtgcgagagggtgcctggacagcgcaggcccctggacgatgtcccgcgctctgagaccccccctgccaccactttgtttcttcttgctgctgctcgctgctgctggggccagagccggtggctacgaaacctgtcccactgtgcagccaaatatgctgaacgtgcatttgttgccccatacacacgacgatgtggggtggctcaagacagtcgatcagtatttttatggtattaaaaacgacatccagcacgccggggtgcaatatattttggatagtgtgatctctgcgcttttggccgatccaacgcgccggttcatttacgtggaaatcgccttctttagtaggtggtggcaccagcagacaaacgccacccaggaagtcgtgcgggacctggtcagacagggacgattggaattcgctaatggcggctgggtgatgaatgacgaagctgcaacacattatggagccatagtggatcagatgactctgggcctgcgcttcttggaggacacctttggcaatgatggaaggccccgcgtagcctggcatattgacccctttgggcactcacgagagcaggctagtctctttgcccagatggggtttgatggcttcttctttggtcgccttgattaccaagacaagtgggtccgcatgcagaaactcgagatggagcaggtatggcgcgcttctacgagcttgaagccgccaactgctgacctgttcaccggtgtactgccaaatggctacaaccctccgagaaatttgtgctgggacgtgctgtgtgtggaccagccactggtcgaagatcctaggagccctgaatacaacgctaaggagctcgtagactatttcctgaatgttgcaacagcgcagggccggtactacaggactaatcatacagtgatgaccatgggcagtgactttcaatacgaaaatgctaatatgtggttcaaaaatctggacaagcttataagactcgtgaatgctcaacaggccaaaggctcctcagtccacgtcctgtactccactcccgcctgctacctgtgggaattgaataaggccaatcttacctggagtgtaaaacatgatgatttctttccctacgccgatggccctcatcagttttggacagggtactttagctcaaggcctgccctcaagcggtatgagagattgtcatacaatttccttcaagtgtgtaatcaactcgaggccctggtcggacttgccgctaacgtcggtccctatggatctggcgactccgcacccctgaatgaggctatggcggtacttcagcaccacgatgccgtgagcgggacaagccgccaacacgtggccaatgattacgccagacagctggctgcgggatggggaccgtgtgaggtgctgctttctaatgctcttgcaaggctgaggggcttcaaggaccactttaccttctgtcagcagctgaacatttctatctgtccactgtcacagactgcggctaggttccaagtcattgtttataatcctcttggacggaaggtgaactggatggtgcgcctgccagtctcagaaggggtattcgtcgtgaaagaccccaatggtaggacagtcccttccgatgttgtgatattccccagctctgactctcaggcccatccacccgagctcctgtttagtgcctctctgcctgccctcgggtttagcacctatagtgtggcccaagtgccaaggtggaagccgcaggctcgggccccccagccaattcccaggagatcttggagtcccgctctgaccatcgagaacgaacacattcgagctacttttgaccctgacaccggactccttatggaaatcatgaatatgaatcagcagctgttgctgcctgtgcggcagaccttcttttggtacaacgcaagcatcggggacaacgagagtgaccaggctagcggcgcttacatttttcgacctaatcagcagaaaccactgcctgtgtcccggtgggctcagatccacctcgtcaagacgcctctggtgcaggaagtacaccagaactttagtgcatggtgtagccaggtggtgagactctacccaggtcagaggcatctcgaactggagtggtccgtaggccccatacccgttggtgacacgtgggggaaggaggtaatatctaggttcgatacccctctggagacaaagggcagattttatacggatagtaacggcagggagatcctcgagcggcggcgggattataggccaacctggaagctgaaccagacagagcccgtagccggaaactactaccctgtgaataccaggatttacatcactgacggcaacatgcagctgactgtgctgacagatcgaagtcagggtggttcttctcttagagatggctccttggagttgatggtacaccggcggctgctgaaagatgacggccgaggcgtgtctgaacctttgatggagaacggatctggggcctgggtccgcggcaggcacctggtgctgttggataccgcccaggccgccgcagcggggcacaggctgctggctgaacaggaggtcttggcacctcaggtggtactggcccccggaggaggtgcggcgtataacctgggcgctcctccccgcacgcagttctctggactgcgacgagacttgccgccttcagtgcacctgctcaccttggcctcctggggcccggaaatggtgctgctgcgactggagcatcaattcgctgtgggagaggactcagggaggaatttgtctgctccggtgactctgaatctgcgcgacctgtttagtacgtttactatcacccggttgcaggaaacgacgcttgtggcaaatcagttgcgggaggctgcctctcgactcaaatggaccacaaataccggacccacgcctcatcagaccccctatcaacttgaccctgctaacataacactggagcctatggaaatacgcaccttccttgctagcgtgcagtggaaggaggtggatggc

SEQ ID NO: 16480 - DNA, 3033 bp, synthetic construct
  misc_feature 1..3033: note = source = /note="Description of Artificial Sequence: Synthetic coding sequence"
  source 1..3033: mol_type = other DNA
atgggcgcctacgctcgcgcatcgggggtgtgtgctagaggctgtctggactctgcaggcccttggactatgtcgcgcgccctcagacctccgctgcccccgctgtgctttttcctcctgctgctggcggctgcgggtgccagagccggcgggtacgaaacctgccccaccgtacagcccaatatgctgaatgtgcacttgcttccccacacccacgacgatgttggctggctcaagaccgttgatcaatatttctacgggatcaagaatgatattcagcacgccggagtgcagtacatcttggattcggtgatcagtgccctgctcgctgatccgactagacggtttatttatgtagagatagcctttttctctcggtggtggcaccagcagacaaacgcaacccaggaagttgtgagagatctggttcgccaggggagactggaattcgcaaatgggggatgggtcatgaatgatgaggccgctacacactatggcgctatagtagatcagatgactctaggactacgctttttagaagacacattcggcaacgacgggagacctcgggtcgcctggcacattgacccatttggccactcccgggagcaggcaagccttttcgcccagatgggcttcgatggattttttttcggtagattggattatcaggataagtgggtgagaatgcagaaacttgaaatggagcaggtgtggcgagccagcacaagtctcaagcccccaaccgccgacctttttaccggagttttgcctaatggctacaatccaccaaggaacttatgctgggatgtgctttgcgtagaccaacctttggtggaggaccctagatcacctgagtacaacgcgaaagaactagttgactatttcttgaacgttgcaacagcccagggtaggtactaccgtaccaaccacacagtgatgaccatggggtccgacttccagtatgagaatgctaatatgtggtttaagaatctagacaagcttatcaggctggtcaatgcgcagcaggccaaggggtcgtccgtgcacgtcctttattcaacaccggcctgttacctttgggaactgaataaggcgaatctgacatggtccgtgaagcatgatgattttttcccatatgcggacggaccacaccagttctggacagggtatttctcgagtagacccgcccttaaaaggtatgaacgtctgagctataacttccttcaggtttgcaatcagctcgaggccctcgtgggcctagctgccaacgtcgggccatacggttcgggtgattcagcacccttgaacgaagctatggccgtgctccagcaccacgatgcagtgtcaggtacatctcggcagcacgtcgcaaacgattatgcccgacagttggccgcaggatggggaccatgcgaagtgctgctgagtaatgcactcgcccggctccgggggttcaaggaccacttcaccttctgtcaacagctgaatatctccatttgtcctctaagccagactgctgcccgctttcaggtgatagtgtacaacccgctaggcaggaaggtgaattggatggtccggctgcccgtgagcgagggggtgttcgtagtgaaagaccccaatggcagaacagtcccaagcgacgtcgttatctttccgtcttcagattcccaggctcatccccccgagctgctattttccgcatctttgcccgccctcggcttttctacatactcggtcgcacaggtgccacggtggaagcctcaggctagggcacctcagccaataccacggcgatcttggagcccagcactgacaatagagaatgagcatatcagggcaacattcgacccagatactggcctcctgatggagatcatgaatatgaatcagcagctgttgctgccagtcagacagacatttttttggtacaacgctagtataggggataacgaatctgaccaggcgagcggggcgtatatcttccggcctaaccaacagaaacctctgcccgtttcaagatgggcccagatccacttggtgaagacccctctggtgcaggaggtgcaccagaatttttctgcgtggtgctcccaggttgtaaggctgtatccagggcagcgccatcttgagctcgagtggagcgtgggaccaataccagtgggagatacctggggcaaggaggttataagtcgattcgatactccacttgagacaaagggacgcttttatactgattcaaacggaagagagattctggaacgacgacgggattaccggcccacttggaagctcaaccagaccgaacctgttgctggcaactattatcccgtaaacacaagaatctacatcactgatggcaacatgcagctgacagtgctgactgatcgctctcaaggggggtcaagtctcagagacggctctctcgagttgatggtgcacaggcggcttctgaaggatgatggcagaggtgtgagcgaaccgctgatggagaatgggtccggtgcctgggtacggggacgccacttagtgctcctggataccgcccaagccgctgcagcaggccatcgcctgctggccgaacaagaagtccttgccccgcaggtggttcttgctccaggcgggggggccgcatataacctcggggctccaccccgcacccagttttccggcttgaggagagatctgcctccaagcgtgcacctcctgactctcgccagctggggtccggagatggtgctgttgaggctggaacaccagtttgcggtgggcgaagacagcggtcggaatctgagcgcacctgtcacactaaacctgcgggatctgtttagcactttcaccataactcgcctgcaggagacaacgctggtcgctaaccaacttagagaggcggcaagccgactgaagtggaccaccaacacagggcccaccccgcaccaaacgccctaccagttggaccctgcgaacatcactcttgaacccatggagatcaggacgttcctcgcctccgtccaatggaaagaagttgacggc

SEQ ID NO: 16481 - DNA, 3033 bp, synthetic construct
  misc_feature 1..3033: note = source = /note="Description of Artificial Sequence: Synthetic coding sequence"
  source 1..3033: mol_type = other DNA
atgggagcatacgcacgggcaagcggtgtgtgtgcacgcggctgcctcgattccgcaggcccctggacgatgtccagagctttgcggccgcccctgccgccactgtgttttttcctgctgctccttgcagcagcgggtgcacgcgcgggaggctacgaaacctgccctactgtccagcccaatatgcttaatgtgcatctgttgccccacactcatgatgatgtgggatggcttaaaactgtggatcagtacttctatggtatcaaaaacgatatacaacatgctggagtgcagtacattctggactcagttatctcggctcttctggccgatccaactaggcgattcatatacgtcgaaattgctttctttagcagatggtggcatcaacagactaacgccacccaagaggtggtgcgcgacctggtccgtcaggggagactcgaatttgcaaatggcggatgggtcatgaacgatgaagcggctacccactatggagctattgtggatcaaatgaccctgggacttagattcctggaagatacttttgggaatgacggtcggcctagagtcgcatggcacatcgacccctttgggcattcgagagagcaggcaagcctgtttgcgcaaatggggttcgacgggttctttttcgggcggctggattaccaggataaatgggtgcgcatgcaaaagttggagatggagcaggtctggcgcgcaagcacctcacttaagccacctaccgccgatctgttcaccggagtgctgcccaacgggtacaacccaccaaggaatctgtgttgggacgtcctttgcgtggatcagccactggtggaggatcctcgatctccagagtacaatgcaaaggaactcgtcgactatttcctcaatgtggcgaccgcacaagggcggtactacagaaccaatcataccgtcatgaccatgggatcggattttcaatacgaaaatgcgaatatgtggttcaagaatcttgataagctcatccgacttgtcaacgcgcaacaggccaagggctcgtccgtgcacgtgttgtactccactcctgcatgttacctttgggaactgaacaaggcaaatcttacctggtcagtcaagcatgatgacttttttccttacgccgatggaccgcatcaattttggactggctacttttcttcacgaccagcccttaaacgctacgagagactgagctacaactttcttcaagtgtgcaaccagcttgaggcactcgtgggcctggctgcaaacgtgggaccatacggctcaggagatagcgccccacttaacgaggcaatggctgtcctgcagcatcatgacgccgtctctggaacttccaggcaacatgtggccaatgactacgcccgccagctggctgccgggtggggaccttgcgaagttttgttgtcgaacgcgcttgccagacttcgtgggtttaaggaccattttactttttgccaacagctgaatatcagcatctgtcccctctcgcagactgcagcaagattccaggtcatcgtgtacaacccacttggacgcaaggtgaattggatggtgcgactcccagtgtcggaaggtgtctttgtggtcaaagaccctaatggtcggaccgtgccctccgatgtggtcatttttccttcctcagattcacaagcccatcctcccgagctgctgttcagcgcatccctgccagcccttggcttttcaacgtattcagtggcccaggtccctaggtggaagccccaggcacgcgcaccacaaccaatacccagaagatcgtggtcgcctgcactgactattgaaaatgaacatattcgggcaactttcgaccctgataccggattgcttatggaaatcatgaacatgaatcaacaactgctcctccctgtgagacaaacttttttctggtacaatgcgtcgataggcgataatgaatcggaccaagcctccggagcatacattttcaggccaaaccaacagaagcctctccccgtgtcgcgatgggcacaaattcacctggtgaaaactccactggtacaggaagtgcaccagaacttctcggcatggtgctcccaagtggtcagattgtacccgggacagagacacctggaactggaatggtcagttggtcccattccggtgggagatacttggggaaaggaggtcatttcgcgctttgatactcctctcgaaacgaagggacgattttacaccgatagcaacggacgcgaaattctcgaaaggagaagagattacagacctacctggaagctcaatcaaaccgaaccagtggccggaaactactaccccgtgaatacccgcatttacatcactgatggaaacatgcagctgactgtcctgaccgatagatcccaaggagggtcatcccttagagatggatcgctggaactgatggtgcatagacgcctgctgaaggatgatggacgaggcgtgagcgaaccacttatggaaaacggaagcggggcttgggtcagaggtcggcacttggtgcttctggacacggcacaagcagcggcggcagggcaccgccttctggcagaacaagaagtccttgcaccacaagttgtgctggctccaggaggaggcgccgcgtacaacctcggagctcctccaagaactcagtttagcggccttcgacgcgacctgccgccctccgtgcacctgctgacccttgcatcgtggggccctgaaatggtgcttttgcgtttggagcatcaatttgctgtgggtgaggactccgggaggaacctctccgcacctgtcactctcaaccttagggacctgtttagcacttttactattacccggcttcaggaaaccacccttgtcgcaaaccagcttcgtgaggcagcttcccgtttgaaatggaccaccaataccggacctactccccatcaaaccccttaccaactggatcccgcaaacataactcttgaaccaatggagatcagaacgtttctggcgtcagtccaatggaaggaggtcgatggt

SEQ ID NO: 16482 - DNA, 3033 bp, synthetic construct
  misc_feature 1..3033: note = source = /note="Description of Artificial Sequence: Synthetic coding sequence"
  source 1..3033: mol_type = other DNA
atgggagcttacgcccgggccagcggagtctgcgcgcgcggatgtttggattccgcggggccgtggaccatgagccgcgcactgcgccctccactgccgccattgtgtttcttcttgctgttgctggccgcggcgggagcccgagctggagggtacgagacttgcccaaccgtccagccaaacatgctcaacgtgcacctgttgcctcatactcatgacgacgtgggatggcttaagaccgtcgaccagtacttttacggcatcaaaaacgacatccaacatgcaggagtccagtacatcctggactcggtcatcagcgcgctgttggccgatccgacgcggcgctttatctacgtggaaatagcgttctttagccggtggtggcaccagcagaccaacgctacccaggaggtcgtcagagatcttgtgaggcagggacggttggagttcgccaacggtggttgggtgatgaacgacgaggccgctacccattacggcgcgatcgtggatcaaatgaccttgggactgagattcctggaggataccttcgggaacgatggacgaccccgggtggcatggcacatcgacccattcggccattcccgcgagcaagcatccctgttcgcccagatggggtttgatggattcttcttcggacggctggattaccaagataagtgggtccgcatgcaaaaactggagatggaacaggtctggcgggcgagcacctcgctgaagccccctaccgccgatctgttcaccggtgtcttgcccaatggctacaatccaccgagaaatctgtgttgggatgtgttgtgtgttgatcaacccttggtcgaggacccaagatccccggagtataacgccaaagagctggtggattacttcttgaacgtggcgaccgcacagggacggtactatcggactaatcacaccgtgatgaccatgggatccgatttccaatacgaaaacgctaatatgtggttcaagaatctggacaagctcatcaggctcgtcaatgcccaacaggcaaagggttcaagcgtgcatgtcctttatagcacccccgcctgctacctctgggagctgaacaaggctaacttgacttggtccgtgaagcacgatgacttctttccttacgcagatggaccgcatcagttttggactggatacttctcgtctcgtcctgctctcaagcgctacgaaaggctgagctataacttcctccaggtttgtaatcaattggaagccctggtgggactggcggccaatgtggggccatacggatcgggtgacagtgcccccttgaacgaagccatggccgtgctccaacaccacgatgctgtctcggggacttcaagacagcacgtggccaacgattacgcgagacaactggcggccggctggggaccgtgcgaagtgctgctgagcaacgccctggcccgcctgcgcggtttcaaagatcattttactttctgccagcagctgaacatcagcatatgcccgctcagtcagaccgcggctcgctttcaagtgatcgtgtacaacccgcttggccgaaaagtgaactggatggtgcggctgccggtgtccgaaggggtgttcgtggtcaaggacccaaatggccggactgtgccatcggatgttgtgatcttcccatcaagcgactcgcaggcccacccacccgaactgctgttttcagcgtccctgcctgcgcttggtttttcgacgtactcagtggcacaggttccgagatggaagccacaggccagagccccgcagccaatccctcggcggtcgtggtcgccggccctcactatcgaaaacgagcatatccgcgccaccttcgacccagacaccggactgctcatggagattatgaatatgaatcagcaactcctgctgcctgtgcgacagaccttcttctggtacaatgctagcatcggggacaacgaaagcgaccaggcttccggagcttatatctttcgtccaaatcaacaaaagcctctgccggtgtcacgctgggctcagatccatctggtgaaaacccccctggtccaggaagtgcatcagaatttctctgcttggtgcagccaagtggtgagactgtacccggggcaaagacacctcgagctggaatggtcagtgggccctatcccagtcggagatacttggggaaaggaagtgatctcaaggtttgacaccccgctggaaaccaaaggccgcttctacaccgattcgaacggcagggagatccttgagcgccgccgcgactacaggcctacctggaaactgaatcaaactgaaccggtcgccggcaactactatcctgtgaacaccagaatctacatcactgatggaaatatgcagctcaccgtgctcaccgatcgctcacagggcggatcgtccctgcgggacggatcactcgagctcatggtgcaccgccgcctcctgaaagacgacggtcgcggagtgtcagaaccgttgatggagaacggaagcggcgcgtgggtccgaggccgccacctcgtgctgctcgacaccgcccaagccgcggcggcgggtcatagactcctggctgaacaggaggtcttggcgcctcaggtggtcctggcgccgggaggaggcgcggcttacaatctgggggcgccgccgcggacccagttctcagggctgcgccgcgacctgcccccgagcgtgcacctcctcacccttgcttcgtggggcccagaaatggtcctcctcagactggaacatcagtttgcagtgggagaagattcaggaagaaacttgtcggccccggtcacccttaacctgcgcgacctgttctccactttcaccatcaccaggctgcaagaaaccactctcgtcgcaaaccagctgcgggaagccgcttcaaggctgaagtggaccactaacactggcccgactccacaccagactccttaccagcttgacccggcaaacattaccctcgagccgatggaaatccggactttcttggcgtcagttcaatggaaggaggtggacgga

SEQ ID NO: 16483 - DNA, 3033 bp, synthetic construct
  misc_feature 1..3033: note = source = /note="Description of Artificial Sequence: Synthetic coding sequence"
  source 1..3033: mol_type = other DNA
atgggcgcatacgcgagggcttcaggagtgtgtgcccgcggttgccttgattccgcaggaccatggactatgtccagggcacttagacctcctcttcctcctctgtgtttcttccttctcctgcttgcagccgcaggggcacgcgctggtggttacgaaacttgtcctactgtgcagccaaatatgctgaacgtgcatcttcttcctcacacccacgatgatgtgggatggctgaaaactgtggaccagtacttttatggcattaagaatgacattcagcatgcgggagtgcaatacatcctggactcggtgataagcgccctgctggcagatccgacccgccgctttatctacgtcgagattgcgttcttttcgagatggtggcaccaacaaacgaacgccactcaggaagtcgtgagagatctcgtgcgccagggtaggttggaattcgccaacgggggatgggtcatgaacgatgaagcagcaacccactacggtgccatcgtcgatcaaatgacccttgggctgcgttttctcgaagatacctttggtaatgatggtagaccacgcgtggcatggcatattgatcctttcggtcactcccgcgaacaagcatcgctctttgcacagatgggctttgacggctttttcttcggtcgtctcgattaccaggataagtgggtccgcatgcaaaaacttgagatggaacaagtctggagagcgtccacctcactcaaaccaccaacggcagatctgtttacgggagtcctcccgaatggctacaacccacctagaaacttgtgttgggacgtgctttgcgtcgatcaacctctggtggaagatcctagatcgcctgaatacaacgctaaagagcttgtcgactacttcctgaacgtggcaaccgcacaagggcgctactaccgcaccaatcacactgtgatgaccatggggagcgacttccaatacgaaaacgcaaatatgtggttcaagaacctggacaagttgatccggctcgtgaacgcccagcaagcgaagggttcgagcgtacatgtgctgtactcaactccagcatgttacttgtgggagctgaataaggcaaatctgacttggtcggtgaagcatgacgactttttcccttacgcggatgggccacaccaattctggactggttacttctcctcccgacccgcactgaaacgctacgagagactgtcctacaactttctgcaggtgtgcaaccaattggaggcgctggtgggactggccgccaatgtgggtccgtacggatccggggattctgccccgctcaatgaagctatggcagtccttcagcatcatgacgcggtgtcaggcactagccgtcaacatgtcgcaaacgattatgcacgccagcttgcagccggatggggaccatgtgaagtccttctgtcaaatgcgcttgcacgactccgaggatttaaggaccattttactttttgtcaacaactgaacatttccatttgtcctcttagccaaaccgcagcacggttccaggtgattgtgtacaatccactgggccggaaggtcaattggatggtgcgcctcccggtgagcgagggcgtctttgttgtgaaagacccaaacgggaggactgtgcctagcgatgtcgtcatttttccatcatcagactcccaggcgcaccccccagaacttctcttctcagcctctctgccggcactcggcttcagcacctactccgtcgcacaggtgcctagatggaaaccacaagccagagcacctcaacctatcccgagaaggtcgtggtcgcctgcccttaccatcgaaaatgaacatattcgggccacgtttgatcctgatactggacttcttatggagatcatgaacatgaaccagcagctgctcctgcctgtccggcagacctttttctggtacaatgcttccatcggtgataatgaatcggatcaggcctccggagcatacatctttaggcctaaccaacaaaagcctctgcctgtgtcgaggtgggcgcaaattcatcttgtgaaaacgccacttgtccaggaagtgcatcaaaactttagcgcatggtgttcgcaagtcgtcagactgtacccaggtcaacgccatcttgaactggaatggtcggtcggacctatccccgtcggagatacgtggggaaaggaagtgatctcgcgattcgacacccccctggaaaccaagggtcgcttttacaccgactccaacggtcgcgaaatcctcgaacgccgccgtgattacagaccgacctggaaactcaaccagaccgagccagtggcaggaaactactaccctgtgaacactcggatttacattactgatggcaacatgcagctgacggtgcttaccgatcgttcccaggggggatccagcttgagagatggttcgctcgagcttatggtccatcgccgacttctgaaggacgacggaagaggagtgtcagaacctcttatggaaaacggttcgggtgcctgggtgagaggccgacatctggtcctgctggatacggctcaagcggcagcagccggccaccggcttctggcggaacaggaggtacttgcacctcaggttgtccttgcaccgggtggtggagccgcatacaaccttggagcaccacctcgcacccaattttccggactgagacgcgatctgccaccaagtgtgcatttgctcactcttgcatcttggggacccgaaatggtgctgctcaggctggaacatcaatttgccgtgggagaggattccgggcgaaatctcagcgcccccgtgaccctcaatttgagggatctcttcagcaccttcaccattaccagactgcaagaaaccactctcgtcgcaaaccaactgcgcgaagccgcatctcgacttaagtggaccactaacactggcccaaccccacatcagaccccgtaccaacttgatccagcgaatatcacccttgagcccatggagattagaacctttttggcctccgtgcagtggaaagaagtggatggt

SEQ ID NO: 16484 - DNA, 3033 bp, synthetic construct
  misc_feature 1..3033: note = source = /note="Description of Artificial Sequence: Synthetic coding sequence"
  source 1..3033: mol_type = other DNA
atgggagcctacgctagggcctctggtgtgtgcgcccggggctgcctggactccgctggtccctggactatgtcgcgcgcgctgcgccctccgttgcccccgctgtgctttttcctgctcctcctggccgccgccggagccagggccggaggatacgagacttgcccgactgtgcagcctaacatgcttaacgtgcacctgctgccgcatacccatgacgacgtcggatggctcaagaccgtggatcagtacttctacggaatcaagaacgacattcagcacgcgggagtgcagtacatcctggattcggtgatctcggccctgctggctgacccgactagacgcttcatctacgtggagatagccttcttctcaaggtggtggcatcagcaaaccaatgccactcaagaggttgtgcgggacctggtgcgccaagggcggctggagttcgccaatggaggatgggtgatgaatgacgaggcggccacccactacggggctatcgtggaccagatgacgctgggtttgcgcttccttgaggacaccttcggcaatgacggcagaccacgggtcgcgtggcacatcgaccctttcgggcatagcagagagcaggccagcctgtttgcccagatgggttttgacggattcttcttcggtagactggactatcaagataagtgggtgcgcatgcaaaagctggaaatggagcaggtgtggcgcgcctcaaccagcctgaaaccgcctaccgcggacctctttaccggagtgttgccgaatggttacaatccgccgcgcaacctgtgctgggatgtcctgtgcgtcgatcaaccgcttgtcgaggacccacggtcacctgagtacaatgcaaaggaacttgtggactacttccttaacgtcgcgactgcgcagggacgatactacagaaccaatcacactgtcatgactatgggatccgacttccagtacgagaatgcaaacatgtggtttaagaatctggacaagttgattaggttggtgaatgcgcagcaagcaaagggatcgtcggtgcacgtgctctacagcaccccagcctgttacttgtgggaactgaataaagcaaacctgacgtggagcgtgaagcatgacgacttctttccatacgccgacggacctcatcagttctggactggttacttctcgagccggcccgcacttaagcggtacgaaagactgtcgtacaatttcctccaggtctgcaaccagctcgaggcactcgtgggcctcgcggcgaacgtcggtccctacggaagcggcgattcagcgccgttgaacgaagccatggccgtgcttcagcaccatgacgcggtcagtggaaccagccggcagcacgtggcgaacgattatgccagacaactggccgctgggtggggaccatgtgaagtgctcctctccaatgccctcgcccgattgcggggcttcaaggaccatttcaccttctgccagcaacttaacatctccatctgccctctgtcccaaaccgcggccaggtttcaagtgatcgtgtacaacccgttgggacggaaagtgaattggatggtgcggctgcccgtctcggagggggttttcgtggtgaaggatccgaatggacggaccgtcccgtcagatgtcgtgattttcccatcgtcggactcgcaggcccatcctccggagctcctgtttagcgcttcattgccagcactcggattctccacctacagcgtggcccaagtcccccggtggaagcctcaagcccgggctccacagcctatcccacgcagatcgtggtcacctgccctgactatcgaaaatgaacatatccgggctaccttcgacccagacaccggattgctcatggagatcatgaacatgaaccagcagctgctcctgccagtgagacagacctttttctggtacaacgctagcattggtgacaacgaatccgaccaggcgtcgggcgcctacatctttcgccccaatcaacagaagccactgcctgtgtccaggtgggcccaaattcacctggtgaaaacccccctggtgcaggaagtgcatcagaacttttcggcctggtgcagccaggtggtcagactttaccccgggcagcggcatctggaattggaatggtccgtcggcccaatcccggtaggagacacctggggtaaagaggtgatctcgcgcttcgataccccgctggagactaaaggccggttctacaccgactcgaacggacgggaaatcttggaacggagacgcgactaccgaccgacttggaaactgaatcaaaccgagccggttgctggaaactattacccggtgaacacccgcatctatatcacggacgggaacatgcagctgactgtgctgactgaccggtcccaaggaggctcttccttgcgcgacggctcgctggagcttatggtccaccgcaggctgctcaaagatgacgggaggggcgtgtcggagccgctcatggagaacggctcgggtgcctgggtgcgcggaaggcatctggtgctcttggacaccgcgcaggccgccgccgccggccaccgtctgctcgccgaacaagaggtcctggctccgcaagtggtgctggcaccgggcggtggagcagcctacaatctcggcgccccgcctcgcactcaattctcgggcctccggcgggacctgccgccttcggtccatttgctcactcttgcgtcatggggaccggagatggtcctcctgagactggaacaccagttcgcggtgggagaagattcaggaaggaatctgtcagcccccgtgactctgaacctccgtgatctgttctccactttcactattaccagactgcaggaaaccaccctcgtcgccaatcagctgcgcgaggcagcttccaggctgaagtggacgacgaacaccggacccaccccgcaccaaaccccttaccagctggatcctgccaacatcaccctggaaccaatggaaattcggacttttctggcatcagtgcaatggaaggaagtggatgga

SEQ ID NO: 16485 - DNA, 3033 bp, synthetic construct
  misc_feature 1..3033: note = source = /note="Description of Artificial Sequence: Synthetic coding sequence"
  source 1..3033: mol_type = other DNA
atgggggcctacgcccgtgcctctggagtttgcgcccgcgggtgtctagattcggcgggcccgtggaccatgtcccgtgctctgcgccctcccctaccacccctgtgtttctttctgctgctgcttgcggccgctggggcccgcgcgggaggatatgaaacttgcccaacggtccaacctaatatgctcaacgttcatctccttcctcacacacatgacgatgttggctggttgaaaacagtcgaccagtacttttacgggattaaaaatgacatccagcacgccggggtgcaatacattttggattccgtgatttccgctttgcttgccgaccctacccgaagatttatctacgtggaaatagcttttttctcacggtggtggcatcagcaaaccaatgcgacgcaggaggtggttcgcgatttagttcgccagggcagattggaatttgccaacggcggctgggttatgaacgatgaggcagccacacattacggagccattgtggaccagatgactctcgggttaagatttctcgaggacacatttggaaatgacggcaggcctcgggttgcctggcatattgacccattcggccacagccgcgagcaggcatcactgtttgcccaaatgggttttgacgggttcttttttgggcgtttggactaccaagacaagtgggtaaggatgcagaaattggaaatggagcaggtatggagggcttcaacatccctgaagccacccacagccgatctgtttactggcgtgctgccaaatgggtataacccccctcgtaatctgtgttgggatgtgctttgcgttgatcagcccctggtggaggatcctagatcccccgaatacaatgccaaggagctcgtcgactatttcctgaacgtagctacggcgcaggggcggtattacaggacgaaccataccgtgatgaccatgggtagcgactttcagtacgagaatgccaatatgtggttcaaaaacttggacaaactgattcgccttgtgaacgcacaacaagccaaaggctccagcgtccacgtcttatactccacacctgcttgttacctctgggagctcaacaaagccaatctgacctggagtgtgaaacacgacgatttctttccgtacgccgacgggcctcatcagttttggaccggatatttcagctcccggcctgcactcaagcggtacgaaagattatcttataatttcttgcaagtttgcaatcagttagaagcgctggtcggattggctgccaatgtgggcccatacggcagcggtgattcagcgcctctgaatgaagctatggcagtgctacaacatcatgacgctgtctccgggactagtcggcagcatgtggcgaacgattatgcacgccagctggccgctggatggggcccatgcgaagtactgctttctaatgctctcgcacgtctccgggggtttaaagatcactttactttctgtcaacagttgaatatcagcatctgccctctaagccaaaccgctgctagattccaggtcattgtgtacaacccactgggtaggaaggtgaactggatggtgcgccttcccgtctccgagggggtgtttgtcgtgaaagaccccaacggtaggaccgttccgtcagatgtggtaatattcccgtcctctgattctcaggctcatccgcctgagctactgtttagcgctagtttaccagccctgggattcagtacttattccgtcgcccaagttcctcggtggaagccgcaagctagggcaccacaaccaattcccaggcgtagctggagccctgccctgaccatcgagaatgaacacatccgagctacattcgaccccgacacaggtctgctgatggagatcatgaatatgaaccagcaacttctgctccctgtcaggcagacatttttctggtacaatgcctccataggggacaatgagtcggatcaagcatcaggtgcttacattttccggcccaatcaacagaagcccctgcctgtctcacggtgggcccagattcatctggtgaaaactcctcttgttcaggaagtgcatcagaacttctccgcctggtgcagccaagttgtgcgcctgtatccgggccaaaggcacctcgagctcgagtggagcgtggggcccatacctgtaggtgatacctggggaaaggaggtaatatcccggttcgacaccccattagagacaaagggcaggttctacacagatagcaatggaagagagattctggagcggcggcgggattaccgccctacctggaaactaaaccaaacagagccggtggccggcaattattatcctgtcaacacccggatctatattacagacggaaacatgcaacttacagtgctcacagatcgttctcaggggggatcaagtctgcgagacgggtcactcgagctgatggtgcacaggagactcctcaaggatgatggcaggggggtgtccgaaccactcatggagaacggttctggggcctgggtgagaggaaggcacctagtgctgttggatacggctcaggcggccgccgccggtcataggctcctcgctgagcaggaggtgttagctccccaggtcgtcctggctccgggtggaggggccgcttataatttaggcgcaccccctaggacacagtttagcggtctacggcgagacctgccaccatcggtgcatctactgactctggcttcttggggaccagagatggtcctgctgaggttggagcatcagttcgccgtgggcgaggactccggtcgaaatctgtctgcgccagtgacgctaaatttgcgcgatctttttagcacattcacaattacccgcctgcaggagaccaccctcgtcgccaaccagctcagagaggcggcttctcgcttgaagtggaccacgaacactggccccaccccacaccaaactccttatcagctggaccctgccaacattaccctggagcccatggagattcggacgtttctggccagtgttcagtggaaagaagtggatgga

SEQ ID NO: 16486 - DNA, 3033 bp, synthetic construct
  misc_feature 1..3033: note = source = /note="Description of Artificial Sequence: Synthetic coding sequence"
  source 1..3033: mol_type = other DNA
atgggagcttatgcccgagcctcaggcgtgtgcgcccgcggttgtctcgacagtgcggggccgtggactatgtctcgggctctgcggccccctttgcctccattgtgcttcttcctgctcttactggcagcagctggggctcgagcaggcgggtacgaaacctgccccacagtccagccaaatatgctgaatgtgcacctgctcccacacacccacgatgacgtggggtggctgaaaacagtcgatcagtacttctacgggatcaaaaacgacatccagcacgccggcgtccaatacatactggattcggtgattagcgccctgctcgccgaccctacacgaaggttcatctacgtagaaattgcgttcttctcccggtggtggcatcagcaaactaatgcaactcaggaggtcgtccgggacctggtgaggcaagggagactcgagttcgccaacggagggtgggtgatgaatgatgaagccgccacacactacggtgccattgttgatcaaatgacccttgggctaagattcctggaggatacatttgggaacgacgggcgcccccgggttgcatggcacatcgatcctttcggacactcacgagagcaggcgtctttgttcgcccaaatgggctttgatgggttctttttcggaaggctcgactatcaggataagtgggttaggatgcagaagctggagatggagcaggtttggagagccagcaccagccttaaaccacctactgccgatctctttaccggagtgctgcccaacgggtacaatcctccccggaacctatgttgggacgttctgtgcgtggatcagcccctagtggaagatccccgttctccagaatacaacgcaaaggagctggtggactacttcctgaatgtggctaccgctcagggaagatattatcggaccaatcacaccgtgatgacgatggggagcgattttcagtatgagaacgccaacatgtggttcaaaaatctcgacaaactgatccgcttggtgaacgcgcagcaggccaaaggttccagtgtgcatgtgctgtatagcacccccgcttgttatctgtgggagctgaacaaggctaacctgacatggtctgttaagcacgatgatttcttcccatatgcagatgggccacatcagttttggactggttatttcagttcacggccagcacttaagaggtacgagcggctctcctacaattttttgcaggtctgcaatcaattggaggctctggtcggactcgcagccaacgtgggaccctatggatctggcgattccgctcccctcaacgaggccatggcagtactacagcaccacgatgctgtttccggtacctctcgccagcatgttgctaacgactatgcccgccagctggccgccggatggggcccttgtgaagtccttctgtccaatgctcttgctaggctgcgagggtttaaagatcacttcaccttctgtcagcagctcaacatcagtatttgccccctgtctcaaactgcggctagattccaagtaatcgtgtataacccgcttggtcgcaaagtgaactggatggtgcgattgcctgtgtcagagggagtgttcgtcgtcaaagaccccaatggtaggacagtgccatcagatgttgtgatcttccctagctctgactcacaggcccaccccccggagctactgttcagcgcgtccctgcctgccttgggcttttcaacttactctgttgcccaggttccacgctggaaaccacaggctagagcaccccagccaatccctcgaagatcttggtcaccggctctgacaatcgaaaatgagcacatcagagccaccttcgatccagacaccggcctcctgatggagatcatgaatatgaaccagcaactcttgctccccgttagacaaacttttttttggtataacgcctccatcggtgacaatgagtctgatcaggccagtggcgcctacattttcaggccaaatcaacagaagcctctccctgtgagccgctgggcccagatccatctggtcaagaccccattagtgcaggaggtgcatcagaatttctccgcctggtgtagccaggtagtacgcttgtatcctgggcagcgccacctcgagctggagtggagcgtgggaccaatccctgttggggatacctgggggaaagaagtgatctcaagatttgacactccacttgaaacaaagggccgtttctatacggattcaaatgggcgggagatcctcgagaggagacgtgattaccgcccaacgtggaagctgaaccaaaccgagccagtcgcgggcaattattatccggtgaataccagaatttatataacagacggaaacatgcagctgaccgtgctcaccgacaggagccagggaggctcttcacttagggatggcagtctggagctaatggtgcatcgaagattgctgaaagatgatggaaggggcgtgtctgaaccccttatggagaatggctctggcgcctgggtgcgaggaagacacctggtcctgctcgacacggcccaggcagccgccgctggccacaggcttctcgcagaacaagaagttttagctcctcaagttgtgttagcccccggaggcggggctgcctataatttgggggccccgccaaggacccagttttcaggcttgaggcgggacctgccccctagcgttcatctgctaaccctggcctcctgggggcctgagatggtcctcctaaggctggaacatcagtttgccgtgggagaagatagcggaaggaatctgagcgcgcccgttacgctgaatctacgagaccttttctccactttcactatcacccgtttacaggaaacaacactggtggccaaccagttgagggaggctgctagtcgactgaagtggacgaccaacacagggcctacaccccatcagacgccatatcaattagaccccgccaatatcacattggagccgatggaaattcggacatttttagcttctgtgcaatggaaggaggtggatgga

SEQ ID NO: 16487 - DNA, 3033 bp, synthetic construct
  misc_feature 1..3033: note = source = /note="Description of Artificial Sequence: Synthetic coding sequence"
  source 1..3033: mol_type = other DNA
atgggggcatacgctcgagcaagcggcgtgtgtgctagggggtgtctggacagtgctgggccgtggaccatgtctagagctctccggccgccacttcccccattatgcttcttcctgttgcttttggccgcagcaggagcgcgggccgggggttacgaaacctgccccacagtacagcctaacatgttaaatgttcacctgctccctcacacacacgacgacgtcggatggctgaagaccgtggatcagtatttctatggaatcaaaaacgatattcagcacgccggcgttcagtatatccttgacagcgtgatttcggccctgcttgccgatcctacgcggagattcatctatgtagagattgccttcttttcacgctggtggcaccaacagactaacgccacccaggaggtggtccgggatctggtgaggcaaggacgactagagttcgcaaatggcggttgggttatgaatgatgaggccgctacgcactacggggcaattgtggaccagatgaccctggggctgcggtttctcgaggacaccttcggaaacgatggccggccgagggtggcctggcacatcgacccctttggacacagtagagaacaagcttcattattcgcccaaatggggttcgacgggttttttttcgggcggctggattatcaagacaagtgggtgagaatgcagaagctggagatggaacaggtgtggcgtgccagtacatcgctcaagcctccgaccgcagacctgttcaccggagtgttgcctaacggttacaatccaccacgaaatctgtgctgggacgtcctttgcgtagaccagcccttagtcgaagacccaagatcccctgaatataacgccaaagagctggttgactattttttgaatgtagctacagctcaggggagatattacaggactaatcacacagtgatgacgatgggctcagacttccaatatgaaaatgctaatatgtggtttaagaatctggataagcttattagactggtgaacgctcagcaggccaagggctcttcggtgcacgttttatatagtacgcctgcctgttatctgtgggagctcaataaggccaatctgacgtggagcgtgaagcatgatgacttcttcccttacgccgatggaccgcatcagttctggaccggttactttagctctcgccctgctttgaaacgatatgaaaggctttcctacaactttctgcaggtgtgcaatcagctcgaggcgctggtgggacttgccgcgaatgttggcccatatggctcgggagattccgctccacttaacgaggccatggctgtcctccagcatcatgatgccgtctccgggacatccaggcaacacgttgccaacgactacgccagacagctggcagccggttggggtccatgcgaggtgctgctgagcaatgcgttggcacggctccggggctttaaagaccatttcactttctgtcagcagttgaatatttctatctgtccgttaagccagaccgctgctcgcttccaggtgattgtgtacaatcctctgggacgcaaggttaattggatggtacggctccccgtgagcgagggagtattcgtcgtaaaagatcctaatggaaggactgtgcccagtgatgtggttatctttccttcgtctgactcacaggctcatcccccggagctgctgtttagtgcctccctgcccgcgttgggcttctctacgtatagcgttgcccaggtgcctaggtggaaaccccaggcacgggcccctcagcccattccaagacgctcctggtcaccagcgctcacaattgagaatgaacacatccgagcaactttcgaccccgacaccggccttctgatggagatcatgaatatgaaccagcagctcctcctgcccgttaggcagactttcttttggtacaatgcgagcatcggtgacaacgagtcagaccaggcttccggtgcctacatttttaggcctaatcagcagaaacctctgcccgtctccagatgggcacagattcatctcgtgaagacccccttggtgcaggaggtgcaccagaacttctccgcttggtgttcacaggtagtcaggttatatccaggacagaggcacctggagttggaatggtcagtggggccaattccagtaggggacacatggggtaaggaggtgatctccagatttgataccccgctggagaccaaaggacgcttttatacagacagtaacgggagagaaatactagagcggagaagagactaccgtcccacatggaagctgaaccagacagagccagtggcaggcaactactatcctgttaacacacgcatatatatcaccgacggcaacatgcagctgacagtactgactgatagatctcagggcggttcttccctgcgggacggatctctggaattgatggtgcaccggcgcctgctcaaggatgacggaagaggcgtctctgagcctctgatggaaaatggcagcggcgcatgggtccgtggccgacatctagtccttttggacacggcccaggctgccgcagctggccaccgactgctggcggagcaggaggtgctggcaccacaagttgtcttggccccgggaggtggggctgcctacaatttgggggcaccacctaggactcagttcagtgggcttcgtcgcgacctcccacccagcgtgcacctgctcacactcgcctcttgggggccagagatggtactgttaagattggagcaccagttcgctgtaggagaagattcagggcgaaaccttagtgcgccggtgactctgaaccttagagacctgttctcgacgttcaccattacccgccttcaagaaaccacattggtggccaatcagctgcgggaggcggcgagtcggcttaagtggaccacaaacaccggtcccacacctcaccagaccccgtaccagttggatccggctaatatcacccttgaacctatggaaatcaggacatttctggcaagcgtccagtggaaggaggttgatgga

SEQ ID NO: 16488 - DNA, 3033 bp, synthetic construct
  misc_feature 1..3033: note = source = /note="Description of Artificial Sequence: Synthetic coding sequence"
  source 1..3033: mol_type = other DNA
atgggtgcgtacgctcgtgcatctggggtctgtgcaaggggatgtctggattcagcggggccttggactatgagccgtgctttgcgccctccattgccaccactctgttttttccttcttctgctggcagcagcaggtgcacgcgccggaggctacgaaacctgccctactgtgcaaccaaatatgctgaatgtgcatctgctgccccatacccatgatgatgtgggttggttgaaaactgtggatcagtacttttatggcattaagaacgatattcaacatgcgggcgtgcagtacattctggacagcgtgatttccgcactcctggcagatcctactcggcgtttcatttatgttgaaattgccttcttttcccggtggtggcatcaacagaccaacgcaacccaagaggtcgtgagagatctggtccgccaaggacgactggaattcgcaaacggaggttgggtcatgaacgacgaggccgcaactcattacggggcaattgtggatcaaatgaccctggggctccggtttcttgaagatacttttggaaatgatggacggcctcgagttgcatggcacattgaccccttcggccattccagggaacaagcgtccctgtttgctcaaatgggattcgacggatttttcttcggaaggctcgattaccaagataagtgggtgagaatgcagaaactggaaatggaacaggtgtggcgcgcttcgacttccctgaagcctcccactgctgacctttttactggtgtgctgcctaacggctacaacccacctagaaacctgtgttgggacgtgctctgtgtggaccagcccctggtggaagatcctcggtcccctgagtacaacgcaaaggaacttgtcgactactttcttaatgtggcaactgcccagggaagatactaccgcactaaccatactgtcatgaccatgggatcggatttccaatacgagaatgcaaatatgtggttcaagaacttggacaagctcattcggctggtgaatgcacagcaagcaaaaggatcaagcgtgcatgtcctctactcgaccccagcatgctacctttgggaactgaataaggcgaatcttacttggagcgtgaagcatgacgatttcttcccttatgcagatggacctcaccaattttggaccggttacttttcctcacggcctgcacttaaacgctacgaacgcctgtcatataactttctccaggtgtgtaaccaacttgaagcacttgtgggccttgcagcaaacgtggggccatacggttcgggcgattctgcaccacttaatgaagcaatggcggtgctccaacatcatgatgcagtgtcgggaacctcgcgccagcatgtggcaaatgactatgcgagacaactcgcagcagggtggggtccttgtgaagtgctgctttccaacgctctggcgcgcctccggggatttaaggaccatttcaccttttgtcaacaactgaacatctccatctgtcctctgtcgcagactgcagccagatttcaggtcatcgtgtataacccccttggaaggaaagtgaactggatggtgagactgcctgtgtccgaaggagtctttgtggtgaaggaccctaatggccgaactgtcccatcagatgtggtcatatttccctcgtcggacagccaagcccatccgcctgaacttcttttctcggcaagcctgcccgcgctgggtttttcgacctacagcgtggcacaagtccctagatggaagccacaggcacgggccccacaacctattcctagacgctcgtggagccctgcgctgactattgaaaatgaacacatcagagccacctttgacccagataccggacttctcatggagatcatgaatatgaatcaacagcttctgctgcccgtgcgacagactttcttttggtacaatgcatcgatcggcgacaatgaatctgatcaagcctcgggtgcttacatcttcagacctaaccaacaaaagccattgccagtctcgcggtgggcgcaaatacatctggtgaaaactccgttggtgcaggaagtccaccaaaacttttcagcatggtgtagccaggtggtgcgtctgtaccctgggcaacggcatcttgagctggaatggtccgtgggtcctatccctgtcggagatacctggggtaaggaagtcatttcaagatttgacactccactcgaaaccaagggacgtttctacaccgattcaaatggaagagaaattcttgagagaaggcgggattaccgccccacttggaaactgaaccaaaccgaaccagtggccgggaattactaccctgtcaacaccagaatttacattaccgatggcaacatgcagcttaccgtgcttactgatagatcacaaggaggatcgtcgcttcgggacggatcgcttgaactgatggtgcaccgacgtctgctcaaggacgacggacgcggagtgagcgaaccgctcatggaaaacggttccggtgcatgggtgagaggccggcatctggtcctccttgacactgctcaagccgcggcagcaggacaccggctcctggccgaacaggaagtgctggcaccacaggtggttctcgcacctggaggtggcgcagcatacaatctgggagcgcctccacggactcagttttccggtctgcgcagggatctccccccatcagtgcatctcctgactttggcatcgtggggacctgaaatggtgctcctccggttggagcatcaatttgcggtgggagaagattccgggcggaatctgtcagcccccgtgacgcttaaccttcgcgacctcttttccaccttcactataactcgtctccaggaaacgaccctggtcgcgaaccaactgcgggaagcagcatcccgactcaagtggaccactaacaccggtcctaccccccaccagaccccataccaacttgatcctgccaatatcacgctcgaaccgatggagattaggacgtttctcgcgtccgtccaatggaaggaagtggatggt

SEQ ID NO: 16489 - DNA, 3033 bp, synthetic construct
  misc_feature 1..3033: note = source = /note="Description of Artificial Sequence: Synthetic coding sequence"
  source 1..3033: mol_type = other DNA
atgggagcctatgcgcgcgcgtcaggggtgtgtgcgcgcggttgcctggactccgccggcccgtggactatgtcgagggcacttcggccgccgctgcctcccctctgcttctttcttctgttgttggccgccgccggggctcgggcgggtggatatgaaacctgcccgaccgtccagcctaacatgctcaacgtgcacctgctgccacatacgcacgatgatgtgggttggttgaaaactgttgatcaatacttctacggaatcaagaatgacatccagcacgcaggagttcaatacatcctggattccgtaatttccgcactgttggctgatccgactcgccgcttcatctacgtggaaatcgccttcttctcccgctggtggcatcagcagacgaatgccacccaagaagtggtgcgggacctggtccggcaggggagactggaattcgccaacggcggatgggtcatgaacgacgaagcggccactcactacggcgcaatagtcgaccaaatgaccctgggacttcgcttcctcgaggatactttcggaaatgacggacgccctcgagtcgcctggcacattgacccgtttggacactcccgggagcaggcctctctgtttgcacagatgggattcgacggctttttcttcggacgcctggattaccaagacaaatgggtccgcatgcagaagctggagatggaacaggtgtggagagcgtcgacctcgctgaagccaccaacggcagacctctttactggcgtgctgcctaacgggtacaacccgccgcgcaatctgtgttgggatgtgctgtgcgtcgatcagccgcttgtggaagatcctcgctccccggaatacaacgcgaaggagctcgtggattactttctgaacgtggctacggcccaggggcggtactaccgcaccaaccacactgtcatgaccatgggaagcgacttccagtacgagaatgcaaatatgtggtttaagaacctcgataagctcatcaggcttgtgaacgcccagcaagccaagggctcgagcgtgcatgtgctgtactccaccccggcatgctacctctgggagttgaacaaggcaaatctgacctggagcgtaaagcatgatgatttctttccctacgcggacggaccgcaccagttctggaccggatatttctcatcgcgacccgccctgaagcgctacgagaggctgagctacaatttcttgcaggtttgcaatcaactggaggcccttgtcggattggccgcaaacgtcggtccatacggaagtggcgactcggcacccctcaatgaggccatggcggtgctgcaacatcatgacgcagtgagcgggacctcccggcagcatgtggcgaacgattacgcgcggcagctggcggccggatgggggccgtgcgaggtgctgctctccaacgccctcgcacgcttgcgaggcttcaaagaccattttaccttttgtcagcaactcaacatatcgatttgccctctgagccaaactgctgccagatttcaggtgatcgtctacaatcctctgggaagaaaggtgaattggatggtgcgtctcccggtgtccgaaggcgtgttcgtcgtcaaggacccaaatggcaggactgtgccatctgatgtggtgatcttcccgtcgagcgactcacaggctcacccaccggaactcctgtttagtgcctccttgcccgctctgggtttctccacctattctgtggcccaggtgccgcggtggaagccacaggcccgcgccccacaaccgatccctcggcggagctggtcgccggccctgactatcgaaaacgagcacatcagggcgaccttcgatcctgacaccggccttctcatggaaatcatgaacatgaaccagcagctgctcctcccagtgagacagactttcttttggtacaacgcctcaattggagacaacgaatcggaccaggcttcgggtgcctacatcttcagacccaatcagcaaaaaccgctgccagtctccaggtgggcacagatccacttggtaaaaaccccgctggtccaggaggtacatcagaacttctcggcgtggtgcagccaagtggtgcgcctttaccccgggcagagacatcttgagttggaatggtcggtgggtccaatcccggttggagacacttggggaaaggaggtgatctcacgcttcgacaccccccttgaaaccaagggtagattctacactgactcgaacggccgagaaatcctcgaacggcgtcgcgactacagaccgacctggaaactgaaccaaactgaaccagtggctgggaactactaccctgtgaatactcggatctacattacggatggcaatatgcaactgaccgtgttgactgatagatcacagggcggaagctcgctcagggatggctccctcgagctgatggtgcaccgtcggctgttgaaggatgacggtcgaggggtgtcagaaccgctcatggaaaatggatcgggggcgtgggtgcggggcagacacctcgttctcctcgacaccgctcaggcggccgcagcaggacaccgcctcctggcggagcaagaggtcctggccccacaagtggtccttgctccgggaggtggagcggcttacaatctgggagcgccaccacggactcaattcagcggactccggagggacctgccgccttcagtgcatctgttgaccctggccagctggggaccagagatggtacttctgcggttggaacaccagttcgcggtgggagaggactcaggaaggaacctctccgctcctgtcactctcaacctgcgtgaccttttctccactttcactattacgagactgcaggaaacgacgctcgtcgctaaccaacttcgtgaggccgcttcgcgcctgaaatggaccactaatactggccctaccccccaccaaactccgtatcaactcgacccggccaacatcaccctcgagccaatggaaatcagaaccttccttgcatccgtgcagtggaaggaagttgatggg

SEQ ID NO: 16490 - DNA, 3033 bp, synthetic construct
  misc_feature 1..3033: note = source = /note="Description of Artificial Sequence: Synthetic coding sequence"
  source 1..3033: mol_type = other DNA
atgggagcatacgccagagcatcaggtgtgtgcgcccggggatgccttgactcggcaggaccgtggaccatgtcgagggcgctcagacctccgttgcccccgctgtgtttcttcctgctgttgcttgcagcggccggggccagagcaggtggttacgaaacctgcccgactgtgcaaccaaacatgctgaatgtccatctcctcccacacacgcatgacgatgtgggatggctcaagactgtggaccagtacttttacggaatcaaaaatgacatccagcatgccggggtgcagtacatcctcgactcagtgatctccgcacttttggcagatccaacgcgacggttcatctacgtggaaatcgcttttttctcgcggtggtggcatcaacaaactaacgccacccaggaggtggtgagggacctcgttagacaaggccgcctggagttcgctaacggaggatgggtgatgaacgatgaggcggccacccactatggggctatcgtggatcagatgactctggggctccggttcctcgaggacactttcggcaatgacggccgcccgcgggtcgcctggcatatcgaccccttcggtcacagcagggagcaagcctcgctgttcgcccaaatgggattcgatggatttttcttcggacgcctggattaccaggacaagtgggtgcggatgcagaagttggagatggaacaggtgtggcgggcttccacttcccttaagccccctaccgcagatctgttcactggagtccttccaaatggctacaatccacctcgcaacctgtgctgggacgtgctctgcgttgatcaaccactggtggaggacccccgctcgccggagtacaacgcgaaggaattggtcgactacttcctgaacgtggccactgcccagggaaggtactaccggactaaccacactgtgatgacgatgggctcagatttccagtacgaaaacgcgaatatgtggttcaaaaacctggacaaactgatccggctggtgaacgcgcaacaggcgaagggatcgtcggtgcacgtgctttactccactcctgcttgctatctgtgggaacttaacaaggcgaatcttacctggtcagtgaagcacgatgacttttttccgtacgctgacggccctcaccaattctggaccgggtatttcagctcccggccggccctgaagcggtacgaaaggctctcgtacaactttctgcaagtttgcaaccagctggaggctttggttggactggctgccaacgtgggcccgtacggctcgggcgactccgctccgctcaacgaagcgatggccgtgctgcagcatcacgatgccgttagcggaacctcgagacaacacgtggccaacgattacgcccgccaactcgctgccggatggggaccgtgcgaggtgctgctgtctaacgctctcgcacgcctgcgcggtttcaaggaccatttcactttctgccaacagctgaacatcagcatatgcccactctcccagactgccgccagattccaggtgatcgtgtacaacccgctgggcagaaaggtgaattggatggtgcgcctgccggtgtccgaaggagtgttcgtggtgaaggacccaaacggccggaccgtgccatccgacgtcgtgattttcccgtcatcggatagccaggcgcatccgcctgagctgctcttttcggcatcgctgccagcgctcggatttagcacctactcagtggcccaagtgccgcggtggaagccgcaggcacgggcaccgcaaccgatccctagaagatcatggtcgccagccctgactattgagaacgaacatattagggccacctttgacccggataccggcctgttgatggaaatcatgaacatgaaccagcaactgctcttgcccgtgcgccagacgtttttctggtacaacgcgtccatcggcgacaacgaaagcgaccaagcgtccggagcgtatatctttagacctaatcaacaaaagccacttccagtgagcagatgggctcaaatccaccttgtcaagaccccgctggtccaggaagtgcaccaaaacttctcggcctggtgctcacaagtggtgcggctgtacccgggacaaaggcatctggaactggagtggagcgtcggaccaatcccggtgggcgatacctggggtaaggaagtgatcagccggttcgacacccctcttgaaactaagggacgcttttacactgatagcaatgggcgtgaaatcctggagcggcgccgcgactacagacccacttggaagctcaaccaaacggaacccgtcgccggcaattactaccctgtcaacacgcgcatttacatcaccgatggaaatatgcagctgacggttctgaccgaccgatcgcagggcggatcatcattgagagacggctcccttgagctgatggtccataggagactgctcaaggatgacggacgcggtgtgtccgaaccgctgatggaaaacggctcaggggcatgggtgcgcggacggcacctcgtcctcctggacaccgcacaggccgccgctgcaggccaccggctcctggccgaacaagaggtcctggcgcctcaggtggtgctcgcaccaggaggaggggcggcctacaacctcggggccccgccgcgcacccaattctcgggactgaggagggatctcccgccatccgtgcacctcctgactctggcatcctggggccccgaaatggtgctgttgagactggagcaccagttcgcggtcggggaggacagcggacgcaacctctccgcaccagtgactctgaatctgcgggacctcttctcgactttcaccatcactaggctgcaagaaaccacccttgtggccaaccaactgcgggaagcagcatccagactgaaatggaccacgaataccggcccaactccacaccaaaccccataccagttggatccggcgaacattaccctggagccgatggagatcaggacctttctggcctccgtgcagtggaaagaagttgacggg

SEQ ID NO: 16491 - DNA, 3033 bp, synthetic construct
  misc_feature 1..3033: note = source = /note="Description of Artificial Sequence: Synthetic coding sequence"
  source 1..3033: mol_type = other DNA
atgggagcctatgctcgcgcttctggcgtctgtgccaggggatgccttgactcagctggcccttggacaatgtctagggctttgcgcccccccttgccccctctgtgtttttttctcctgttgctggctgccgctggcgctagggccggtggatacgaaacctgcccaactgtccaacccaacatgctgaacgtgcacctgctgcctcatacacacgacgatgtgggttggctcaagacagtggaccagtatttctacggtatcaagaacgatatacagcatgctggagtgcagtacatcctggactctgttatatccgctttgctggctgacccaaccaggagattcatatacgttgagatcgctttcttttccagatggtggcatcagcagactaacgccacccaggaggtcgtacgtgacctggtccgccaaggcagacttgagttcgctaatggtggctgggtcatgaacgacgaggctgctacacactacggcgcaattgttgaccagatgactctcggtcttcgtttcctcgaggatacctttggaaatgatggacgcccccgtgttgcatggcacatcgatcctttcggccattctagggaacaggctagcttgttcgcccagatgggattcgacggttttttcttcggccgtctggattaccaggacaaatgggtccgtatgcagaaactggaaatggaacaggtgtggcgcgccagcacaagcctcaaacctcccactgccgacctgtttactggcgtcctgcctaacggttacaaccctcccaggaacttgtgttgggatgtgctgtgcgtagatcaacctctcgtcgaggatcccagatctcccgaatacaatgctaaggagctggtggactattttctgaatgtggctaccgcccaaggtaggtactacagaacaaatcacactgttatgaccatgggatcagacttccaatacgaaaacgctaacatgtggtttaaaaaccttgacaagctcatcaggctggtaaacgctcaacaggctaagggctcatccgtccatgtgctctattccactccagcttgctacttgtgggaactcaataaggccaacttgacctggtctgttaaacatgatgacttcttcccatacgctgatggcccccaccagttctggaccggttacttctcctcacgccctgctctgaagcgttatgagagactgagctataacttcctgcaggtgtgtaatcagctggaagccttggttggtctcgccgctaacgttggaccttatggaagcggcgacagcgcacccctgaacgaggctatggcagtgctgcaacatcacgatgcagtttcaggcaccagcaggcagcacgtggccaacgattatgcacgtcaattggcagccggatggggtccatgtgaagtgctcctgtccaacgccttggcaaggctgcgtggattcaaggatcacttcaccttctgccagcaactgaatattagtatctgccctctctctcagacagcagcaagattccaagtcatcgtatacaatccactgggaaggaaagtgaactggatggtgaggctgccagtttcagagggcgtctttgtggtcaaggaccccaacggtcgtactgttccatccgacgtggtcattttccccagtagcgattctcaggctcacccccctgaactgctgttctcagcctctctgcccgcattgggctttagtacctattccgtggctcaagtcccccgttggaagccacaggcaagagctccccagcccatccccagaaggtcctggtcacccgcccttacaatcgagaatgaacacatcagagcaacctttgacccagacaccggtctcttgatggagattatgaatatgaaccagcaattgctcctccctgtgagacagaccttcttttggtacaacgcctccattggtgacaacgaaagtgatcaggccagtggtgcttacatcttcagacctaatcagcagaagcccttgcccgtctctaggtgggcacagatccatctcgtcaagacacctctggtacaagaggttcaccagaatttcagtgcctggtgctcacaggttgtaagactttacccaggccaacgccaccttgagctggaatggagcgtcggacccatcccagtgggcgacacctggggaaaggaagtgatctcccgttttgatacccccctggagaccaagggaaggttctatactgattcaaacggacgcgaaatcctggaaagaagacgtgactaccgccccacctggaagcttaaccagactgagccagtagctggaaactactacccagttaacacaaggatctacatcactgacggaaatatgcagttgactgtgctgactgaccgtagccagggtggtagctccctgcgcgacggaagcctggaactgatggtacatcgtagactgctgaaggacgacggcagaggcgtcagcgaaccattgatggaaaacggcagcggtgcttgggtgcgtggtagacatctggtgcttctcgacaccgcccaagcagctgctgcaggccatagattgctggctgagcaggaagttttggcacctcaggtcgtcctcgctccaggaggtggcgccgcttacaacctgggtgcacctccacgtactcaattctcaggcctgcgtagggacctgcctccttccgtgcacctgcttactctcgccagctggggtccagaaatggttttgcttaggttggagcatcagttcgccgtaggtgaagatagcggccgtaatctttccgctccagtcaccttgaatcttcgtgatttgtttagtactttcacaatcactcgcctgcaggaaactacacttgttgccaatcaactgagagaggctgcctcacgcctcaagtggaccactaacactggaccaaccccccaccaaaccccataccaattggaccctgcaaatattactctcgagccaatggaaattcgtacattcctcgcttctgtccaatggaaagaagtggatggc

SEQ ID NO: 16492 - DNA, 3033 bp, synthetic construct
  misc_feature 1..3033: note = source = /note="Description of Artificial Sequence: Synthetic coding sequence"
  source 1..3033: mol_type = other DNA
atgggagcctacgccagagcgtcaggcgtctgtgctcgcggctgcctggactcagcggggccgtggaccatgagccgggcgctgcgcccgcctctcccgcctctgtgctttttcctgttgctcctcgcggccgctggggcccgcgccggaggctacgaaacctgcccgaccgtccaaccaaacatgctgaatgtgcacctcttgccgcatacccacgacgacgtgggatggcttaagactgtggaccaatacttctacgggattaagaacgacattcagcacgccggggtgcagtacatccttgactcggtcatctctgctttgctggcggacccgacccgcagattcatctacgtcgagatcgccttcttctcgcgctggtggcaccagcagaccaacgcgacccaggaagtcgtgcgagatctggtgcgccagggccggctggaatttgccaatggaggatgggtgatgaatgacgaggcagctactcattacggtgctattgtggaccagatgactctgggactccgcttccttgaggacacgttcggcaacgacggcagaccgagagtggcctggcatatcgacccatttggccactcgagggagcaggcatccctctttgctcagatgggattcgacgggtttttctttgggaggctcgactaccaagacaagtgggtgcgcatgcagaagctggaaatggagcaagtctggcgggcgtcgactagcctgaagccgccgaccgcggacttgttcactggcgtgctgcctaacggctacaacccgccgcggaacctgtgctgggatgtgctctgcgtggaccaacccctggtcgaggaccctcgctcaccagaatacaacgctaaagagctggtggactatttccttaacgtcgcaacggcacagggtcggtactacagaactaatcatactgttatgaccatgggatccgattttcaatacgaaaacgctaacatgtggttcaagaacctggacaagctgatccggctcgtgaatgcccagcaggccaagggttcatccgtccatgtgctctattccacgccagcctgttacctgtgggaactgaataaagcaaacttgacctggagcgtgaaacacgacgatttcttcccttacgcggacggtccgcatcagttttggacgggatacttctcgtcacggccggctttgaaacggtacgaaagactctcatacaatttcctgcaggtgtgcaatcaactcgaagctctcgtcggcctggcagccaacgttggtccgtacggatcaggagattcggcaccgctgaacgaggcaatggccgtgcttcaacaccacgacgccgtgtcaggcacctcgcgccagcatgtcgccaacgactacgcgcgccagctcgctgctgggtgggggccgtgcgaagtgctgctgtccaacgcactggcacggctgaggggattcaaagaccattttaccttttgccagcagctgaacatttccatctgcccgctgtcgcaaaccgctgcgcgattccaagtgatcgtgtacaaccccctcgggcgcaaagtgaattggatggtccgcctgccggtcagtgagggagtgttcgtggtgaaggaccccaacggaagaactgtgccgtcggatgtggtcatcttcccatcctcggattcgcaagcgcatcctccggaattgctgttctccgccagcctcccggcgctgggattttccacctactctgtggcccaagtcccgaggtggaagcctcaggcgcgcgccccgcagccaatccctcgccgcagctggagcccagcactgactatcgagaatgagcacatccgcgccactttcgacccagatactggcctgctgatggaaatcatgaacatgaatcaacagctgctgttgccggttcggcaaactttcttttggtacaacgcatcaattggggacaacgagtcggaccaagcgtcaggggcctacatctttcggccaaaccaacagaaaccgctcccggtatcaagatgggcccaaatccatctggttaagacccccctcgtccaagaagtgcaccagaacttcagcgcctggtgcagccaggttgtgcggctgtacccaggtcaacggcatctggagctcgagtggtcagtcggcccaatccctgtgggcgacacttggggaaaggaagtgatctcccgcttcgacaccccattggaaactaagggtagattctataccgactcaaatgggcgcgagatcctggaacggcgccgcgattacagaccgacgtggaagctgaaccagactgagccagtggcagggaactactacccggtgaatacgagaatctacatcaccgacggtaatatgcagcttactgtcctgaccgacaggtcccagggaggctcgtccctgcgggacgggagcctggaactgatggtccaccgaaggctgctgaaggacgacggtcggggagtctcggaaccactcatggagaacggctccggagcgtgggtccgcggccgccatctggtgcttctggatacggcacaggcggccgccgccggtcatcggctgttggcggagcaagaagtgctcgccccgcaggtggtgctggcccccggtggtggtgccgcgtataatctgggcgctccaccgcgcactcaattctccggactgagacgcgacctgcctccgagcgtgcatctcctgactttggcttcgtggggaccggaaatggtgctgctgcggctggaacaccaattcgcggtgggagaagattcgggacgcaatctctcggcgccggtgaccctgaatctccgagatctgttctctaccttcactatcactcgcctccaggagactaccctcgtggcaaatcagctcagagaggccgcctcacgcctgaaatggacgactaacaccggaccgaccccgcatcagaccccttaccaactggacccagctaacattactctggaaccgatggagatccggaccttcctggcctcagtgcagtggaaggaggtggacggt

SEQ ID NO: 16493 - DNA, 3033 bp, synthetic construct
  misc_feature 1..3033: note = source = /note="Description of Artificial Sequence: Synthetic coding sequence"
  source 1..3033: mol_type = other DNA
atgggggcctacgcacgcgctagtggggtgtgcgctcgcggatgtctcgattctgctggaccctggactatgagtcgggctctgaggccacctctcccaccactctgttttttcctactcctgcttgcggctgcaggagctcgtgctggggggtatgagacatgtcccacagtgcagccaaacatgctaaacgtgcatctcttaccacacactcatgatgatgtcgggtggctgaaaacagttgatcagtatttctatggaataaaaaatgatatacaacacgctggagtgcagtacatacttgattctgtgatcagtgctctgctcgcagatcctacaagacggtttatctacgtagagatcgctttcttttctagatggtggcatcagcagacgaatgctactcaggaagtggttcgggatcttgtaagacagggaagactcgagtttgctaacggaggatgggtaatgaacgatgaagccgcgactcactatggagcaattgtcgatcagatgacacttggactcagattcttagaagatactttcgggaacgatggacggccccgagtggcttggcatatcgatcctttcgggcattctagggaacaggccagtcttttcgcacagatgggatttgatggattcttttttggacgcttagactaccaggacaagtgggttcgaatgcagaaattagaaatggaacaggtgtggcgggcctccacttctctaaaacctcctacagccgacctcttcactggagtgctacctaacgggtataatccccctcgaaacctgtgctgggatgttctgtgcgtggaccaacctctcgttgaagatccaagatcccctgaatacaatgccaaggaacttgtggactatttccttaatgtagctacggcccaggggaggtactatcgaactaatcatactgtaatgacaatgggatctgatttccagtatgaaaacgctaatatgtggttcaaaaatctagataaactcattagactagttaacgcccagcaggctaagggatcctcagtccacgtcctatatagtactcccgcctgttacctatgggaattaaacaaagcaaaccttacttggtccgtcaagcacgacgatttcttcccctatgccgatgggcctcatcagttttggactgggtattttagtagtcgccctgccctaaagaggtatgaaagactttcttataattttctccaggtctgcaatcagctcgaagcattagttgggctcgccgcaaatgtggggccttacgggtccggggattccgcccctctgaacgaggcaatggcagtcctccagcaccacgatgcggtgagtggaacaagtagacagcatgtagccaatgattatgctagacagctggctgccggatggggaccatgtgaagtcctcctgtctaatgcactggctcgcctccggggattcaaagatcactttacattctgccaacagcttaacatatccatctgcccattgagtcagactgctgcaagatttcaggtgattgtgtacaatcccctcggacggaaagtaaattggatggtacgactgcccgtctcggaaggggttttcgtagtgaaagatcctaatgggcgaactgtgccctccgatgtggtgatattcccctcaagtgattctcaggctcacccccctgaactcctcttctccgcttcactcccagctctcggattttctacatattcagttgcacaggttccacgatggaaaccccaggcccgcgcaccccagccaatacctagacgctcatggtcccccgcgttgactatcgaaaacgaacacatcagagccacattcgaccccgatactgggcttctaatggaaatcatgaatatgaaccagcagttactgctccccgtgaggcagacatttttttggtataacgcctctatcggagataatgaatccgaccaggcaagtggagcttatatcttccgccctaaccagcagaaaccccttcctgtgtcccgctgggcccagatccaccttgttaaaactccactcgtccaagaggttcaccagaacttcagtgcatggtgttcccaggttgtgcgactctatccaggacagagacatttagaattagaatggtccgtgggaccaattcctgtgggagacacatgggggaaggaagtgatctcccggttcgatacaccacttgaaacaaaagggaggttctatactgattcaaatggacgagaaatccttgaacggcgtcgggattatcgacctacatggaaacttaatcagacagaaccagtagcggggaattattacccagtgaatacacggatatatataactgatgggaatatgcagcttacagtactcacagataggtcgcagggggggtcatccctgagagatggatctctcgaactcatggtgcatagaaggctactgaaggatgatgggcggggagtttcggaacctctaatggaaaatggaagtggagcctgggtacggggaagacacctcgtccttctcgatactgctcaggccgccgccgctgggcacaggctcctggccgaacaggaagttttggcaccacaagtcgtcctcgctccaggaggaggagccgcctataatctaggggccccaccaaggacacagttttccgggttacgaagggacctcccaccctccgtgcacctgttaacattagcttcctggggacccgaaatggtgttgctcaggctggaacaccagtttgctgtcggagaagattctgggaggaatctttcagcccccgtgacacttaatctcagagatcttttctccacgtttacaattactcgcctacaggagactacactcgtagccaaccaactcagggaagcagccagtaggctcaaatggactacaaacactgggcccactccacaccagacaccctatcagctagaccctgctaacatcactctggagcccatggaaattagaacatttttagcctctgtacagtggaaagaagtcgatgga

SEQ ID NO: 16494 - DNA, 3033 bp, synthetic construct
  misc_feature 1..3033: note = source = /note="Description of Artificial Sequence: Synthetic coding sequence"
  source 1..3033: mol_type = other DNA
atgggcgcttacgcaagagctagtggtgtgtgtgcaaggggatgcctcgatagtgcgggcccgtggacaatgtctcgggcgctgaggccccccttgccaccgctctgcttctttcttctcctgctggcagccgcaggcgctcgggccggagggtacgagacttgccctaccgtgcagcctaacatgctgaatgtgcatctgctaccacacacccatgatgatgtcggttggctgaagaccgttgatcagtatttctatgggattaagaacgatatccaacacgccggagtccagtatatccttgattctgttatatccgccctcctggcggatcccacaagacgtttcatctacgtggagattgcttttttttctcggtggtggcatcagcagacaaacgcgactcaggaggtcgtgagagatttagtgcgccagggcagactggagttcgcaaacgggggatgggtgatgaatgacgaggctgccacacattacggagcaattgtcgatcagatgacattgggactacgctttttggaggacacgtttggaaacgatggccgaccacgcgtcgcctggcatattgacccatttggccacagccgagagcaggctagtctgtttgcccagatgggatttgacgggttcttctttggcagactggactaccaggataagtgggtgcgcatgcagaagctggaaatggaacaggtctggagagcctctacatccctgaagcccccaacggccgacctgttcacaggcgtgctgcccaacggctacaaccccccacggaatttgtgttgggacgttctctgtgtggatcagcctctggtggaggacccgagaagccctgaatacaacgcgaaggaacttgtcgactacttcctgaacgttgccactgcgcaggggaggtactaccggaccaatcacaccgttatgaccatgggaagcgatttccagtatgaaaatgctaacatgtggttcaagaatcttgacaagctcattaggctcgtgaacgctcaacaggcgaaaggatctagcgtccatgtgttatattcgactccagcctgttacttatgggaactcaacaaagcgaatctgacctggagcgttaaacacgatgacttcttcccgtacgccgatggcccgcatcagttttggaccggctatttcagctctcgaccagcactgaaaagatacgagaggttgagttacaactttttgcaagtctgcaaccagctcgaggccttggttggcttagccgccaacgttggtccctacgggagcggtgatagcgcgccgttaaacgaagccatggccgtactccagcaccacgatgccgtgagcggaacgagcaggcagcatgtggcaaatgactacgcccggcaactagccgccggttggggaccatgcgaggtgttattgagtaatgccctcgcgcgactgcgaggctttaaggaccactttacattttgccagcagctgaacattagtatatgtcccctgtctcagactgcagcacggttccaagtgatcgtctacaatcccctgggtcggaaggtgaattggatggtgcggctgccagtgagcgagggcgtgtttgtagtgaaagaccctaatggtcgtacggtacccagcgatgttgttatcttcccttcatcagactctcaggcccacccccctgagcttcttttctcagcttcattgcccgccctgggcttcagtacctactcggtagcacaggtcccaaggtggaagccacaagccagggcccctcagcctattcctagacggtcctggagccccgcactgaccatcgaaaatgaacacattcgggctacgttcgatcctgacacaggcctgctcatggaaatcatgaatatgaatcagcagctgttactgcccgtgcgccagacgttcttctggtacaatgcttcaatcggggacaacgagtcagaccaggcctccggagcttacatttttagaccgaaccagcaaaagccccttccggtatcacgctgggcacagatccacctcgtcaagacgcccttggtgcaggaagtgcatcaaaacttttctgcgtggtgttctcaggttgtgcgcctttacccagggcagcgccacctggaattagagtggtcagtgggacccatcccagttggagatacatggggtaaagaggtgatttcaagattcgacactccacttgagaccaagggtcggttctacacagacagcaatggcagagagatacttgagcggagaagggattaccggcccacatggaagctgaatcagaccgagccggtggccggcaactattacccagtcaacaccaggatctacatcacagacggtaatatgcagcttaccgtgttgactgaccgaagccaaggcggatctagtttgagagatggatcactagaactgatggttcacaggcgactgttgaaggacgacggtaggggtgtctcggagcctttgatggaaaacggctctggggcttgggtcagaggccgccacttggtcctactggacaccgcacaggctgccgccgcaggtcacaggctgctggctgagcaggaggtgctggccccccaggtggtgctggcgcccggggggggggccgcatataacctcggtgcaccaccccggacgcagtttagcggcctgagaagggacctcccccctagcgtgcacctgctgaccctggcttcttgggggccagagatggtgttgctgaggctggagcatcaatttgccgtcggcgaagactccggtaggaatctcagcgctcctgtaaccctgaaccttagggatctgttctctacattcacaataactagactgcaggagacaaccctcgtggcgaatcaactgagagaagccgcatccaggctcaaatggactaccaataccggccccaccccccaccagacgccctaccagctcgaccccgcgaacatcacgttggagccaatggagatccgtaccttcttggcgtctgtgcagtggaaagaagttgatgga

SEQ ID NO: 16495 - DNA, 3033 bp, synthetic construct
  misc_feature 1..3033: note = source = /note="Description of Artificial Sequence: Synthetic coding sequence"
  source 1..3033: mol_type = other DNA
atgggagcatacgcccgcgcctcgggggtgtgcgcgcgcggatgtctcgatagcgctggaccttggactatgagccgcgctctgcggccgccgctcccaccgctgtgtttcttcctgctgctgctcgcggccgcgggagctagagccggaggatacgagacttgcccgactgtgcagccgaacatgttgaacgtccatctgttgccgcacacccatgatgacgtgggctggctcaagaccgtcgatcagtatttctatggaatcaagaatgatatccaacatgccggtgttcaatacatcctggactccgtcatctccgctctgttggccgatccaaccagaaggttcatctacgtggagatcgccttcttttcccggtggtggcatcagcaaactaatgcgactcaggaagtcgtccgggacctcgtccggcagggccgcctcgagtttgcaaacggaggatgggtcatgaatgatgaggctgctacgcattacggagctatcgtggaccagatgacgctgggacttcggtttctggaagatactttcggcaatgatgggcgccccagagtggcatggcatatcgacccatttggacactcacgggagcaggcctcgctgttcgcccagatgggtttcgacggattcttcttcggacggctcgactatcaagataagtgggtgcgcatgcagaagctggaaatggaacaagtgtggagagcgtcgacctcgctcaagccgcctaccgccgacctgttcaccggggtgctgcccaacggatacaatccgccacgcaacctgtgctgggacgtgctgtgcgtcgaccaaccactcgtcgaagatccgagatcacccgagtacaatgctaaggagttggtagattactttctgaacgtcgctaccgcgcaaggcagatactacagaaccaaccacaccgtgatgaccatgggatcggactttcaatacgaaaatgcgaacatgtggttcaagaatcttgataagctgatcagactggtgaatgcacagcaggcgaaaggatcctccgtgcatgtgctgtacagtacccctgcctgttacctgtgggagctgaacaaggcaaatctgacttggagcgtcaaacatgacgacttcttcccctacgccgacggcccgcaccagttttggactggttacttctcctcgcgccccgccctgaagaggtacgagcgcctctcatacaacttcctccaggtgtgcaaccagctggaagcgctcgtcggactggccgccaacgtcggaccgtacggatcgggagattccgcgccgctgaacgaggcgatggctgtgctgcaacaccatgacgccgtgtcgggtacttcgagacaacatgtggccaatgactacgcacgccaacttgcagccggatggggcccatgcgaagtcctcctgtcaaatgccctggcacggcttcgcggattcaaggaccatttcaccttctgccaacagttgaacatctcaatctgcccgctgtcacagaccgccgccagattccaggtcatcgtgtacaacccgctgggacgcaaggtgaattggatggtgcgcctcccggtgagcgaaggagtgttcgtggtcaaggaccccaatggacgcacggtgcccagcgacgtcgtgattttcccctcctccgattcgcaggcgcacccgccggaactgctgttctcggcttccctcccggccctgggattctctacttactcggtggcccaagtgcctagatggaagccgcaggcacgggccccgcagcctatcccacgacgctcatggtccccagcactcaccatcgagaacgaacatataagagctaccttcgatccagacaccggactcttgatggaaatcatgaatatgaaccaacagctgctcctgccagttagacagaccttcttctggtacaacgcctcgattggcgacaacgagtcggatcaagcctccggagcttacatcttccggccgaaccagcagaagccgctgcctgtgagtcgctgggcgcaaatccacctggtcaagactcctctggtccaggaggtgcaccaaaacttctcggcgtggtgctcgcaagtggtccgcctctaccctggccaaagacatcttgaactcgagtggtcagtgggtccgatcccagtgggggacacttggggaaaggaagtgatctcgcgctttgataccccgctggagactaagggaagattctacactgactcgaacggtcgggaaatcctcgagcgcagacgcgattatcgtcctacctggaagctgaatcagacggagccggtggcgggaaactactacccagtgaatacccgcatctacatcactgacgggaacatgcaactgaccgtgctgaccgaccgcagccaaggagggagcagcctgcgggacggatcgctggaactcatggtgcacaggcggcttctcaaggacgatgggcgcggtgtgagcgaaccgctgatggaaaatggatcaggagcgtgggtgcggggacgacacttggtcctgctggacaccgcccaggcagccgccgccggccaccgcttgctggcagaacaggaagttctggcgccccaggtcgtgctcgcccctggaggtggagccgcttacaaccttggcgcgccgccacgcacccagttcagcggcctcaggagggacctgccgccgtccgtgcacctcctcacgctcgccagctggggtccagaaatggttctgttgagactggagcatcagttcgctgtcggagaggactccggtcggaacctgtcggcccctgtgactctgaacctcagagatttgttttcaaccttcactatcactaggctgcaagaaactaccctggtcgccaaccaactccgcgaggcagcaagcagactgaagtggactactaacactgggcctactcctcaccagaccccctaccaattggatccggcgaacattaccctggagcctatggaaatcagaaccttcctcgccagtgtgcaatggaaggaggtggatggt

SEQ ID NO: 16496 - DNA, 3033 bp, synthetic construct
  misc_feature 1..3033: note = source = /note="Description of Artificial Sequence: Synthetic coding sequence"
  source 1..3033: mol_type = other DNA
atgggggcttacgccagggcctccggtgtttgcgctagaggctgtctagacagtgccggaccttggacaatgtcgagagccctgcgccccccgctaccgcccctgtgtttcttcctgctactcctggctgcagccggcgccagggccggcgggtacgagacctgcccaaccgttcagccaaatatgctgaatgtacacctgctccctcatacccacgatgacgtgggatggctgaaaaccgtagatcagtacttctacgggattaaaaatgacatccaacacgctggcgtgcagtatatcctggactccgttattagtgctctactggccgaccccaccaggcggtttatttatgttgagatcgcattctttagcagatggtggcaccaacaaaccaacgccactcaggaggtcgtgcgtgatctcgtgcggcagggaaggctggaattcgccaatggcgggtgggtgatgaatgacgaggccgcaacgcactatggtgctattgtggaccaaatgaccctcggtctgcgctttctggaggacacatttgggaatgacggaaggccacgagtggcatggcacatcgatcccttcggacacagccgggagcaggcaagcctgttcgcccaaatgggatttgacggattcttcttcggtcggcttgattatcaggataagtgggtgcgcatgcagaagctcgaaatggaacaggtctggcgcgcaagcacttctctgaagccaccaacagcagatctatttaccggtgtccttcctaatggatataaccccccacggaatctgtgttgggatgtgctgtgtgtcgaccaaccacttgtcgaagaccccagaagccctgagtataatgctaaggagttagtggactactttctgaacgtcgccaccgcgcagggacgctattacagaacgaatcacacagtgatgacgatgggcagcgatttccagtacgaaaatgctaatatgtggttcaagaaccttgacaaattaatcaggctcgtgaacgcacagcaggcgaaggggtcgtctgtgcatgtgctgtacagtactcccgcctgctatttgtgggagctgaataaggctaatctgacgtggagtgtcaagcatgacgacttcttcccatatgctgacggacctcatcagttctggacaggctatttttcatcccgccctgctctgaagaggtatgagcgcctatcttacaacttcctgcaagtgtgtaaccagctagaagccctcgtcggcctggccgctaacgtgggaccctacggatccggcgacagtgcacccctgaacgaagcaatggctgttttgcagcaccatgacgcggtttcgggtacctcgcgtcagcatgttgcgaacgattatgcccgtcagctggctgctggttggggcccctgcgaggtgctgttatctaacgcactagcgcggttgcgcggattcaaggatcatttcacattttgccaacagctgaatatcagcatttgccctctcagccagactgcggcccggtttcaggtgattgtctacaaccccctgggccgcaaggtgaattggatggtgaggctaccagtgagcgaaggagtcttcgttgtcaaggatccaaatggccgcacggtgccatccgatgtagtaatttttccgagcagcgactcccaggcacacccaccggagttgttgttctccgcttccctgcctgctctgggattctccacgtactcagtcgcacaggtgccccggtggaagccacaagccagagcaccacagcctattccaagacgctcttggtcccccgccttgacaatcgaaaacgaacatatcagggccacatttgaccctgataccggactgcttatggaaattatgaacatgaaccagcagttgctgctccctgtacgtcagacattcttctggtataacgcgagcattggggacaacgaatcagaccaagctagcggcgcatatatcttcagaccaaaccaacagaagcccctgcccgtctcgcgttgggcccagatccacctggtgaaaaccccgcttgtgcaagaagttcaccaaaatttttctgcgtggtgctcacaagtcgttcgcttgtaccctgggcaacgtcatttggaacttgaatggagcgtcggccctatccccgtgggagatacctggggaaaggaagtgatttctcgcttcgataccccgcttgagacgaaaggccggttctacacagacagtaatggccgagagattcttgaaagaagaagagattatcgacccacatggaaactcaatcagaccgagcccgtcgccggcaactactaccctgtaaacactcggatttacatcaccgacggaaacatgcagctgaccgttttaaccgatcggtcccagggcggatcttcgcttcgagacggaagcctggaactgatggtgcaccggcgactgttaaaggatgacgggcggggcgtcagtgaacccttgatggaaaatgggtccggagcatgggtgcgcggccgccacctcgtcttactcgacaccgcgcaggccgctgcggctgggcatcgactgcttgccgagcaggaggttctggcccctcaagttgttctggcccccggcggcggggccgcatataatttaggagcaccaccccggacacaatttagcggactgagacgagacctgccaccgagtgtgcacctcctgaccttggccagttggggtcccgagatggtgctgctaaggctggaacaccaatttgccgtaggagaagatagtggccgcaatctcagcgcccctgtgacgttgaatctgcgcgatctgttttcgacctttaccattacccgtcttcaggaaactacgctcgtggctaaccagctgcgggaggcagcttccaggctgaaatggacaaccaacactgggcccaccccacatcagacaccataccagcttgacccagcgaacataacactggagcccatggaaattcggactttcctagcctcagtgcagtggaaggaagtagatggc

SEQ ID NO: 16497 - DNA, 3033 bp, synthetic construct
  misc_feature 1..3033: note = source = /note="Description of Artificial Sequence: Synthetic coding sequence"
  source 1..3033: mol_type = other DNA
atgggcgcctacgcccgggctagcggtgtgtgcgctaggggatgtcttgatagtgccggcccgtggactatgtcaagggcattgaggccacctctgcctcctctctgcttcttcctgctgttacttgcagctgctggtgcccgagccgggggctatgagacctgcccaaccgtgcagcccaacatgctgaatgtccatctactgccccacactcatgatgacgtggggtggctcaaaaccgtcgatcaatacttttacggcattaagaatgacatccagcacgccggggttcagtacatcctcgactccgtgatcagtgccctcttggccgacccaacaaggcgcttcatctatgtggagatcgcatttttctcccgatggtggcatcaacagacaaatgctactcaggaggttgtgagggacctggtgcggcaaggaagactggagtttgccaatggagggtgggtgatgaacgatgaagcagcaacgcactatggtgcaattgtggaccaaatgaccctgggactacgatttctggaagacacgttcggcaacgacggtcgacctcgggtggcttggcacatcgatcccttcggacacagtcgcgaacaagcatccctatttgcacagatgggttttgacggatttttcttcggtcggctggactaccaggacaagtgggttagaatgcagaagttggaaatggagcaggtctggcgggcatccacctctctgaagcctcctactgccgacctgtttacaggagtcctgccgaacggctacaatcctcctcgcaatttatgctgggacgtactgtgtgtggatcagcctctggtggaagacccccgtagccctgagtacaacgcgaaagaactggtggattatttcttaaacgtagcaacagctcagggtcggtattatagaactaaccatacagtgatgactatgggctcagatttccagtatgagaatgctaacatgtggttcaaaaaccttgataagctgatcagactggtgaacgcacaacaagccaagggctcttctgtgcacgtcctgtattcaacacctgcctgctacctatgggagctcaataaagcgaacctcacttggtctgtaaagcatgacgattttttcccttacgcagatggccctcatcagttctggacgggatacttctcctctcgacccgccctcaagagatacgaacgtctgagctacaatttcttgcaggtgtgtaaccagttggaagcccttgttgggctggccgccaatgtggggccttatgggtcgggggacagcgccccactgaatgaagccatggccgtgctccagcatcatgatgcggtgtccggaacgtcaagacagcacgtcgccaatgactatgcaagacagttagcagcagggtggggcccttgtgaagtcctgctctctaacgcactggcccgactgcgcggcttcaaggaccatttcacattctgccaacagttgaacatctccatttgtccactttctcaaaccgcggccaggtttcaagtgattgtgtacaaccccctgggccgcaaggtgaattggatggtgcggctgcctgtgtctgaaggtgtgttcgtggttaaagacccaaatggacggaccgtcccatcagatgtcgtgatttttcctagctccgactcccaagcccaccccccggaactattgttcagcgcctctctgcccgctctgggcttttccacatattccgttgctcaggtccccagatggaaaccccaagcacgcgcccctcaacccatacctaggagatcttggtcccctgctttaacaatcgaaaatgagcacattcgagccaccttcgacccagatacaggtctcctcatggaaatcatgaatatgaaccaacagttgctgctgcccgtcagacagacgtttttttggtataatgcgagcatcggggataatgaaagcgaccaggccagcggagcctacattttcagaccaaaccagcaaaaacctctacccgtttcaagatgggcacaaattcatctggtgaagacacctctggtgcaagaagtccaccagaatttctcagcttggtgtagccaggttgtgcggctttaccctggacaacggcatctggaactcgagtggtccgtaggtcctatccccgtaggggacacatggggaaaggaggtaatttcaaggtttgacactcccctggagacgaaaggacgcttttacactgattcgaatggacgagagattctcgagcggcggcgggattacaggccaacttggaaactgaaccagaccgagccagtcgcaggaaattattatcccgtgaatacaagaatttatataacagacggcaatatgcagcttacagtcttaacagacaggtcccagggaggctctagcctgagagacgggtctttggagctgatggtccaccgccgactgctgaaggatgacgggcgtggggtaagcgaacccctaatggagaacggatctggagcctgggtgcggggacggcatttagtcttgttggacaccgcgcaggctgccgctgctggtcatcgcctgttggcagagcaggaagttctcgccccccaggtggttctcgcacctggcggaggggccgcctacaaccttggtgcccctcctcggacacagttctccgggctgaggagagatctccctccgagcgtacatttgctcaccctagccagttggggccccgagatggtgctgcttagattagaacaccagttcgccgtcggagaggattccggaagaaatctgtctgccccagttacgctgaacttgcgagacttgttttctacatttaccattacacggctgcaagagacaactttagtggccaaccagctgagggaagcggcttctcgactgaaatggacaaccaacacgggacccacccctcatcagactccctaccagttagatccagccaatatcacactggagcctatggagataagaacattcctggcgagtgtgcagtggaaagaagtggacgga

SEQ ID NO: 16498 - DNA, 3033 bp, synthetic construct
  misc_feature 1..3033: note = source = /note="Description of Artificial Sequence: Synthetic coding sequence"
  source 1..3033: mol_type = other DNA
atgggcgcttatgcgagagcatcgggcgtgtgcgccagaggctgccttgattccgccggcccatggaccatgagccgggccctccgccctccgcttccgccgctctgttttttcttgctcctcctggccgcggcaggtgcccgcgcgggagggtacgaaacctgtccgactgtgcagcctaatatgctcaacgtgcacctgctgccccatactcacgatgacgtgggctggctgaaaaccgtggatcagtacttctacggaattaagaatgacatccagcatgcgggcgtgcagtacatccttgactcagtgatctcagcactcctggcagacccgacgcggcgcttcatttacgtcgagattgccttcttttccagatggtggcatcaacagaccaacgccactcaggaagtggtgcgcgatctggtgagacagggtagactggagttcgcgaatggagggtgggtgatgaacgatgaggcagccacccactatggagctatcgtcgaccagatgactctgggcctgagatttctggaagataccttcggcaatgacggaaggccgcgggtggcatggcacatcgatccgtttggacacagtcgcgaacaggcctccctgttcgctcagatggggttcgatggattcttctttggacggctggactaccaggacaagtgggtccgcatgcagaagttggaaatggagcaagtctggagagcgagcacttccctgaaaccgccgaccgcggatctgttcaccggtgtgctgccgaatggatacaacccgccacggaacctctgctgggatgtcctctgcgtggaccaacccctggtggaagatccgagatcccccgaatacaatgccaaggagctcgtcgactacttcctgaacgtcgcaacggcccagggacggtactaccggactaaccatactgtcatgactatgggtagcgacttccagtacgagaacgcaaacatgtggtttaagaaccttgataaactgatccgacttgtgaatgcacaacaagccaagggctcatcggtgcacgtcttgtactcgactccggcttgctacctgtgggagctgaataaggctaatctgacctggtcggttaagcacgatgatttcttcccctacgccgacggaccacatcaattctggactggatatttctcgtcgaggccagcactcaagcgctacgagcgcctttcttataacttcctgcaagtgtgcaaccaactggaagccctggtgggactcgccgccaatgtcggaccatacggatcgggagattcagcaccgcttaacgaagcgatggcagtgctgcaacaccacgacgcggtgtctggcacctcacggcagcacgtggcaaatgactacgctaggcagctcgccgcagggtggggcccctgcgaagtgcttctgtcgaacgccctggcacggctcagaggcttcaaggatcacttcaccttttgtcaacagctgaacatctccatctgcccgctgtcgcaaaccgctgcccggttccaagttattgtgtataacccgctcggacgcaaagtcaattggatggtgcggctccctgtctcggaaggggtgtttgttgtgaaagacccaaacggccgcactgttccgtccgatgtggtcatctttccttcgtcagactcccaggcgcaccctccggaactgctcttctccgcctcgctgccagccttgggattctcaacttactcggtcgcccaagtgccgcgctggaagccacaggcacgcgccccgcagcccatcccccggcggtcgtggtcaccagcactcaccatcgaaaacgaacatatccgggcgactttcgaccctgatactgggctcctgatggaaatcatgaacatgaaccaacagctcctgctgccagttcgccaaactttcttttggtacaacgcctccatcggagataacgaatccgaccaagccagcggcgcctacatctttcggccgaaccagcaaaagccgctccccgtgtcgaggtgggcccagatccacctcgtcaagactccgctcgtgcaggaggtgcaccagaacttctcagcgtggtgctcccaagtcgtgcggctctaccctggccagagacatttggaactggaatggtcggtgggaccgatcccagtcggggatacttggggaaaagaagtgatcagcagattcgacacgccgctggaaaccaagggtcgcttctacaccgatagcaatggcagagaaatcctggagcgccgtcgcgattaccggccaacctggaagttgaatcagacggaaccggtggccggtaactactaccctgtgaacacccgcatctacatcactgatggaaatatgcagctgactgttctgaccgaccgctcgcagggtggatcctcgctcagagatggctcactggagcttatggtgcaccgcagactcttgaaagacgacggacggggcgtgagcgaaccgctcatggagaacggaagcggcgcgtgggttcggggacgccacctggtacttctggacaccgcgcaggcggcggccgcggggcacagactccttgcggaacaggaagttctggcgccgcaggtggtgctggccccggggggcggagccgcctacaacctgggcgctccaccacgaacccagttctccggactccggcgcgacctgccaccgagcgtgcacttgctcactctcgcctcctggggcccggagatggtgctcctgagacttgagcaccagttcgcggtgggagaagattcaggaagaaacctgagcgcaccggtgactctgaacctgcgggacctgttttcgactttcactatcacgaggttgcaggaaaccactttggtcgccaaccagctgagagaggcggcctcgcggctgaagtggaccaccaacaccggacctactccgcaccagactccgtaccaacttgatccggccaacataaccctggaaccgatggaaatccggacgttccttgcatccgtgcaatggaaggaagtggatggc

SEQ ID NO: 16499 - DNA, 3033 bp, synthetic construct
  misc_feature 1..3033: note = source = /note="Description of Artificial Sequence: Synthetic coding sequence"
  source 1..3033: mol_type = other DNA
atgggtgcatacgcacgggccagcggggtctgcgctagagggtgcctcgattcggccgggccttggactatgagcagggcgctccgtccccctctgccacctttatgcttctttctgctgctcctggccgccgctggagctagggcaggcggatatgagacttgtcccactgtgcagcccaatatgctcaacgtgcatctgctgcctcacacacatgacgatgtggggtggctcaagacagtggaccagtacttttatggcataaaaaacgatatccagcatgctggcgttcaatacatcttggattctgtgatctccgccctgctcgcagatcctacaaggagattcatctatgtcgagattgccttcttttcccgctggtggcaccagcagacgaatgccacacaagaggtggtcagggatctcgttaggcaggggcgcctggagttcgccaacggtggatgggtgatgaatgatgaagccgccacacactacggcgctatcgtagaccagatgaccctggggttgagatttctcgaagatacatttggaaatgatgggcgtccccgcgtcgcttggcacattgacccctttggacatagcagggaacaggctagtctgtttgcccagatggggttcgacggcttctttttcggccgtcttgactatcaagataagtgggtgcggatgcaaaaactagagatggaacaggtctggagggcctctacaagtctcaagccgcctaccgccgatctttttactggtgtgctgccgaacggctataatcccccacgaaacttgtgttgggatgtactgtgtgtcgaccagcctcttgttgaggacccaagatctcccgaatacaacgcgaaagagctggttgactactttctgaacgttgcaacagcccagggaagatactaccgcaccaatcatacagtcatgacaatggggtcggactttcagtacgaaaatgcgaacatgtggttcaagaacctggataagttaattcggctcgtgaatgcccagcaggcgaaaggatcatccgtccatgtgctgtattcaacacccgcatgctatttgtgggagctgaacaaggccaacctcacctggagcgttaagcacgacgatttcttcccctatgctgatgggccacaccagttctggacaggttacttttcttctagaccagcactaaagaggtatgagcggctttcgtacaatttcctccaggtgtgcaaccagctcgaagctctggtggggttggcagcgaatgtcgggccttacggatctggcgactccgcccctctaaacgaagcaatggcagtactgcagcaccatgacgctgtatccggcacatcccggcagcatgtggcgaatgactacgctaggcagcttgccgctggctggggcccctgcgaagttctgctctccaacgcccttgcacggctccgcggttttaaagatcacttcacattttgtcaacagctgaatatttccatttgcccgctctcacagactgccgcccgttttcaggttatagtctataacccactgggcagaaaagtgaactggatggttaggctgcctgttagtgagggagtcttcgtcgtcaaggatccgaacggccggacagtgcccagtgatgtggtgatcttccccagcagcgatagccaggcccaccctcctgaactgcttttcagcgcaagcttgcctgctcttggcttctctacctatagcgtggcacaggtgccaaggtggaaaccgcaggcaagagccccccaaccgatacctagaaggtcgtggtctcctgctcttaccattgagaatgagcatatacgggcaacgttcgatcccgacaccggccttctgatggagatcatgaacatgaaccagcaactactgttgcctgtcaggcaaactttcttctggtacaatgccagcatcggagataacgagagcgatcaggcgagtggggcgtatattttccggccgaatcaacaaaagcctctgcccgttagccgttgggcacagattcacctagtgaaaacccctcttgtgcaggaggtgcaccagaatttttctgcatggtgctcacaggtagtgaggctctaccccggacagcgccacctggaattggaatggtcggtggggcccattccagttggtgacacctggggaaaagaggttataagcagatttgacactcctttggaaactaaaggccgattttacaccgatagcaatggaagggagatcttagaacgacgtcgggactacaggcccacttggaaattgaaccagaccgaacccgtggctggaaattactaccctgtaaacaccagaatttatatcacagatggcaatatgcagcttaccgtcttgactgataggagccagggtggttctagcctgcgcgacgggtctttggagcttatggtacataggcgcctgctgaaggacgatggaaggggcgtaagtgagcccctgatggagaatggaagcggggcctgggtgcggggacgccacctggtacttctagatacagcacaggcagccgccgctggtcatcgcctgcttgcagaacaggaagtcctagcccctcaagtcgttttggcgccaggtggtggggctgcctacaatctcggtgcacctcccaggacccagttctccggactgcgcagggatctacccccttccgtgcaccttcttacactggcgtcgtggggcccggagatggtattgctgaggctagagcaccaatttgcagttggtgaagacagcggtagaaacctcagcgcaccagttactctgaatctcagagacctgtttagtaccttcacaatcacccggctgcaggagacgaccctggtggctaaccagttgcgggaagctgcatcacgcctgaaatggaccaccaacaccggaccgacaccacaccagactccatatcagctggatcccgcgaatatcacactagagcccatggagatacgtacatttctcgcatccgttcaatggaaggaagtggatggc

SEQ ID NO: 16500 - DNA, 3033 bp, synthetic construct
  misc_feature 1..3033: note = source = /note="Description of Artificial Sequence: Synthetic coding sequence"
  source 1..3033: mol_type = other DNA
atgggtgcctatgccagagcctcaggagtctgtgccagggggtgcctcgatagtgccggaccttggaccatgtcccgggccctcaggcccccactgccaccattgtgtttcttcctcctgctgcttgcagcagctggcgcacgagctggcggatacgaaacctgcccaacggtacagcccaatatgctaaatgtgcatctgctccctcatacacacgatgatgttggctggctgaagactgtggaccaatacttttacgggatcaaaaatgatattcaacatgcgggagtgcagtatatcctcgacagtgtgatttcggcgttacttgcagatccaactcgacgctttatatatgtggagatagcgtttttctctaggtggtggcaccaacagacaaacgctactcaggaagtcgtacgcgatctggtcagacagggccgattggaatttgccaacgggggatgggtgatgaacgacgaagccgcaactcattacggggcgattgtggaccagatgaccctgggactgcggtttctggaggatacatttggaaatgatggacgtcctcgagtggcgtggcatatcgatcctttcggtcacagtcgtgagcaggcttcccttttcgcccagatgggatttgatggctttttttttggaaggttggactatcaagataaatgggtccggatgcagaagttagaaatggaacaagtctggcgagcttctacctccctaaagccccctacagcggacttatttacaggtgtgcttcctaatggctacaacccccctcgtaacctgtgctgggacgttctgtgcgtggaccagcctctcgtcgaggacccacgaagccccgaatataacgctaaggaactggtggattattttctgaacgtggccaccgcccaaggccgatattatagaaccaaccacaccgtaatgaccatgggaagcgactttcagtatgaaaatgcaaatatgtggttcaaaaatctggacaagttgattagactggtgaacgctcagcaagccaaaggcagtagtgtgcacgtgctctactcgacgccggcatgctacctctgggagctaaacaaagccaacctgacatggtcagtgaaacacgacgacttctttccatatgcggacggtcctcatcagttttggactggctattttagcagcaggccagccctcaaacgttacgaacggcttagctacaactttcttcaggtgtgcaaccagctggaagctctcgtgggcctggccgcaaatgtgggcccttatgggtccggggacagtgccccactgaacgaggccatggctgtacttcagcatcacgatgccgtctcagggacctcccgacagcatgttgcgaatgactatgccagacagctagcagcgggctggggcccctgcgaggttctgctatctaacgcgttggcccgattgagagggtttaaggaccacttcacattctgtcagcagctgaacatttctatctgcccactgtcacagaccgccgctagatttcaagtaattgtctataatcccctgggccggaaggtcaattggatggtccgactccccgtgtctgaaggggtcttcgtagtgaaggacccaaatggccgaactgtcccgagcgacgttgtgatattcccatcttcagattctcaggcgcatccgcctgaactgttgttttctgcaagcctgccagccttaggcttttccacatattctgtggcacaggtccccaggtggaagccacaggcccgagcacctcagcctattccccgaaggagctggagtccggcactcacgatcgaaaacgagcatatccgtgctacttttgacccagatactggtctgctgatggaaatcatgaacatgaaccagcagctcctactgcctgttcggcagacattcttttggtataacgcttcaatcggggacaacgagtcagaccaggcgtcgggggcttatattttccgaccaaatcaacagaagcctctccccgtttctaggtgggcccaaattcacctggttaagaccccactggtgcaggaagtgcatcagaatttttcagcctggtgttcacaagtagtgagactataccctggccagcgacacctggaactagagtggagcgtaggaccaattccggttggagatacctgggggaaagaagttatcagtcgattcgacacccctctcgaaacaaaaggaagattttacacagactctaacggtcgagaaatccttgagcgacgaagagattacaggcccacttggaaacttaatcagacggagcctgtcgcagggaattattatcccgtcaatactcgaatctacatcacggacggtaacatgcagctcaccgtgctcaccgacaggtcccagggaggtagctcgttaagagatggtagcttggaacttatggtccatagacgattgttgaaggacgacggacggggagtgagcgagcctctgatggaaaatggttccggagcctgggtccggggccgccatttagtgctgctagacacagcacaggccgccgctgccggacaccgcttgttagcagagcaggaggtcctcgctcctcaagtggtcctcgcccccggaggaggagctgcttacaacttgggagccccacccaggacccaattttctggtctgagaagggatttgccaccttccgtgcacctcttaacgctggccagttggggacccgaaatggtactcctccggctggaacaccaattcgccgtaggtgaagacagtggacgcaacctatccgcaccagtcacacttaacctgagagaccttttctccacattcaccatcaccaggctgcaggaaacaacccttgtagcgaaccagcttagggaagcagcgagcagacttaagtggacgacaaatacaggcccgactcctcatcaaacgccataccagctcgatcctgcaaatatcactcttgaacccatggaaattcgaacgttcctggcctccgtgcagtggaaagaagtcgatggg

SEQ ID NO: 16501 - DNA, 3033 bp, synthetic construct
  misc_feature 1..3033: note = source = /note="Description of Artificial Sequence: Synthetic coding sequence"
  source 1..3033: mol_type = other DNA
atgggggcatacgctagggcatcaggagtgtgcgctagaggatgcctcgattctgctggaccctggacaatgagtagggccctcaggcccccgctgcccccgctgtgcttctttcttttgctgttggccgctgcgggcgctagggcagggggatacgaaacatgtccgactgtgcagcctaacatgctgaacgtccatctcctcccccacacacacgacgatgtcggatggctgaagacggtggaccaatatttttatgggatcaagaacgatattcagcacgctggggttcaatatatcctggacagtgttatcagtgccctgctagccgaccccacacgccgctttatttacgtggagatcgccttcttctctcgctggtggcatcaacaaaccaatgcaacacaagaagtggtgcgcgacctggttagacagggccggctcgagttcgccaatgggggatgggttatgaacgacgaggctgcaacccactacggggccattgtcgatcagatgacattaggcctgagattcctcgaggataccttcggaaacgacggccgaccacgcgtagcatggcacatcgacccattcgggcacagcagggaacaggcttccctctttgcacagatgggcttcgatgggtttttctttggcaggctggattatcaagataaatgggtgcgtatgcagaaattagaaatggaacaggtatggagagcaagtacatcccttaagccccctaccgcggacttgtttacgggagtgctaccaaacggctacaatccacccagaaacctctgctgggatgtcttatgcgtggaccagccgttggtggaagacccaaggtctcctgaatataatgcaaaagagcttgttgattactttttgaacgtagccaccgcccagggtaggtattatcggaccaatcacactgttatgactatgggatctgactttcagtacgaaaatgcaaacatgtggttcaagaaccttgataaattgataaggctcgtcaacgcgcagcaggctaaaggtagttctgtgcacgtgctttactcaacacccgcatgctatctgtgggagctaaataaggccaatttaacctggtctgtgaaacacgatgattttttcccctacgcggatggcccccaccagttttggacgggatatttttcctctaggcctgccctcaagcgatacgaacgactgtcttacaactttcttcaggtatgcaaccagttggaggctcttgtgggactcgctgctaacgttgggccctatggtagcggcgacagtgcacccctgaacgaagccatggccgttttgcagcaccatgatgccgtgagcggtacatcacgacagcacgttgcgaacgactacgcccgccagctggcagctggctggggaccatgtgaagtgctcctcagtaacgctctggcaaggctgcgcggatttaaagatcacttcaccttctgtcagcagctcaacatttcaatttgcccactgagtcagaccgcggcacggttccaagtgattgtttataaccctctcggcagaaaagtaaattggatggttcgactgcctgtctccgaaggcgtttttgtcgtgaaggatcccaatggcagaacggttccatccgacgtggttatttttcctagctctgattcacaggcacaccctccagaactgttgttctccgcctccctgcctgcgcttggattctctacatattcagttgcccaggtgccccgctggaaaccccaggcccgcgcgccccagcctataccccgccgaagctggtcacccgccttgacgattgagaatgagcatattagggctacctttgatccagacacagggctgttgatggaaattatgaatatgaaccagcagctccttctgccagttcgccaaacttttttctggtataacgcttctatcggcgataatgaatctgatcaagcatccggggcctatatcttccgccccaatcagcagaaacccctgccggtctccaggtgggcacaaattcatctggtgaagactcctctcgttcaggaagtgcatcagaatttctccgcctggtgtagccaagtagtgcgcctgtacccaggccagagacacttggaacttgaatggtcagttgggcccatccccgtgggcgatacctggggtaaagaggtaatatcccgatttgatacacctcttgagacaaagggcaggttctacaccgactccaatgggcgcgaaatactggagcggaggcgagattataggccaacttggaagcttaaccagaccgagcctgtagctgggaactactacccggtgaatactaggatctatattactgacggaaacatgcagctgacagtgctgaccgacagaagccagggaggttcctccctccgtgacgggagtctagaactgatggttcacagaagactgctcaaagatgacgggagaggggtctctgaacccctgatggagaatgggagcggcgcttgggtacgtggtcgccaccttgtcctcttagacactgctcaggctgccgcggcaggacatcgcttactcgcagaacaggaggtgctggcaccccaggtggtgctcgcgccaggcgggggtgccgcatataatctgggagcgcctcctaggacacaattctccggcctccggagagatttaccgccatctgtgcacctcctcacactcgccagctggggccccgaaatggtgcttttgagactcgagcatcagtttgcggtcggtgaagatagtggtaggaaccttagcgcccctgttacactaaatctccgggatctgttcagtactttcaccattaccagactccaagagaccacattggtagcaaaccagttgagggaggccgcatcccggctgaagtggacaacgaataccggccctacccctcaccaaacaccgtatcagctcgacccggccaacataactctggagccaatggaaatacgcactttccttgcgtcggttcagtggaaggaggtggatggt

SEQ ID NO: 16502 - DNA, 3033 bp, synthetic construct
  misc_feature 1..3033: note = source = /note="Description of Artificial Sequence: Synthetic coding sequence"
  source 1..3033: mol_type = other DNA
atgggagcttatgcgcgggctagcggtgtgtgcgcacgggggtgcctcgactctgccggcccctggactatgagccgggctctgaggccaccgctcccccctctgtgctttttcctgcttctgctggcagcagccggcgcaagggctggcggctacgaaacgtgtcctactgtccaacccaacatgctcaatgtacatctcttacctcacacccacgatgacgtcggatggctcaaaacagttgaccagtacttctacggaattaaaaatgatatccaacatgcgggcgtccagtatatccttgactccgtcatcagtgctctgctggcagaccctacacgccgcttcatctacgtcgagattgccttcttttcaagatggtggcatcagcagaccaacgccactcaggaggtggtacgcgaccttgtgcgacagggaaggctcgaatttgcaaatggggggtgggtaatgaatgatgaagcagcgacacactacggtgccatcgtggaccagatgaccctcggcttgcggttccttgaggacacttttgggaacgatggcagaccccgtgtagcctggcatatcgatcctttcggccactctcgcgaacaggccagcctgtttgcgcaaatgggtttcgacggttttttcttcggaagattggattaccaagataagtgggtgaggatgcagaagctggaaatggagcaggtgtggagagccagcacaagcctgaagccgcctacagctgatctgttcactggcgtactgccgaatgggtataatccccccaggaatctgtgttgggatgtcctgtgcgtcgatcagcccctggtagaggaccccaggagtccagaatataacgcgaaggagttggtagattattttctgaacgtggccaccgctcagggacgttattaccgcacaaatcacaccgtcatgacgatgggcagcgatttccagtacgaaaacgccaatatgtggttcaagaacttggataaactaatccgcctggtgaacgcacagcaagcaaaaggttcctcggtgcacgtgttgtatagtacccccgcgtgctatctgtgggagctgaataaagcaaatttgacatggagtgtcaagcacgacgatttttttccttatgccgacggaccgcatcagttttggactggctacttcagcagtcggcccgctttgaagcggtatgagcgcctcagttataatttcctccaagtctgtaaccagctcgaggcattggtggggctcgccgctaacgtgggtccttacggttcaggcgacagcgctccacttaatgaagccatggccgtgctccagcaccacgatgcagtcagcggtacctcaagacagcatgtggccaatgactatgctcgtcagctggccgctgggtggggaccatgtgaggttcttctcagcaacgctttggcacgattgcgtgggttcaaggaccattttaccttttgccagcagctcaatatctcaatttgccctcttagtcagactgctgcccgcttccaggtcatcgtgtacaacccactcgggaggaaagtgaattggatggttcgcctgccagtgtctgaaggtgtgttcgtagtgaaggatcccaacggccgtacagtgccttccgacgttgtgattttccccagcagtgactctcaagcccaccctcctgaattgcttttctctgcctcactccccgcactgggcttttccacctacagtgtcgcgcaggtaccccgctggaaaccacaggcacgggcaccccagcccattccgaggcggtcttggagtcccgcacttaccattgagaacgagcatatccgcgccaccttcgacccagacaccggtcttctcatggaaatcatgaatatgaaccagcagctccttctgcctgtgcgtcaaacgtttttctggtacaacgccagcattggtgataatgaatcagatcaggcctcgggcgcctacatcttccggcctaatcagcaaaagccgctgccagtgtctaggtgggcccagattcatttggtgaagactcccttagtgcaggaagtgcatcaaaacttcagcgcttggtgtagtcaagttgtgcgcctgtaccccggacagagacatctcgaactggaatggagcgtcggaccaattccagttggcgatacatgggggaaggaggtgatttctcggttcgatacccccctggagaccaaagggcgcttctacacagacagtaatgggagagagattctggagaggcgacgcgattaccgccctacatggaaactgaatcagaccgaacctgtggctggaaactactatcccgtgaacaccagaatctacatcacagacggaaatatgcagctgaccgtgctgaccgacaggtcccaggggggatcatctctgcgagatggaagcctggagttaatggtgcatagacgcctcttaaaagatgatgggcggggcgtatctgagcctctgatggaaaacggtagcggagcctgggtaagaggcaggcatttggtgctcctggataccgctcaagctgccgccgctggacacaggttgttggccgaacaagaagtgcttgctccgcaagtggtcctggccccgggcgggggagctgcctataacctaggcgcacctccgagaacccaatttagtgggctgcggcgagatctgcccccaagtgtgcacctattaacattggcttcttggggccccgaaatggtgctacttcggctagagcatcagttcgctgtgggagaggatagtggccggaacttaagcgctcctgtcactttgaacctccgtgatctctttagcacattcaccatcacaaggcttcaagagacaacactcgttgcaaaccagttgagagaagccgcaagccgactcaaatggactacgaatacaggacccactcctcaccaaaccccttaccagcttgaccctgccaacatcacgctcgaaccaatggaaatccgtacattcctggctagtgtgcaatggaaggaggtggatggg

SEQ ID NO: 16503 - DNA, 3033 bp, synthetic construct
  misc_feature 1..3033: note = source = /note="Description of Artificial Sequence: Synthetic coding sequence"
  source 1..3033: mol_type = other DNA
atgggggcatacgcgcgggcaagcggagtgtgtgcccgtggctgtctcgattcggcggggccgtggacgatgtcccgggctctcagaccgccactgccgcctctttgcttttttctgctcctccttgctgcggcaggggcccgcgccgggggttatgaaacctgccccaccgtgcaacctaatatgctgaacgtccatctgcttcctcatactcatgacgatgtcggatggctcaaaaccgtggatcaatacttctacggtattaagaacgatatccaacacgctggtgtgcagtacattttggattcagtgatttccgcgctgctggcggatccaactcgcaggtttatctacgtggaaatagcattcttttccaggtggtggcatcagcagaccaacgcaacccaggaggtggtccgtgatctggtcaggcagggtagactggagttcgccaacggaggttgggtcatgaatgacgaagccgcaacgcattacggagcaatcgtcgatcagatgacgctggggctgcggtttctggaggataccttcgggaatgatggtaggcctagagtggcctggcatattgaccccttcggacactcaagggaacaagctagcctgtttgcacagatgggttttgatggattcttttttggacggttggattaccaggataaatgggtgagaatgcagaaacttgagatggaacaggtctggcgagcgtccacttccctgaagccacctactgcagatctgtttacgggtgtcctgccgaacggttacaatccaccaaggaacctgtgttgggacgtgctttgtgtggatcagccactggtggaagatcccagatcccctgaatacaacgcaaaagagctggtcgactacttccttaacgtggcgaccgcacagggcaggtattacaggactaaccataccgtgatgactatgggttcggacttccagtacgagaatgcaaatatgtggttcaagaatctggataagctcattagactcgtgaacgcacaacaagcaaagggatcgagcgtgcatgtcctttatagcactcccgcgtgttacctgtgggagctcaacaaggccaacctgacctggtctgtcaagcacgacgatttcttcccatacgcagatggcccacatcagttctggaccggatactttagctcgcggccagcactgaagcggtacgaacgccttagctacaatttcctgcaggtgtgcaatcaattggaagctcttgtgggtttggctgcaaatgtgggtccctacggatctggagattcggcgcccctcaacgaagcgatggcggtgctgcaacatcatgatgccgtgtcgggaacctccagacagcatgttgcgaatgattacgcacggcaactggctgcgggttggggaccttgtgaagtgcttctttcgaacgccttggccagactgagaggttttaaggaccattttacgttttgccaacaacttaacatcagcatctgtccactttctcaaactgccgcacgattccaagtcattgtctacaatccacttggtagaaaggtcaactggatggtgcggctgcctgtgtcagagggtgtctttgtggtgaaggatccaaatggacggactgtgccatccgacgtggtcatttttccgagtagcgacagccaagcgcaccctccagagctgctgtttagtgcgtcgttgcctgcactcggattttccacgtacagcgtggcacaagtcccacggtggaaaccacaagcaagagccccccaacccatcccacgtcggtcatggtcgcccgcccttactattgaaaacgagcatattcgcgccactttcgatcccgacactgggctgctcatggagattatgaatatgaaccaacaactgttgctgcccgttagacagaccttcttctggtacaatgcgagcattggcgataacgaatccgatcaagcatcgggtgcatacatatttcgaccgaatcagcagaagcctctgcccgtctcacgttgggcacaaatccacctggtgaaaacgccacttgtgcaagaggtgcaccaaaacttttcggcctggtgtagccaagtggttcgtctctacccagggcaaagacatctggaactcgaatggtcggtgggccccattcctgtgggagatacttggggaaaagaggtgatttctcgatttgatacccctcttgagactaaaggtcgcttctacaccgactccaatggaagagagatcttggaacggaggcgtgattacaggcctacctggaagctcaatcaaactgaacctgtggcaggtaactactacccggtaaacacccgcatttacataaccgacggtaacatgcaacttacggtgctcaccgatcgcagccagggtggatcatccttgcgcgacgggagcttggaactgatggtccaccgccggttgctgaaggatgatggccgtggcgtctctgaacctctgatggaaaatggctcaggtgcctgggtgagaggtcggcatcttgtccttctcgataccgcacaggcagcagcggctggacatagacttttggcagaacaagaagtgctcgcacctcaggtcgtccttgcacccggcggcggtgcagcatacaacctgggagcacctccgagaactcaattttctgggctgagaagggatcttcctccttcggtgcacctgctcactctcgcatcgtgggggcctgaaatggtactcctgagactggagcatcagttcgcagtgggtgaggattcaggcagaaatctttccgccccagtgactcttaacctgagagatttgttttccacgtttactattacccggcttcaggaaaccaccctggtcgcaaatcaacttcgcgaggccgcatccaggcttaagtggactactaacaccggacctacgccacaccagacgccataccagcttgacccagcgaatatcaccctcgagccgatggagatccgcactttcctggcttccgtgcaatggaaggaggtggatgga

SEQ ID NO: 16504 - DNA, 3033 bp, synthetic construct
  misc_feature 1..3033: note = source = /note="Description of Artificial Sequence: Synthetic coding sequence"
  source 1..3033: mol_type = other DNA
atgggcgcctacgccagagccagcggcgtgtgcgcccggggctgcctcgactcggccggcccctggacaatgagcagagcattaaggccaccgctgccaccactctgcttcttcctcctcctcctggccgccgctggcgcgcgagccggggggtatgaaacctgtccaaccgtccaacctaatatgctgaacgtgcatctgcttccacacacccatgacgatgttggctggctgaagacagtcgatcagtacttctatggcatcaaaaatgacatccagcatgcaggggtgcagtacattctggatagcgtgatatcagctctcttggcagatccaacacgccgatttatctatgttgaaattgcctttttctcacgctggtggcaccagcagacgaatgctacccaggaggtcgtccgggatttggtgcgtcaagggcggctggagtttgccaatggcggatgggtgatgaatgacgaagccgcaacgcactatggtgccatcgtcgaccagatgaccttggggttacggttcctggaagacacatttggtaacgacggaagaccacgagtggcttggcatatcgaccctttcggccattctcgagagcaggcctctctctttgctcagatgggtttcgacggattcttctttgggagactggattaccaagacaaatgggttagaatgcagaagcttgagatggagcaagtgtggcgcgcctcaacctcactaaaaccaccgaccgcagatctcttcaccggcgtacttcccaacggctataatcccccaagaaacctttgttgggatgtgttgtgcgttgatcagcccctagtagaggatccgcgctctcccgagtacaacgccaaggaacttgtggattacttcttgaacgtcgccaccgcacagggcaggtattaccgaacgaatcacaccgtgatgaccatgggctccgactttcaatatgagaatgctaacatgtggttcaaaaacctggataagctcatcaggctggtgaacgcacagcaggctaagggcagctcagtacacgtgctgtactctaccccggcctgttatctctgggagctgaacaaagccaacctgacatggagcgtgaaacatgatgactttttcccgtatgccgacggtccgcatcagttttggacagggtacttctcgtctcgacccgcccttaagcgatacgagcgactctcctacaatttcctacaagtgtgcaaccagttggaggccctagtgggccttgccgcaaacgtgggcccctacggctccggagactccgcgccattaaacgaggcgatggcagtactgcagcatcacgatgccgtaagtgggacatctagacagcacgtggctaatgattatgcccgacagttagctgcggggtgggggccgtgtgaagtgctcctcagcaatgccctggctcgcctgcgggggtttaaagaccatttcaccttttgccaacagctgaatatcagcatctgcccccttagccaaactgcggcccggtttcaggttatcgtttataacccacttggtcgcaaggtgaactggatggtgcgactgccagtgagcgaaggagtgttcgttgtgaaggatcctaatgggcgaaccgtgccatctgacgtcgttatcttcccatcatcggatagccaggcacatccacctgaactgttgttttccgcctccttgccggctcttggcttctccacctacagtgtggcccaggttcctcgctggaaacctcaggctagagcacctcagcccattcctcgaagatcttggagtcccgctctaactattgagaatgaacacattcgcgctacctttgacccggacactggtttgttgatggaaattatgaacatgaaccagcagctccttttaccagtgaggcagacattcttctggtacaacgcatcaatcggagacaacgagtccgatcaggcgagtggcgcttacatctttagacctaatcagcaaaaaccactgcctgtctcccggtgggcccagatccatctggtgaagacccccctggtccaagaggttcaccagaacttctccgcctggtgttcacaggttgtccggctttaccctggccagcgccatctagaattggagtggtcagtgggtcccatcccggtcggagatacctggggaaaagaagtgatttcaaggtttgatactcccctggaaaccaaggggagattttacacggactccaatgggagggagattctggagcggaggagggattatcggccaacgtggaaactcaaccagaccgagccggttgctggaaactactaccccgtcaatactcggatttacattaccgatggtaacatgcagctaactgtgctgacagatcggtcacaaggaggatcctcactgcgcgatgggagtctggagctgatggtccaccggcggctgttgaaggatgatggacggggcgtgtcagagcccctcatggaaaacggcagtggagcctgggtacgaggccgccacctagtcctgttggacactgctcaggcagccgcggccggccaccgcctccttgcagagcaggaggtgcttgcacctcaggtggttttggccccgggcggaggcgctgcgtataacctcggcgctccacccagaactcagttctccgggctgagacgcgaccttcctccgtcagttcatctactgacgcttgcgtcgtggggacctgaaatggtcctgctgcggctggagcaccaatttgccgtaggggaagactctggccggaatctgagcgcgcctgtgaccttgaacctgagggatttgttttccacgttcacgatcacacgattgcaggaaaccactctggttgctaaccaacttcgagaggctgcatcaaggttgaaatggactaccaatactggaccgaccccccaccagaccccttaccaactcgacccagcgaacattactttggagcccatggaaattaggaccttcctcgcaagcgtccagtggaaagaggtagatggt

SEQ ID NO: 16505 - DNA, 3033 bp, synthetic construct
  misc_feature 1..3033: note = source = /note="Description of Artificial Sequence: Synthetic coding sequence"
  source 1..3033: mol_type = other DNA
atgggagcctacgcccgtgcgtctggagtgtgtgccaggggctgtctcgatagcgccggcccttggactatgtcccgcgccctgaggcctcccttgccacctctctgttttttcctgctcctgttggcagctgccggcgccagagcaggtggatacgaaacttgccctaccgtgcagcccaatatgctgaatgtgcaccttctcccccatacacacgatgacgtgggctggctaaagacagtggaccagtatttttatgggataaaaaatgacatccaacatgcaggtgtgcagtatatcttagactcagtcatatctgccctgctcgcagaccccacccggcggtttatctacgtcgagattgcctttttctcgaggtggtggcaccagcagacgaacgcaacccaagaagtggtgcgagacttggtaagacagggccgactcgagtttgctaatgggggatgggtgatgaatgacgaggcagctactcactatggagctatcgtggaccaaatgacgcttggcctgcgatttctggaggacaccttcggtaatgacgggcgaccgcgagtggcttggcacatcgaccccttcgggcatagtagggagcaggctagcttatttgcccagatgggttttgacggcttcttttttggcagactcgattaccaggataagtgggtgcgaatgcagaagctcgagatggaacaagtctggcgagctagcactagtctgaagcctccaactgctgatctttttactggggtccttcctaatggatataaccccccacggaacctctgttgggatgtactttgcgtggatcaacccctcgtcgaggatccacgcagccccgaatacaatgccaaagagcttgtggactacttcctcaatgtggccactgctcaaggccggtactacagaacaaaccatacggtcatgactatggggagcgattttcagtatgaaaatgcgaatatgtggttcaagaatctggataagctgatccgactcgttaatgcacaacaagcgaaaggctcatcagtgcatgtcctctattcgaccccagcctgctacttgtgggaactgaataaggcgaacctgacatggtctgtgaagcacgatgacttctttccatatgctgacgggcctcaccagttttggacagggtacttcagctctagacccgcactcaagcggtacgaacgcctgagttacaattttctgcaggtgtgcaatcaacttgaagccctcgttggtctggcagctaacgtggggccctacgggagcggagactccgctcccctaaacgaagccatggccgttctgcagcatcatgatgctgtaagcggaacctccagacagcacgttgccaatgattacgcacgacagctggcggcaggttgggggccatgcgaggtgctgctgtctaacgcacttgctcggctgcgaggattcaaagaccacttcacgttctgccagcagctgaatattagcatatgccccctatctcagactgcagcaaggtttcaggtcattgtatataatccgcttggtcgaaaagttaactggatggtccgactacctgttagcgagggtgtgttcgtcgtgaaggatcccaatggtagaaccgtcccctccgacgtggtgatttttcctagctctgactcccaggcccatcctccagagttgctgttctctgcttccctgccagccctagggtttagcacctactccgtggctcaggtccccaggtggaaacctcaggcaagagctccccagcctatcccacgaaggtcttggagccccgccttgaccatcgaaaacgagcacatccgagccacattcgaccctgacacaggacttttgatggagattatgaatatgaaccagcagctccttctcccagtgaggcagaccttcttttggtacaacgcgtccatcggggataatgaatcagatcaagcttcgggagcgtacatctttcgaccaaatcagcagaagccgttgcccgtttcccggtgggctcagatccacctagtgaaaacccctctggtccaggaggtccatcagaactttagcgcctggtgcagccaggtagtgcggctataccccggacagagacatttggaactggaatggtctgtcgggcccattcccgtaggcgatacatgggggaaggaagtgatttcgcggttcgatactccactggagacgaagggtagattctacaccgactctaatggcagagagatcctggagaggcgacgagattatcgacccacgtggaaattgaatcagacagaaccagtggcgggtaattactatcccgtgaataccaggatctatattactgatggtaatatgcagctaacagtgctgaccgaccgtagccaaggcgggtctagcctccgggatggctccctggaactgatggtgcacagacgcttactcaaagacgacggacgaggagtgagcgagccgcttatggaaaacggaagcggagcctgggtcagagggagacacctcgtgcttctggataccgctcaggcagcggctgcaggccatcgcctactagcggaacaggaggtgctggcaccacaggtggttttggctcctggggggggagctgcatacaacttgggcgctccccctaggactcagttcagtggcttgcggagggatctccccccaagcgtgcatcttcttaccttggcaagctggggaccggaaatggtgctgctacgactcgaacaccaattcgccgtgggggaggattctggccggaatctatccgcccctgtgacactaaatttaagggacttattttcaacctttacaatcacacgtcttcaggaaacaacactggtcgccaatcaacttcgagaggcggcgtctcgactgaagtggaccacaaacacaggccctaccccccatcagaccccctatcagctggacccagctaacatcacactagaaccaatggaaatcaggacattccttgcctctgttcaatggaaagaagtggacggg

SEQ ID NO: 16506 - DNA, 3033 bp, synthetic construct
  misc_feature 1..3033: note = source = /note="Description of Artificial Sequence: Synthetic coding sequence"
  source 1..3033: mol_type = other DNA
atgggcgcctacgcccgtgccagtggggtgtgcgccagaggctgtttggactctgccggcccgtggaccatgtctagagccctgagacctccactccccccactctgttttttcctactcctgctcgccgcggctggcgcccgggctggtggatacgaaacatgcccaactgttcagcccaatatgctgaacgtgcatctgttgccacatactcacgacgacgtgggctggctcaaaactgtcgaccagtacttctacgggattaaaaacgatatccaacacgccggtgtgcaatacattttagacagtgtgatttccgcgctgttagccgacccaacgcgaagatttatttatgtggagatcgctttcttcagtcgttggtggcaccagcagactaatgcaactcaggaagtagtgagggatcttgtgcgccaaggaaggctggagtttgcaaacggtgggtgggtgatgaacgacgaagccgccactcactatggcgcaatcgtcgatcagatgactttgggcctgcgtttccttgaagatacatttggaaacgatggccgcccacgggtagcctggcacattgatcctttcggccactcacgggagcaggccagccttttcgctcagatgggattcgatggcttttttttcggcagactggactaccaggacaaatgggtgaggatgcaaaagctggagatggaacaagtttggcgcgcctctacaagcctgaagccccctaccgccgacctgtttactggcgttcttcctaatgggtacaatccaccccggaacttgtgctgggacgtcctgtgtgtcgaccagccgctggtagaagatccacgaagcccagagtataatgctaaggagcttgtcgactattttcttaacgtcgcgactgctcaggggagatattatagaaccaatcacacagtaatgaccatgggtagtgacttccaatatgagaatgctaacatgtggttcaagaacttagacaagttaatcagactggtgaacgctcagcaggcaaagggctctagtgttcatgtgctctatagtaccccagcctgttacttgtgggaattgaacaaggcaaacctgacatggagcgtaaagcatgatgacttcttcccctatgccgatggcccgcaccagttctggactggatattttagtagcaggccagctctcaaaagatatgagaggctcagctataactttctgcaggtgtgtaatcagctggaggcccttgtgggtctcgccgcaaatgtaggaccatacgggagtggtgactctgctccactgaacgaggccatggcagtgttgcagcaccacgacgctgtgtccgggactagccgccagcacgtggctaacgattacgctcgacagcttgccgccggatgggggccgtgtgaggtgttgctctccaacgcattggctcggttacgaggcttcaaagatcattttacattttgtcaacaattgaacatcagcatctgccccctcagtcagaccgcagcccgcttccaggttattgtttataacccccttgggcggaaggtcaattggatggtgcggctgcccgtgtcagagggggtctttgtggttaaggatcctaatggaaggaccgtgccttccgacgtggtgatctttcctagtagtgactcacaggcccacccccctgaacttctgttttccgcttcattaccagcgcttggtttctcaacatacagtgttgcacaggtcccaagatggaagcctcaagcccgcgccccccagccaatcccccgcagatcatggtcccctgcgctgaccatagaaaacgagcacatccgggcaacctttgatccggataccggcctgttaatggagatcatgaacatgaaccagcagctgctcctaccagtaaggcagacttttttctggtataatgcctccataggcgataacgagtctgatcaggccagcggcgcctacatattcaggccaaaccagcagaagcctctgccggtgagccggtgggcgcaaatacaccttgtgaaaaccccgcttgttcaagaggtgcaccagaatttctctgcttggtgttctcaagtggtacggctgtaccctggccaacgccatctggagctcgagtggagtgttggtccaatacccgtgggtgatacctggggcaaagaagtgattagccggttcgatacacccctggagactaaggggcgattctacacagactctaacggtcgggaaatcctggaacgtcggagggattaccggccaacctggaagctcaaccagacggaacccgtggcgggcaactattacccggttaacactcgaatctacatcactgatgggaatatgcagctcacggttcttactgatcgaagccaaggtggcagttccctgcgcgacggaagccttgaactcatggttcaccggaggcttctcaaggacgatggacgcggggtcagcgaacctctaatggagaacggctcaggcgcttgggtacgcggacgccacctagtgctgctcgacacagctcaggctgcggccgctggccacaggctactcgccgagcaggaggtgctggcgccgcaggtggtcctggccccaggcggtggggccgcctacaacctcggcgcaccaccacggactcagttctccgggctacggagggatctgccacccagcgtgcatctgctgacgctggcgtcatggggccccgagatggttttgctgcgcctggagcaccagtttgctgtgggggaagatagcgggcggaacctgtccgctcctgtgaccctgaacttgagggatctgtttagtacatttaccattactaggttgcaggaaaccacacttgtcgccaaccagctaagggaagccgctagcaggctcaagtggactactaataccggacctactccacaccagaccccatatcagttggatccagccaacattactctcgagccaatggagataaggacattccttgccagcgtccaatggaaagaagtggacggc

SEQ ID NO: 16507 - DNA, 3033 bp, synthetic construct
  misc_feature 1..3033: note = source = /note="Description of Artificial Sequence: Synthetic coding sequence"
  source 1..3033: mol_type = other DNA
atgggagcctacgcgcgggcctcaggggtgtgtgcgcgcggatgcttggactcagcgggcccttggactatgagccgggcgctgcgcccaccgcttcccccactgtgcttcttcctgctgcttcttgctgcggcgggagcaagagcgggaggatacgaaacctgcccaaccgtgcaaccgaacatgctcaatgtgcatctgctcccgcatacccacgacgatgtcgggtggttgaaaactgtggatcagtacttttacggaatcaaaaatgacatccagcacgcgggcgtgcaatacattctcgattccgtgatcagcgccctccttgcggacccaaccagaagattcatctacgtcgaaatcgcattcttctcgagatggtggcatcaacaaaccaatgcgacccaagaagtggtgcgtgatctcgtgagacaaggccgcctcgagtttgccaacggaggatgggtcatgaacgacgaagccgccactcactacggagcgatcgtggaccagatgactcttggacttagatttctggaagatacctttggaaacgatggtcgcccacgggtcgcgtggcacatcgatccattcggacactcacgggagcaggcgtcgctgttcgcccagatggggttcgacggatttttctttggccggctggactaccaggataagtgggtgaggatgcagaaactggaaatggaacaagtctggcgcgcatcaacctcactgaagccaccgaccgccgacctcttcactggcgtgctccctaacggctacaatccgccacggaatctctgttgggacgtgctgtgcgtggaccagccgctggtggaggacccgcgcagcccagaatacaatgccaaagagctggtggactattttctgaacgtggccaccgcgcagggtcgctactacaggactaaccataccgtgatgaccatgggctcggacttccagtacgaaaatgccaatatgtggttcaagaatctcgataagctcattcgcctggtgaacgctcaacaggcaaagggatcctccgtccatgttctctacagcactccggcgtgttacctgtgggagctcaataaggcgaatctgacttggtcggttaagcatgacgacttcttcccgtacgcagacggcccgcaccaattctggaccggctacttctcgtccagaccggcgctgaaacggtacgaacggctgtcgtacaactttctgcaagtgtgcaaccagctggaggctctcgtgggactggctgccaatgtgggaccttacggaagcggtgactctgccccgctgaacgaagctatggctgtgctccaacatcatgacgctgtgtccggaacttctcgacaacacgtcgctaacgactacgcaaggcagctggcagccgggtggggaccctgcgaagtgctcctctccaatgcgttggcccgcctgaggggattcaaagaccatttcaccttttgccagcaactgaacatcagcatctgcccgctgtcgcagactgccgcccgcttccaggtgattgtctacaaccctctgggccgaaaggttaactggatggttcgactgcctgtctcagaaggagtctttgtggtgaaggacccaaacggccggacggtcccgtcggatgtcgtcattttcccgtcctccgattcacaggcacatccgcctgagttgctgttctcggcgtcattgcccgcgctgggattttcgacctactcggtggcgcaagtccctcggtggaagcctcaagctcgggcaccgcaaccgatcccacgcagatcctggtccccagcattgaccatcgaaaacgagcatatccgggcaactttcgaccctgatactggactgctcatggagataatgaacatgaaccaacaactgctgcttccagtgcgccagacgttcttttggtacaacgctagcatcggggacaatgaatcggaccaggcctccggagcttacatcttccggcctaaccaacagaagccccttccggtgtcgagatgggcgcaaatccacctcgtaaagaccccgctggtgcaagaagtccatcaaaacttcagcgcatggtgctcccaggtcgtgaggctctacccgggccagcgccacctcgaactggaatggagcgtgggaccgattccagttggcgatacctgggggaaggaagtgatctcgagattcgacacgccgctcgaaactaagggacgcttctacactgatagcaacggtcgcgagatcctcgaacgcagaagggactaccggccgacctggaagctgaaccagaccgaacccgtggccggtaactactatcccgtgaacacccggatctacatcaccgacggaaatatgcaactcacggtgcttacggacagaagccagggcgggtcctccctgagggacgggagcctggagctcatggtgcatcgccgacttctgaaggatgacggacggggcgtaagtgagcctcttatggagaacggatcgggagcatgggtcaggggacgtcaccttgtcttgctcgatactgcccaagcagcggcggcaggccatagactgctcgctgagcaagaggtgctggctccacaagtcgtgcttgcccctggagggggagccgcttacaatctcggcgccccgccacgcacccaattctcaggactgcggcgcgacctgccaccgtccgtgcatctgctgacgctcgcctcgtggggaccagaaatggtcctgttgcgcctggagcaccagtttgctgtgggagaggactccggacgcaatctctctgccccggtgactttgaatcttagagatctcttctcgacctttactatcactcgcctgcaggaaactaccctcgtggcgaaccaactgcgagaagcagcatcacggctgaaatggaccaccaacactggaccgactccgcaccagacgccataccagctcgacccggccaacatcactctcgaaccaatggagattcgcacgtttctcgcgtccgttcaatggaaggaggtggatggt

SEQ ID NO: 16508 - DNA, 3033 bp, synthetic construct
  misc_feature 1..3033: note = source = /note="Description of Artificial Sequence: Synthetic coding sequence"
  source 1..3033: mol_type = other DNA
atgggtgcctacgccagggcctctggggtctgtgcccggggctgtctcgattctgctggcccctggacaatgagccgagcccttagacctccactgccccctttatgctttttcctgctgctgctcgccgcggctggggctcgggctggtggctacgaaacttgccctacggtgcaacctaatatgctcaatgtgcacttgctcccacatactcatgacgacgtagggtggttaaaaactgttgaccaatatttctacggtattaagaacgacatccagcacgcgggggtccagtacattctggactccgtaatctctgctctgttggcggatcctacccggagatttatatatgtagagatcgctttttttagtaggtggtggcaccaacagacgaatgctacgcaagaagttgtgagggacctcgtgcggcaggggcgcctggagttcgctaacggaggctgggtcatgaatgatgaagctgcaacccactacggggccattgtcgaccagatgacacttgggctgcgttttctagaggacacttttggtaatgacgggcggcctagggtggcctggcatattgacccattcggccattcccgcgaacaggcctcgctgttcgcgcagatgggctttgacggctttttttttggtaggcttgactaccaggataagtgggtgcgtatgcaaaaattagagatggagcaggtgtggagggccagcacctccttgaaacctccaactgcagatttattcaccggcgtgttacctaacggttacaaccccccacgaaatctgtgttgggacgttctgtgtgtggaccaaccgcttgtcgaggaccctcgcagcccagaatataatgctaaggagctagtcgactacttcctgaatgtggcgactgcacagggccgctattaccgaaccaatcatacggttatgaccatgggaagtgatttccagtatgaaaacgctaacatgtggtttaagaacctagacaagctgatccgattggtgaatgcccaacaggccaagggtagttccgtgcacgtgctatactcaacacctgcttgttacctctgggagcttaataaagctaacctaacctggtccgtgaagcatgatgattttttcccgtatgcagatgggccccaccagttttggacaggctacttcagcagtagaccagcgcttaagcggtacgagcggctgtcgtacaacttcctccaagtttgtaatcagctagaggcattggtgggacttgccgccaatgttggcccgtacggctccggggattcggcgcctctgaacgaggccatggccgtcctgcagcaccatgacgcagtgagcggcacgagtcgacagcacgtggccaatgattatgcccggcagctggctgcgggttgggggccatgcgaggtgttgctctccaatgcccttgcacgattacgaggcttcaaagaccacttcaccttctgccaacagttgaatatcagcatctgtcctctgtcacaaaccgcagcccgttttcaggttatagtgtataacccactgggaaggaaagtgaactggatggtacggctgcctgtctccgaaggtgtgttcgtggtcaaggatccaaacggccgaactgtgccgtcagacgtggttatctttccctcctctgatagtcaggcgcatcccccagaacttcttttcagcgcctctctgccagccctcggcttttccacatacagcgtcgcacaagtccctcgatggaaaccacaggcccgggctcctcaacctattcctcgaaggtcctggtcccccgcattgacaatcgagaacgaacacatcagggccacctttgatcctgatacggggctccttatggagattatgaacatgaatcagcagctgctccttcctgtgagacagacgttcttctggtacaacgcctccatcggggataatgaatctgaccaggcttccggggcgtacatcttccgacccaatcagcagaaacccctgccggtctcgcgatgggctcagattcacttagtcaagactcccctagtgcaggaagtacaccagaacttttccgcctggtgctcacaggtggtgaggctgtatcccggacagagacacttggagctggaatggtctgttgggccgatacctgtgggcgacacttggggcaaggaggttatatccagatttgacactcccctggagacaaagggcaggttttataccgattccaacggtagggaaatcctagaacgacgcagggactataggcccacttggaagctgaaccagaccgagccggtcgctggtaactattaccctgtaaacacccgcatttacattaccgacggtaacatgcaactcacagtgttgactgataggtcccagggcgggagcagcttgagggatggtagtctggagctgatggtgcacaggcggctgctcaaagatgatggccgaggggtgagtgaaccccttatggaaaacgggtccggagcatgggtgagggggcggcatcttgtgcttctcgatactgcccaagcagctgcagcgggacacaggttgttggcggagcaggaagttctagctccccaagtggttctggctcctggcgggggtgccgcctacaacctgggggctccccctcgcacacagttttcaggactgcgcagggatttgcctcctagcgtgcacctgctgactctagcgtcatgggggcccgaaatggtgctcctgaggctggaacatcagttcgcagtaggagaggatagcggacgtaatctgagcgccccagtcacactcaacctgagagacctattttccacgtttacaattacgaggctgcaggagaccaccctggtggcaaaccagctcagagaggctgcttctagacttaagtggaccaccaacaccggacctaccccccaccagacaccatatcagcttgaccccgcaaatattactctggagcccatggagatccgtacattcttggcgtctgtgcaatggaaggaagtggatgga

SEQ ID NO: 16509 - DNA, 3033 bp, synthetic construct
  misc_feature 1..3033: note = source = /note="Description of Artificial Sequence: Synthetic coding sequence"
  source 1..3033: mol_type = other DNA
atgggcgcgtatgcacgcgccagcggcgtctgcgcacgcggatgcctggattctgccggtccctggaccatgtctcgcgcactcagaccccccctgccaccactgtgctttttcctcctcctgttggctgcagccggcgcccgcgccggaggatatgagacctgtcccacagttcagccaaacatgctgaatgtccacttgttgccccacactcatgatgacgtgggatggctgaagacagtagaccagtatttctatggtatcaagaacgatatccagcacgccggtgtccagtacattctggacagcgttatatccgcgttgctggctgatcctacaagaaggttcatctatgtcgagatcgcattcttctcccgctggtggcaccagcagaccaacgctacacaggaggtggtccgcgacctggttagacagggaaggctggaattcgcaaacggcggctgggtgatgaacgatgaagcagcgacccactacggtgctatcgtggaccagatgacactcggactgcgcttcctcgaagacacattcggcaatgacggaagacctagggtggcgtggcacattgatcctttcggtcacagccgcgaacaagcctctttgttcgcacagatgggcttcgatggctttttctttggccgcctcgactatcaggacaaatgggtaaggatgcagaagctcgagatggaacaggtgtggcgcgcctcaacatcactgaaaccccccacggcagacttgttcaccggtgttctgccaaacggctacaaccccccacgcaacctttgctgggatgtgctgtgcgtggaccagcccctggtagaggaccccaggtctccagaatacaacgcaaaggaactggtagactactttctcaacgtggctactgcccagggaaggtactacagaactaaccataccgtcatgaccatgggaagcgatttccaatatgagaacgctaacatgtggttcaagaacttggacaagctgattcgcctcgtgaacgcccagcaggccaaaggatcctcagtccatgtcctgtactcaactcccgcctgttacctgtgggaattgaacaaagcaaatctgacttggtcagttaaacatgatgacttctttccttatgctgatggtccgcatcagttctggaccggttacttctctagccgcccggctctgaaaagatacgaaaggttgtcttacaactttctgcaagtgtgtaaccaactcgaagctctggtgggtctggcagctaacgtgggaccttacggcagcggtgactcagcccccttgaacgaagctatggctgttctccaacatcacgatgccgtcagcggtaccagccgccaacacgttgccaatgactacgccagacagctggccgctggatggggaccttgcgaggtcctgctctccaatgccctcgctagactgagaggctttaaggaccatttcacgttctgccagcaattgaatatttccatatgtccactttcccagacagccgcaagattccaggtcatagtctataacccattgggaagaaaagtgaactggatggtgcgcctgcccgtctccgagggcgtctttgtggtcaaggatccgaatggcagaacagtgcctagcgacgttgttatttttccatctagcgattctcaggcccacccccctgagttgcttttctctgctagtctgcccgctttgggattctctacatactccgtggcccaggttccaaggtggaaaccacaagctcgcgcacctcagccaattcctaggcgctcatggagccctgctctcacaattgagaacgagcacatcagggcaaccttcgacccagatacgggattgctcatggagatcatgaatatgaatcaacagttgctcctgccggtccgccagactttcttttggtacaatgcctcaattggagacaatgagagcgatcaagcttcaggcgcatatatttttcgccccaaccagcaaaagcccttgcctgtgtctaggtgggcccagatacacctggtaaaaactcccttggtccaagaagtacaccagaatttttctgcttggtgttctcaggtagtgaggctctatccaggtcaaaggcacctggagctcgagtggtctgtgggccctatccctgtcggtgatacatggggcaaagaggttatctcccgctttgatactcctctggaaacgaaaggccgcttctacacagacagcaacggccgcgaaatcctggagagaagaagagactacaggcctacctggaagctcaaccagactgaacccgtcgccggcaattactatcctgtgaatactaggatctacatcacagacggcaacatgcagctgaccgtgcttactgacaggtctcagggcggctccagcctgcgcgacggcagcttggagttgatggtgcatcgcaggcttctgaaggacgacggacgcggagtgtcagagccgcttatggaaaacggttccggagcgtgggtgaggggccgccatctggtcctcttggacacggcgcaagccgcagctgccggccatagactcctcgccgagcaagaggtgctcgcccctcaggttgtcctggctccaggtggcggcgctgcctataacctgggtgctccccccaggactcagttctcaggactgcgcagggacctgcctccaagcgtgcatctgcttacacttgcttcatggggccccgagatggtgttgctcagactggaacaccagttcgccgtaggtgaagattctggcagaaacctctccgcccctgtaaccctgaacctcagggatttgttctctaccttcactattaccagacttcaggagaccaccctggtagccaatcagcttcgcgaggctgcctcaagattgaagtggaccaccaatactggtcccacaccccaccagacaccatatcagttggatccggctaatatcaccctggaacccatggagatcaggacgttcctggcttcagtccagtggaaggaagtggatgga

SEQ ID NO: 16510 - DNA, 3033 bp, synthetic construct
  misc_feature 1..3033: note = source = /note="Description of Artificial Sequence: Synthetic coding sequence"
  source 1..3033: mol_type = other DNA
atgggggcatatgcacgcgcctctggcgtatgcgctcgtggatgtttggattcagccgggccatggacaatgtcgcgtgctttgcgcccgcccctgccacctctgtgctttttcttgttgctcttggctgccgctggcgcaagagcaggaggatacgagacatgtccgacagtccagcccaacatgctgaacgtgcacctgctcccccacacacatgacgatgtgggatggctgaaaacagtggaccagtacttttacgggataaaaaacgatattcagcacgcgggcgttcaatacattctggattccgtgattagtgctctgctcgctgatcccacccggagattcatttacgtggagattgcgttcttctcccgatggtggcaccaacagacaaatgcaacacaggaagtggtccgggatcttgtccggcagggcaggctggaattcgcaaatggcggttgggtcatgaacgacgaggccgccactcactacggggctatcgtagaccagatgacgctgggcctccggtttctggaggataccttcggcaatgatggtcgtcctcgtgtggcttggcatattgatccctttggacacagcagggagcaagcttcgctttttgcccaaatgggattcgatgggttctttttcggacggctcgactaccaagataagtgggtgagaatgcagaagctagaaatggagcaggtgtggagggccagcaccagcctgaagccaccaactgctgatttattcactggggttctacctaacgggtacaatccaccccgcaacctgtgctgggatgtgctgtgcgtcgatcagcctttagtggaagacccacgctcccccgagtacaatgccaaagagctggtcgactatttcctgaacgtcgcgacggcacaagggagatactatcgcaccaaccataccgtgatgaccatgggcagtgattttcagtatgagaatgccaatatgtggtttaagaatctggacaaactgataaggctggtaaacgctcagcaggccaaaggatcctccgttcacgtcctgtattctaccccagcttgttatctgtgggagctaaacaaggcgaatttgacatggtctgtgaagcacgacgacttcttcccatacgccgatgggccccatcagttctggacgggctatttcagcagccgtccggccctcaagaggtacgagcgcctttcgtataacttcctgcaggtgtgcaaccaattggaagctctggtgggactggcagccaatgtgggtccatacgggtctggcgactcagctcctctgaatgaggctatggccgtgctccaacatcacgatgcggtgagtgggacatcccgacagcacgtcgcgaatgattacgcccggcagctggccgctggctggggcccttgtgaggtgctgctgtctaatgccctggcccgcctgagagggtttaaggatcacttcacattttgccagcagctgaatatctctatttgccccctgtctcagacggcagctaggtttcaggtgatcgtgtacaatcctcttggacggaaagtcaattggatggttcgcttgccggtgtcagaaggcgtgtttgtggtgaaagacccaaacggcaggaccgttccatcggatgtggtgattttccccagctccgacagtcaagctcatccaccagagcttctattctctgctagcctgcctgcactcgggttcagcacctactccgtggcccaggtgccaaggtggaagcctcaggcccgcgccccccaacccatcccgagacggagttggagtcccgcgttgaccatagaaaatgaacatatccgcgccacctttgatcctgataccggactcctcatggaaattatgaacatgaatcagcagcttctcctccctgtgagacaaaccttcttctggtacaacgccagcattggggacaacgagtcagatcaggcgagtggtgcttatatattccgtccaaaccaacagaagccacttcctgtgtcacgctgggcccaaatccacctagtcaagacaccattggtccaagaggtgcaccagaatttctcggcctggtgcagtcaagtcgtgcggctctatcctgggcagaggcacctggaactggagtggagtgtcggacctatccctgtgggtgacacatggggtaaggaggtcattagccgtttcgatacccctctcgagaccaaaggccgattctacacggactctaatggaagagagatactcgaaaggagaagagattatagaccaacctggaagttgaaccaaactgagcctgtggctggaaactactaccccgtcaatacacgcatctacattacggacggcaatatgcagctcacggtgctaaccgaccgatcccagggcgggagctccctcagggatggatctttggagctcatggtgcacaggagactcctcaaagatgacgggcggggcgtgagtgagccccttatggaaaacgggtcgggcgcatgggtccgaggcaggcatttagtgctcctggatacagcccaggccgccgccgcaggtcataggttgctggctgaacaggaggtactggccccacaggtagtgctcgctcccggaggcggagccgcctacaacctgggggcacctccacggactcaattttccggcctcagaagggacctgccaccctcagtgcacttgcttaccctggcttcatggggtccagagatggtgctgctgcgtctcgaacatcagtttgccgtaggagaagattcgggcaggaatctgtctgcacctgtgacattgaacttacgggacttgttttccacttttactatcacacggctccaggagacaacactggtggctaatcagctgcgtgaagcagcctcacggctgaagtggacgactaatactggccctacccctcatcagacaccatatcagctcgatccagctaacatcaccctggagcctatggaaatcaggacgtttctggctagcgtgcagtggaaggaagtggatggg

SEQ ID NO: 16511 - DNA, 3033 bp, synthetic construct
  misc_feature 1..3033: note = source = /note="Description of Artificial Sequence: Synthetic coding sequence"
  source 1..3033: mol_type = other DNA
atgggagcatacgcgagagccagcggagtgtgtgcaaggggatgtctcgacagcgcaggaccgtggacgatgtcgagagctctccggccacccctgccgcctctgtgcttcttcctgcttctccttgcagctgcaggcgctcgagcgggcgggtacgagacgtgtccaaccgtgcagccaaacatgttgaatgtgcatctgcttcctcatacccacgatgacgtgggatggctgaagactgtcgatcagtacttttacggaatcaagaatgatatccagcacgccggcgtccagtacatcctggactcggtgatctccgcactgctggcggatccgactagaaggttcatctacgtggaaatcgcgttcttctcaagatggtggcaccaacaaaccaatgctacgcaggaggtcgtgagggacctggtccgccagggtagactggaatttgcgaacggaggatgggtgatgaacgacgaagcagcgactcattacggtgcaatcgtcgaccaaatgaccctcggactgcgattcctcgaagatactttcgggaacgacggacgcccacgcgtggcctggcatattgacccgtttggccattccagagaacaggcctcactgttcgcccaaatgggattcgacggattcttttttggacgcctcgactaccaagacaaatgggtgaggatgcaaaaacttgagatggaacaagtgtggcgggccagcacctccctgaaacctccaaccgccgacctgttcaccggagtgctgccgaacggatacaaccctccacgcaatttgtgctgggacgtgctgtgtgtcgaccagccgctggtggaagacccgaggagcccggaatacaatgcgaaagagcttgtcgattacttcctgaacgtggccaccgctcagggccgctattaccgcaccaaccataccgtgatgactatggggtccgactttcagtacgagaatgcaaatatgtggttcaagaacctcgacaagctgatccgcctggttaacgcacagcaggccaagggttctagcgtccacgtgctgtactcaactcccgcctgttacctctgggaacttaacaaggctaacttgacttggtccgtcaagcacgatgatttctttccgtacgcggacggccctcatcaattctggacgggttacttttcatcacgaccagcgctcaaacgctacgaacgcctctcgtacaattttctgcaagtctgcaatcagttggaagccctcgtcggcctggctgcgaatgtgggaccatacggctcgggggacagcgcgccactgaacgaagcaatggccgtgctccagcaccacgacgcagtgtcaggcacttctcggcagcatgtggcaaacgactacgcgcgccagctggcagcgggatggggaccatgcgaggtgctcctgtcgaacgctcttgcgagactgaggggtttcaaagaccactttactttctgtcaacagctgaacatcagcatctgcccgctgtcgcaaaccgccgcgcggttccaggtgatcgtgtacaatcccctggggcgcaaggtgaactggatggtgaggctgccagtctccgagggggtgtttgtcgtgaaagatccaaatgggcgcaccgtgccatcagatgtcgtgatcttcccatcgtcagactcgcaggctcatccgcccgaactgctcttctcggcatccctcccggccctgggattctcaacctacagcgtggcgcaggtgccccgctggaagcctcaggccagagccccccaaccgattcctaggagatcgtggtccccggcgctgactatcgagaacgagcacatcagagccactttcgacccagacaccggacttctgatggagatcatgaacatgaatcagcaactccttctgcctgtgcggcagaccttcttttggtacaacgcctccattggagacaacgaatcggaccaggcatcgggcgcctacatctttcgccctaatcagcaaaaaccgctgccggtttcccgctgggcccaaatccatctggtgaaaaccccactggtccaagaagtgcaccagaatttctccgcgtggtgctcgcaagtggtgcggctgtacccggggcaacgccacctggagctggagtggtcagtcggaccaatcccggtgggagacacttggggcaaggaggtcatctcgcggttcgacactccactggaaaccaagggcaggttctacaccgatagcaatggccgggaaattctggaaaggagacgggactaccggcctacctggaaactgaatcagacggaaccagtggccggtaattactatccagtgaacactcgcatctacatcactgacggaaacatgcagttgactgtccttactgaccggtcgcagggaggatccagcttgcgcgatggctccctcgaactgatggtccatcggcgcctccttaaggacgatggccggggtgtgagcgaaccgctcatggaaaatggctcgggagcctgggtgcgcggacgccacctggtgctgctcgacaccgcgcaggccgccgccgccggccatcggctgctggcagaacaggaagtcctggcgcctcaggtggtgctcgcccccggaggaggagcggcgtacaatctgggcgccccgccgcgcacgcagttttccggactcaggcgcgaccttccgccttccgttcatcttttgaccctggcctcgtggggaccagagatggttctcctgcgcctggaacatcaatttgccgtcggcgaagattccggcagaaacctgagcgctcccgtcacgctcaatctgcgggacctctttagcaccttcaccatcaccagattgcaggagactacgctggtcgctaatcaactgcgggaggccgccagccgcctcaagtggaccactaatactggccctaccccacaccaaaccccgtatcaattggatcccgcgaacatcaccctcgaacctatggaaatccgcaccttcctggccagcgtgcagtggaaggaggtcgacgga

SEQ ID NO: 16512 - DNA, 3033 bp, synthetic construct
  misc_feature 1..3033: note = source = /note="Description of Artificial Sequence: Synthetic coding sequence"
  source 1..3033: mol_type = other DNA
atgggtgcatacgcacgtgcctcgggggtgtgcgcaaggggctgtctcgattccgcaggcccctggactatgtctagggcacttagaccacctctgccaccactctgttttttcctgctgctgcttgcggcggccggagcacgcgcaggaggttacgaaacctgccctactgtccaaccgaacatgctcaacgtccatctgttgccacacacgcatgatgacgtcgggtggctgaaaactgttgatcaatacttttacggaattaagaacgacatacaacacgcaggcgtgcaatacattcttgatagtgtcatctcggcactgctggcagacccgactcgccggttcatctatgtcgaaattgctttcttcagcagatggtggcatcagcagaccaacgctactcaagaagtggtgcgggatttggtacgccaaggcagacttgagttcgcgaatggagggtgggtcatgaatgatgaagcagccacccattacggggcaattgtcgaccagatgactttgggattgcggttccttgaagatacttttggaaacgacggtagaccacgagtggcgtggcatattgatccgttcggccactctcgcgaacaagccagcttgtttgcccagatgggctttgacggttttttcttcggcagactcgattaccaggacaaatgggttagaatgcagaagctggaaatggaacaggtgtggcgggccagcacgtcgctcaagccccctaccgcagacctgttcacgggggtcctgccaaacggctacaacccgccgaggaatctttgctgggacgtcctctgtgtggaccaacctctggtcgaggatccgcgttcaccggaatacaacgcaaaggagctggtcgactactttttgaatgtcgcgactgcacaggggagatactacagaacgaatcacaccgtgatgaccatgggaagcgactttcagtacgagaatgcaaacatgtggtttaagaacctggataaactcatccgcttggtgaacgctcaacaggcgaagggatcatcagtgcacgtcctgtacagcacccccgcgtgttacctctgggaactgaataaggcaaaccttacctggtccgttaaacatgacgatttcttcccttacgcagatgggcctcatcagttttggactgggtacttttcctccaggccagctcttaaacgttacgagcgcttgagttacaactttctgcaagtgtgtaatcaattggaagctcttgtcggactggccgcaaatgtgggtccttacggctcgggcgattcagctcctctcaacgaagcaatggcagtgttgcagcatcacgatgccgtctcgggaacgtcccgccaacatgtagctaacgactatgcgcggcagcttgcagcaggctggggtccttgcgaggtgcttctgtcaaatgcactggcccgccttagaggattcaaggaccactttaccttttgtcaacagcttaacatttcaatttgtcccctgtcccaaaccgcagccagattccaagtgatcgtgtataacccactgggaagaaaggtgaactggatggtccgcctcccagtctcagagggagtgtttgtggtgaaagatcctaacggaagaaccgtgccatcagatgtggtgatctttccttccagcgattcccaagcacaccctccagaacttttgttttcggcctcccttccggcccttggattttccacttacagcgtagcacaggtgcctaggtggaagccccaagcccgtgcaccccaacctatacctagacggtcgtggtcccctgcacttactatcgagaatgaacacatcagagcaacctttgatccagatactggactgctcatggagattatgaatatgaaccagcaacttctgctgccagtgcgacagactttcttttggtataacgcatcgattggtgataatgagtcagatcaggccagcggagcctacattttccggccaaatcaacaaaagccacttcctgtgtcccgctgggctcagatccatctcgtcaagacgccgcttgtgcaagaagtccatcaaaacttctccgcatggtgttcgcaggtggtgaggctgtaccctggacagcgccacctggaactcgagtggtcggtgggtcccattcctgtgggagatacctggggtaaggaagtgatctcgcggtttgataccccactggaaactaaaggacgtttttacactgattctaacgggcgggaaatcctggagcgcaggagagactaccgcccaacttggaagttgaatcaaaccgagcctgtcgcaggcaactactaccccgtgaatacccgtatatacataacggatggtaacatgcaactgaccgtgctgacggaccggtcacagggtggaagcagccttagagacggatctcttgagctcatggtgcatcggagactgcttaaggatgatggccggggtgtctccgaacccctgatggagaacggctcgggtgcctgggttcgcgggagacatctggtgttgctcgatacggcccaggcagccgcagcagggcatagattgctggcggagcaagaagtgctcgcccctcaagttgtgcttgcccctggtgggggagccgcttacaatctgggcgcgccgcctcggactcagttttccggacttcgcagggacctgcccccatcggtgcatctgttgaccctggcgtcctggggacctgaaatggtgcttctgaggcttgaacaccagtttgcggtgggtgaggatagcggtcggaacttgtcagcaccggtcaccctcaacctccgcgacctcttctcgacctttactattacccgcctgcaggagactactcttgtggcaaatcaactcagggaagcggcctctcggctgaagtggacgaccaataccggccccaccccacatcagactccctaccagctcgaccctgcaaacattacccttgaacctatggagattaggacctttttggcatcagtgcaatggaaagaagtggatgga

SEQ ID NO: 16513 - DNA, 3033 bp, synthetic construct
  misc_feature 1..3033: note = source = /note="Description of Artificial Sequence: Synthetic coding sequence"
  source 1..3033: mol_type = other DNA
atgggggcatacgcccgcgctagcggagtgtgtgcccgcggttgtctggatagcgcaggaccatggacgatgtcccgggccttgcgcccgccgcttccgccactgtgcttcttccttctgctgctggcggcggccggcgcgagagccggaggttacgaaacttgcccgactgtgcagccaaatatgttgaatgtgcatctgctcccacacacccacgatgacgtgggctggctgaaaaccgttgatcagtatttctacggcattaagaacgatatccagcatgccggagtgcaatacattctcgattcagtgatctccgcgctgctggcagacccgactcggagattcatctacgtcgagatcgcattcttctcacgctggtggcaccagcaaaccaacgcgacccaggaggttgtcagggacctcgttcggcaggggcgcctggagttcgccaatggcggatgggtgatgaacgacgaggccgcgacccactacggcgcaatcgtcgaccagatgactctcggtctgcggttcttggaagatactttcggcaatgatggacgcccgcgagtcgcgtggcacatcgacccattcggccattcgcgggaacaggcctccctgttcgcccagatgggcttcgatggatttttcttcggaaggcttgattaccaggacaagtgggtccggatgcagaagctggaaatggaacaagtctggagagccagcacttcactcaagccaccaacggccgatttgtttactggagtgctgccaaatggttacaatcctccgcgcaatctgtgctgggacgtgctgtgcgtggaccagcctctcgtggaagatccgcgctcccccgagtataatgcaaaggaactggtcgactacttcctcaatgtggccactgcccaaggacgctactaccggaccaaccatactgtgatgactatgggatcagatttccagtacgaaaacgcgaatatgtggttcaagaacttggacaaactcatccgcttggtgaacgcccagcaggccaagggttcgtccgtccacgtcctgtactcgactcccgcatgctacttgtgggagctcaacaaagcaaatcttacgtggtcagtgaagcatgatgacttttttccgtacgcagatggcccccaccaattctggaccggatacttctcctcaaggccggcgctgaagaggtacgaaagactgtcgtataacttccttcaggtgtgcaaccagttggaagcactcgtgggcctggcggccaatgtcggaccctacggaagcggagattcggcaccgttgaacgaagccatggcggtcctgcaacaccacgacgcagtgtccggcacctcacgccagcacgtcgctaacgattacgctaggcagctggccgcgggttgggggccctgtgaggtgctgctgagcaacgcgctggcccggctgcgcgggtttaaagatcactttaccttttgtcaacagctgaacatatccatctgccccctcagccagaccgcagccagatttcaggtgatcgtgtacaatcctcttggccgcaaggtgaattggatggtgcgcctgccagtgagtgaaggagtgttcgtggtgaaggacccgaatggaagaaccgtgccatcggatgtggtgattttcccgtcgagcgacagccaggcccatcctccggaactcctgttcagtgcatcactgcccgctctgggattctcaacttactccgtggcacaggtgcctcggtggaaacctcaggccagggctcctcaaccgatcccgcgacggagctggtccccagccctcaccatcgaaaacgagcacatccgggccactttcgatcctgatactggactcctcatggaaatcatgaacatgaaccagcagctcctcctgcccgttcggcagactttcttttggtacaacgcaagcattggggataacgaatccgatcaggcatccggagcttacatcttccgtccgaaccaacaaaagccactgcctgtgtcgcgctgggcccagatccatctggtgaaaaccccgcttgtccaagaggtgcaccagaacttcagcgcctggtgttcccaggtggtccggttgtatcctgggcaaagacacctggaactggaatggtcggtgggacctataccagtcggagatacttggggtaaggaggtaatctcccgctttgatactccgctggagactaagggccggttttacactgattcgaatgggagagaaattctcgagagacggcgggactaccgccctacttggaagctcaaccagaccgagccagtggcgggaaactactacccggtgaacacccggatctacatcactgatggaaatatgcagctgactgtcctgactgaccgatcacagggcggctcatcgctgcgggatggcagcttggaactgatggtccatcgccggctcttgaaggacgacggacggggtgtctccgaacccctgatggaaaacggctcaggggcgtgggtgcggggacggcacctcgtactcctggataccgcacaggctgctgccgcgggccatcgactgttggccgagcaggaggtcttggctcctcaggttgtccttgcaccaggagggggcgctgcatataacctcggcgctccgccgcgcacccaattctcgggactccgccgcgatctgccaccgtccgtgcatcttcttaccttggcgtcctgggggccggaaatggtgctcctccggctggaacatcagtttgctgtgggcgaggactcgggacgaaatctctcagctccagtgacgctgaatctgcgcgacctgttcagcaccttcaccatcaccaggttgcaagagacgaccctggtcgcaaaccagctgcgcgaggccgctagccggcttaagtggaccaccaacactggtccgaccccgcaccaaacgccctaccaactggatccagccaacataacgctcgaaccgatggaaatccgcaccttcctggcctcggtgcaatggaaagaagtcgacgga

SEQ ID NO: 16514 - DNA, 3033 bp, synthetic construct
  misc_feature 1..3033: note = source = /note="Description of Artificial Sequence: Synthetic coding sequence"
  source 1..3033: mol_type = other DNA
atgggcgcatacgcaagggcgagcggggtgtgtgcaagaggctgtcttgatagcgccggaccctggactatgtcgcgcgctcttcgccctccactgccacctttgtgcttttttctcctgctgttggcagcagcaggggcgagagcaggtggatacgagacgtgccccaccgtgcagcccaacatgcttaatgtgcacctgctgcctcacacgcatgatgatgtgggatggctgaaaactgtggaccaatacttctacgggataaagaatgacattcaacatgcgggcgttcagtacatcctcgatagcgtcatatccgcgcttctggctgaccccacccgtagattcatatacgtggaaatcgcctttttctcgagatggtggcatcaacagactaatgcaacccaagaagtcgtgagggatctggttcggcagggacgcctcgaattcgcaaatggtggatgggtgatgaacgatgaagctgcaacccattacggagcaatcgttgatcagatgactctggggctgcgcttcctcgaagatacgtttggaaatgacggtagacctagggtcgcatggcatattgacccgttcggacatagccgcgaacaggcatcgctttttgcgcagatgggctttgatgggttctttttcggacgactcgactaccaagacaagtgggtccgcatgcaaaaactggagatggaacaggtttggcgcgcgtcaacgtcgcttaaaccgcctaccgcagatctttttaccggtgtcctcccgaatggatacaatccgccgagaaacctttgctgggatgtgctctgcgtggaccagcccctggtcgaagatcccagatcgccagaatacaatgcgaaggagttggtggactactttcttaatgtggcaaccgcacagggaagatactacaggaccaatcacaccgtgatgactatgggctccgactttcagtacgaaaacgctaacatgtggtttaagaaccttgacaaactgattagacttgtcaacgcacaacaggcgaagggatcctcagttcatgtcttgtattccactcctgcgtgctatctttgggaactgaataaggccaatctcacctggtccgtgaaacatgatgatttcttcccgtacgccgatggacctcatcagttttggactggatacttttcatccagaccagcactcaagcggtacgaacgcctcagctacaactttctgcaagtgtgcaatcagcttgaagccctggtggggttggctgccaacgtgggtccatacggcagcggtgattcagcgccacttaacgaggcaatggccgtgttgcagcaccatgatgcagtgtctggtactagccgccagcacgtggcaaacgattatgcacggcagctggcagcaggatggggaccatgtgaagtcctgctgtctaacgcgctggcaaggctccgcggatttaaggatcattttacgttctgtcaacagcttaacatctcgatttgccctctctcccaaactgccgcacggtttcaagtgattgtgtacaatcctctcggacgaaaggtcaactggatggtgagacttccggtgtccgaaggcgtgtttgtggtgaaagaccctaacggaagaacggtgccgtcggatgtcgtgatctttccatcatcggactcgcaagcccatccccccgagctgctcttcagcgcgagccttcccgctctgggattttccacttattccgtcgcacaagtgcctagatggaagccgcaagcaagggccccacaaccaatccctaggcggtcctggtcccctgcactgactatcgaaaacgagcatattcgtgcaacttttgatccggataccgggctgctgatggagattatgaacatgaatcaacagctgctcctgcctgtccgacaaaccttcttttggtacaacgcaagcatcggggacaatgagtcggaccaagcaagcggggcatacatctttagacccaaccagcaaaagcctcttcccgtgtccaggtgggcacagatccacctggtcaagacccccctggttcaagaagtgcatcagaactttagcgcctggtgttcacaagtcgttcgtctttaccctggtcagcgacatctcgagttggaatggtcggtgggccccattccagtgggggatacctggggcaaggaggtgattagccggtttgataccccccttgaaaccaagggacgcttttacactgacagcaacgggcgtgagattcttgaacggagacgggattacagacctacttggaagctgaaccaaaccgaaccagtcgccggtaattactaccctgttaataccagaatttacattaccgacggcaatatgcagctgaccgtgttgaccgaccgctcacaaggaggaagctccctgcgcgacggttccttggagctcatggtgcaccggagactgcttaaggacgatggacgaggcgtgtccgaaccactgatggagaacggatccggcgcctgggtgcggggaaggcaccttgtcctgctggataccgcccaagcagcagctgcaggtcataggctcttggcagaacaagaagtgcttgcaccacaggttgtgctggcccccgggggaggcgcggcttacaacttgggagcaccacctcggactcagttctcggggctcaggcgcgatcttcccccatcggtccacctgttgaccctggcctcatggggacctgagatggtcctgctgcgtctggaacatcagtttgcagtgggggaagatagcgggaggaacctctccgcacctgtgacccttaacctgcgcgaccttttttcaacctttactattaccagactccaggagactaccctcgtcgcgaaccagcttcgcgaggccgcatccagactcaagtggaccacgaatacgggtccaacgccacaccaaactccctaccagcttgatccggctaacattactcttgaaccaatggaaatcagaacttttctcgcaagcgtgcaatggaaagaggtcgatggt

SEQ ID NO: 16515 - DNA, 3033 bp, synthetic construct
  misc_feature 1..3033: note = source = /note="Description of Artificial Sequence: Synthetic coding sequence"
  source 1..3033: mol_type = other DNA
atgggggcatacgccagagcgtcgggcgtgtgcgcccgcgggtgtctcgactcggcgggaccatggactatgtcacgggccctgcgacctccactgcccccgctctgcttctttcttctgcttctggccgccgccggcgccagagcgggaggttacgagacttgcccgactgtccagccgaacatgctgaacgttcacctcctcccgcatactcatgacgatgtcgggtggcttaagaccgtggatcaatacttttatggaatcaagaacgacatccagcacgcaggcgtgcagtacatcctggactcggtgatctccgccctcctggccgacccaacccggaggttcatctacgtggaaatcgcttttttctcgagatggtggcaccagcaaaccaacgccacccaggaagtggtgcgtgacctcgtccgccaggggagactggaattcgcaaacgggggatgggtcatgaacgacgaagcggccacccattacggagcgatcgtggatcaaatgactctgggccttcgtttcctggaagatacgttcggcaacgacggacggccgcgcgtggcctggcatatcgaccccttcggccactcgcgcgagcaggcgtcactgttcgctcagatgggtttcgacggtttcttttttggaaggctcgattaccaggacaaatgggtccggatgcagaaacttgagatggagcaagtctggcgggcttccacttccctcaaaccgccgaccgcggacctctttaccggggtgcttccaaacggatacaatccccccaggaatctctgctgggatgttctgtgcgtggaccaacctctggtcgaagatccgcgttcgccggagtacaacgccaaggaacttgtggactatttcctgaacgtggccaccgcgcaagggcgctattaccgcacgaaccacaccgtgatgactatgggaagcgacttccaatacgagaacgcaaatatgtggttcaaaaatctggacaagctgataagactggtcaacgcgcagcaggcgaagggctcctccgtgcatgtcctttacagcactcccgcttgctatctgtgggaactgaataaggcaaacctcacctggtccgtgaagcatgatgatttctttccttacgccgacggaccgcaccaattctggactggatacttctcgtcccggccggcgctgaaaagatacgagcgcctgtcatacaacttcctccaggtctgtaatcaactggaagccttggttggcttggccgccaacgtgggcccgtacggatcaggcgacagtgccccactgaatgaagccatggcggtgctgcaacatcatgacgcagtgtccggaacttcacgtcaacacgtcgcgaacgattacgcccgccaattggccgcgggctggggaccgtgtgaagtgctgctctccaatgctctggcccgcttgcgcggattcaaggatcatttcactttctgccaacagttgaatatctccatctgcccactgtcgcagaccgccgccagatttcaggtgattgtgtacaatcctctgggtaggaaggtgaactggatggtgagactgccagtgtcggaaggagtctttgtggtcaaggacccgaacggccgaaccgtgccgtcagatgtggtgattttcccatcctcggattcgcaagctcacccgccagagctgctgttctccgctagcctccctgccttggggttctcgacctactccgtggcccaggtaccacggtggaaaccccaggcgcgggccccacaaccgattccacgccgctcctggtcgccagccctcactattgagaacgaacatatccgcgcgactttcgatccggacaccgggctcctgatggagatcatgaacatgaatcaacagctgctcctgcccgtccgccagactttcttttggtacaacgcgtccatcggggacaacgagtccgaccaagcctcaggcgcctacatcttccggccaaatcaacaaaagcctctccctgtgtcgagatgggcgcaaatccatctggtgaaaacgccactggtgcaggaggtccaccaaaacttctcagcttggtgctcccaggttgtgcggctgtacccaggacagcgccacctggagcttgaatggtcggtgggcccgatcccggtgggcgacacctgggggaaagaagtcatctcaaggttcgacaccccgcttgaaaccaaaggacggttctacacggactccaacggccgcgagattctcgaaaggcgcagggactacagaccgacttggaagctcaaccaaacggaaccggtggctgggaattactacccggtgaacacccgcatctacatcacggatggaaacatgcagcttactgtgctcactgatcgctcgcagggcggatcgtccctccgggatggttcgctggagctgatggtgcaccgccgcctgctcaaggatgacggaaggggtgtgtcggagccgctgatggagaacgggtcaggggcctgggtgcgcggacggcacctggtgttgctcgacaccgcccaggccgcagctgccggacatcggctgctggccgaacaagaagttctcgctccgcaagtggtcctcgcgccgggcggtggagcagcgtacaacctgggcgcaccacctcggacccaattctctggactgaggcgcgacctccctccatcggtgcatctgctgacccttgccagctggggaccagaaatggtgctgctgcgactcgaacaccagttcgccgtcggtgaagattcgggaagaaacttgtccgcccctgtgactctgaacctgcgggatctgttctcgaccttcaccatcacgcggttgcaagagactacccttgtcgcaaaccaactccgggaagctgcatccaggttgaagtggacgaccaataccggcccgactccacatcagactccgtatcagctggacccagcaaatatcaccctcgaacctatggaaatccgcaccttcctggcttctgtgcaatggaaggaagtggatgga

SEQ ID NO: 16516 - DNA, 3033 bp, synthetic construct
  misc_feature 1..3033: note = source = /note="Description of Artificial Sequence: Synthetic coding sequence"
  source 1..3033: mol_type = other DNA
atgggagcatatgcccgcgcatccggggtgtgtgccagaggatgccttgattccgcagggccctggacaatgtctcgagccttgcgacccccccttcctcccctttgttttttccttctcctcctagcagcagccggagctagagccggagggtacgaaacttgcccaactgtccagcccaatatgctcaatgtccacctcctcccccatacacatgacgatgtgggatggctcaaaactgtggatcagtatttttatggaatcaaaaatgatatacagcatgccggggtccagtacattttagattccgtgatctccgcccttctggctgacccaactaggagatttatttatgttgagatagcgttcttttcccggtggtggcaccagcagacaaatgctactcaggaagttgtgcgagatctagtaagacaggggagacttgagttcgccaacggagggtgggtgatgaatgatgaagcagcaacacattacggagcaattgtggaccagatgactcttgggctgagattcctcgaagatacttttggaaacgatggacgccccagagtcgcatggcatattgatcccttcgggcactctagggaacaggccagtttatttgcacagatggggttcgatggattcttttttggaaggctcgactatcaggataagtgggtgcggatgcagaaacttgaaatggaacaggtctggcgggcttctacgagtctgaaaccccctacagctgatctttttactggggtacttccaaacgggtataaccccccccgaaacctctgctgggatgtgctctgtgtggatcagcctcttgtagaagatcccagatcccccgaatataatgctaaagaactggttgattattttcttaatgttgcaacagcccaggggcggtattatagaacaaatcacactgtgatgacaatggggtctgatttccagtatgaaaacgctaatatgtggtttaaaaacctcgataagttgatccggctcgttaacgctcagcaggctaaagggtcttccgtgcatgtactctattccacacccgcatgctacctttgggaactaaacaaagccaatttaacatggagtgtgaaacatgatgatttctttccctatgcagatggaccccaccagttttggacaggatatttttcttcccggcccgccctcaaacggtatgaaaggctttcatacaattttctccaggtctgcaaccagctggaagctctggtagggttggctgccaatgtgggaccatatgggtctggggattccgcccctttgaacgaggctatggctgttctgcagcatcatgatgcagtcagtgggacatccagacagcatgtcgccaatgattatgcccggcagttggccgccgggtgggggccatgcgaagtacttctgtccaacgccttagctagacttcgtggatttaaggatcatttcactttttgtcagcagctcaacataagtatttgtccactctcacagactgcagcaaggtttcaggttatcgtttacaaccccttgggacggaaggtgaattggatggttcggctgcccgtttctgaaggagtttttgttgtaaaagatcccaacggacgtacagtaccctctgacgttgtcatatttccttcaagtgattcacaggcacatccccccgaactgctcttctcagcatcccttcctgcgctggggttctccacttattctgtggcccaggtgcccaggtggaaaccacaggcccgggctccccagccaatccctaggcgcagttggagtccggctcttacaatcgaaaatgaacatataagggccactttcgaccctgatactggactcctcatggaaatcatgaatatgaatcagcagctcctgctgcccgtgaggcagacatttttttggtataacgcatctattggggacaacgaatccgatcaggcctctggagcctatatattcaggccaaatcagcagaaacccctcccagtttctcggtgggctcagatccatttagtgaaaacaccactcgtgcaggaagtccaccagaacttttctgcatggtgttcgcaggtggtgaggctttaccctgggcagcggcatcttgaattagaatggagtgtgggacccattcctgtcggggatacgtgggggaaagaagtaatatcgaggtttgatacaccccttgagacaaaaggaagattctatactgattctaatggaagggagatccttgaaaggcgaagagattataggcctacttggaaactcaatcagacagaacccgtagccggaaattactaccccgtgaatacaaggatatatataacagatgggaatatgcagcttactgtactgacagatcggtctcagggagggtcctccttaagggatggatccttggaactcatggtgcaccggcggctgctcaaggatgacggacggggagtgtccgaaccactcatggaaaacgggtccggagcatgggttagggggcgacatctggtgctcctggacacagctcaggcggcagcggctgggcaccggctactcgcagaacaggaagtgctggctcctcaagttgtgcttgctcctggagggggggctgcatacaatcttggggctcctcctcgaactcagttttctggactacggcgagacctcccccctagtgtccatttgcttactctggcatcctggggaccagaaatggtactcttacggctggaacaccagttcgccgtgggagaagattctgggcgtaacctaagtgcgccggtgactcttaatcttagggaccttttttcaacttttacaattactcgcctccaggaaacaactctggtcgctaatcagctccgagaagccgcatccaggctgaaatggactactaatacaggacccactccacaccagacaccttatcagctcgatcccgccaacattacactggaacccatggagatccgaacttttctggcatcagtccagtggaaagaagtagatgga
